United States Patent Application Publication US 2004/0005560 A1 - sequence listing, part 2

SEQ ID NO: 837 - DNA, 3329 bp, Homo sapiens
tagtgatgaattttcccctcccaacccaaagccatgttccatctagtcgtggaattcttgtggaccatccctggaggttttccattgtgtatcgccatgcaatctcagctttccttcacaacggatgcatccatcatttccctctgccctctcagactttcttccaagggtcatgtagcttggaggctgttgactccacattgaccccagcctgttctgaattcttcaggtcaccatagaggtggtcgacggtcctgactctgaagcagataaagatcagcatccggagaataagcccagctggtcagtcccatcccccgactggcgggcctggtggcagaggtccctgtccttggccagggcaaacagcggggaccaggactacaagtacgacagtacctcagacgacagcaacttcctcaacccccccagggggtgggaccatacagccccaggccaccggacttttgaaaccaaagatcagccagaatatggtgagtttaccacctagtaatataaaattggtgggaagaataaacgaggatgatgccttggacatggagccaagcaaaaccctgcttagagcatgtggcttttggtcttctgtgaggcaaacctcacaaaggctgtcttccgcagaagcccaaaggaggcaccagcagccacatttttctggaaagactataattttaaatcaaatcataatcactataccaattatccgaagagataatttttttaggatctttggggttctttctgcctcccccgcccctcaaatttcagttttatttctaaaaatgaagaaattctccaattaacttccttgtattttttactgtaaaaattcatcctgaaaatcagtgtagtaaaagagatacgtacggctgcttcctttgaccaggcaactgtgttatgtttgatactggcagtggagtggtccttgggaacccacatgaacgtgtgtgtctcaggtcttcaaagtaaccccccccccaatacatttcaaaactccaagttgggagatctggtttcctgtgttttgggagtaggataagtgaggtaacaccttccaaattcagtgagttaaaataataaaagttcatttctcacttgagttgggtaggagaactcagctccactcagtcattcagggatccagcctcctcccattttggagttccaccaactgttagggcctgagagttatcccctggatattctgtgtccagctggtgtccagggaaagaaagggagcctggagaaggaacacacactcgtaaggccctcagcctggaggtgacccacatcagatctactgaaattctgttgggaagacctggtcacatggccccaccttggtgcaagggaggctgggaaatgtattctctgtgtgtccaagaaaaagaggaacccaatttggcaagcatctggccagattttgtggggaatcaggcagtttgttataaggatatttaatgtcttacaaatgcacccatcgtcatgattttcttgtggcttcaccatcagtggactttggaatgagcagtatatgaaggggatgacttgtcttataccatttgcatgctaaccttaatccccatttttcaacagatagaccaattgtatattagacagtcatttcttctcattaatagagaattctaagcaacttgcaaaagaacaagacaaaaatatttttttgccacatcatcagttgttcaaccaacatttattaagagcaaatgctgtgtccagcactatgctgggtacaaaaatgagcaaggcatagtctgtccccagaacagatctcaccaatctgtggaccaagggagaaaattaaccaacagagcaaaatagtgccatggtagagatgtacatcaaatgccaggggaactgaaagagaactctagaagggatgtctcttctagccagcaggctcatgaaaccttcacctttcccaaaggaagtcaagttatctgctttccaagaggaaagacgggataatagccaacatttaaatagtacttaccatgcactagtccctgttcatggcgtttcacatacactatttcattaaatcagctctctgaagcagatactgcactttacagatgggaaaactaaagcctggaaaacttaagcaatttaacctggagggctaagacctgagattcaccccaggcagtctgggtccagaatctgtcctcttgaccactatacaattctgcctttctggggaaaaaagtagcacaccacttaggacagtagaaggatctagaaatgagtgcttaggttggaagataggaatgggaggaaaagatcagcgccactgagtgagagaagcacagaggaccgcttgatgccagcctgagattgcacagcgtttgtggcttcacctgtttgcccagcccacacagaacgttgtttctacgagtagagctcagacacctggcatcagaatcattcagttgcatgtttaaaaatgccaattctgggctgcagccccttccttatgtaccagtagtcctcaaagtgtggcccccagaaccagcaccactagcatcacgtggaaatgcaaatgtttcaagcctgactccagacctactgagtcagaaactctggagtgggacccagaaatccgtttgaacaagccctccaggcactctgctgcattgcgcacctctgtttgagatgaatggttctccaccttgattgctcattatactcacctggggaatttttttttcaatcccgatgcctagacttctccccagaccagttgaattgggatctctgaatatgggtcccaggcatcgttgtcttttaaagctccgaggatgacttcattgttcagcccgggttgaaggccactgctctccatctcctgaatgagaaggtctagaagtgagacctggagtctgttgtttgcatctttgtttctttcctttttcaatcaaggtcaccagatgattctcttgcacactgaagtttgaagaccaccactagaaacaactttttcatctaaagcctttacagagtacagtttgctgaatttatgagcattaagaacaccccctctatttccatcttgaggctagaatttgccctggggcagttactgtggctacctcagccaccctcacccccagcctcctagacctagagtaccattgagctcctcacatcaggagcttgtagcatgcctgggccatggagaagctccatcctgtattatttcaaagtacctcctagtatcttccccatcattagactggacatcgggattgctactttataaataaagtcgtgttctgtgcagtacctct

SEQ ID NO: 838 - DNA, 2784 bp, Homo sapiens
attctggatctctgttctcatctctctgcatctatgttctatctcctgggtttctgtccccgcctctctttgggactctgtctgcttccttctctaggtttccatctcttccctctctgggtctctgtccccctatttctaggtctctctccccctctctctgggtctctgtctccctctctctgggtctctgtcatcctctgtgtctctgacccctccatctctgggtctctgtccccctctctatctgggtctctgttcctctctctctgggtctctgtctccctttctctctgggtctctgtccccctctttctgggtctctggcccgctatgtctctgggtctctgtcccgctgtatctctgggtctctgtccctctctctctctgggtctctgctcccctgttattctctctccctctctctgggtctctgtccccctctctatctgggtctctgttcctctctctctgggtctctgtctccctttctctctgggtctctgtccccctctttctgggtccctgtcccactatgtctctgggtctctgtccccctgtatctctgggtctctgtccccttctctctctgggtctctgctcccttgttattctctctccctctctctgggtctctgtctcttcctctctagatctctgtccccctttcactggatgtctctcccttcttctgtctgtgaccccctctctctgggcctctgtacaactccccccatctctgtcaccctctttttgggtctttctccacctgtctgaaggcacctctctctctctgcagcctctctctgggtttgaggcagccctccaaataccctcttcgtcatcacagacttgattctggatccagaacgggcgggggcgagagtcacgctggggaatgagccaatccccctaccagggccatctgtcccctgccaggacaccacccgccactccccctccctaccccctaggctggcagcctggactcaaggttccctagggatgcctgggacgggctgctggattcccagggtcctggacatctccccaccccctagcaaacgtggctgagaagcatctgttcttttgacacctttgctgaagcatctccttagcaccttttgcttcctcgaatagactcttatccgggagaggcggctggagagtctttgggcctcggagtgggggcacaggctcttgaatcccaaagggttgtctggggtctaagtctcctgagttgaaggatttgacagagctgggagagggggactgaagaccgtcaatgtgaagaaggagggggctgggggcctgaattcccggtctgagggagatggaggatttctggatcaggggggcgaagggagccagggacctggactcttggtgaaggaggaggtgcgggcttagaattctggatgttgaaaagcaggttttgccgtggatcctggtcttgggggtgagggggctgggggcctggacttccgagtctctggctcttgctgtcccgcagccttctggagaagcggcaggaaggcgcggagacgctggagctgtgtgcggatgggcgcccggtgaccacgcagacccgggacccgccggtggtggactgcacctgcttcggcctccctcgccgctacattatcgccatcatgagtggtctgggcttctgcatcagctttggcatccgctgcaacctgggcgtggccatcgtctccatggtcaataacagcacgacccaccgcgggggccacgtggtggtgcagaaagcccagttcagctgggatccagagactgtcggcctcatacacggctcctttttctggggctacattgtcactcagattccaggaggatttatctgtcaaaaatttgcagccaacagagttttcggctttgctattgtggcaacatccactctaaacatgctgatcccctcagctgcccgcgtccactatggctgtgtcatcttcgtgaggatcctgcaggggttggtagagggggtcacataccccgcctgccatgggatctggagcaaatgggccccacccttagaacggagtcgcctggcgacgacagccttttgtggttcctatgctggggcggtggtcgcgatgcccctcgccggggtccttgtgcagtactcaggatggagctctgttttctacgtctacggcagcttcgggatcttctggtacctgttctggctgctcgtctcctacgagtcccccgcgctgcaccccagcatctcggaggaggagcgcaagtacatcgaggacgccatcggagagagcgcgaaactcatgaaccccctcacggtccgggaccaaatcttcggggaaggggcggggagagaagcaagccacgaacctgcacagcgtgtagatcagggacggttcctgcagactctagaggagacgggactggaacgcaaagagaggggctagaacctaggaggcgggttgcaacccgcggaggacgagattctcaggtgctgggggcagggttaggtcgggagttgagcaggattagaaccactgacagggcatagttaaagccagcagagaagggattagaatgtgggggttttgcttagaccttgagttgaggctgtattttgggagcatttttgataaaaagagactcctagggcaggctcagtggcttccgcctgcaatcccaacactttgggggtggaggctgcaggatcgcttgagcccaggagttccagaccagcttgggcaacatggcgaaacccccgtctctactcaaaatacaaaatac

SEQ ID NO: 839 - DNA, 2720 bp, Homo sapiens
aagatttctacaaacgtgttctcgggttctggtgttttgtctcctcccctcaaaggatgtgcagtctctcagcttacgtataatgcttgcagaaattctcacaacaaaagtcttgaagccggtagtggagttactgagtaatccagattacattaaccaaatgctgcttgcccagctggcgtacagagagcaaatgaatgagcatcacaagagagcctacacctatgccccctcttacgaggacttcatcaagctcattaacagcaactctgatgtggagttcttgaagcaactaaggtatcaaattgtagtggaaataatccaggcgactacaattagcagctttccccaactgaagaggcacaaaggtaaagaaactgcggcaatgaaagctgatctcctgagggccaggaacatgaagaggtacatcaaccaactgactgtggcaaagaagcagtgtgagaagagaatccgaatcctgggaggccctgcctatgaccagcaagaggatggggccctggatgagggggaagggcctcaaagccagaagattcttcagtttgaagatatcttggccaatacgttctaccgagagcactttggaatgtacatggaaaggatggacaaaagagctctgattagtttttgggaatctgtggaacatttaaagaatgctaacaagaatgaaattccacaattagttggtgaaatttatcagaatttctttgtggagagcaaagaaatatctgtggaaaaatcactttacaaagaaattcagcagtgtcttgtaggaaataaaggtattgaagtattctacaaaatccaggaagatgtttatgagaccctaaaggataggtattacccctcatttattgtcagtgacctgtatgagaaattgttgataaaagaggaagaaaaacatgcctcacagatgatttccaacaaggatgagatgggcccaagagatgaggctggtgaggaagccgtggatgatggtaccaatcagatcaatgaacaagccagttttgctgtaaacaaactgcgagaactaaatgagaaacttgaatataaaaggcaagctctaaattctattcaaaatgcaccaaaacctgacaagaagattgtttccaagttgaaggatgaaataatcctaatagagaaagaacgcacagaccttcagctgcacatggcaagaacggattggtggtgtgaaaaccttggcatgtggaaagcctccatcaccagtggagaggttacagaagagaatggtgagcaattgccatgttactttgtcatggtaagcctacaagaagttggaggagttgaaactaagaactggacggtccccagaaggctcagcgagtttcagaatttacaccggaaactcagtgagtgcgtcccttctttaaaaaaagtccagttgccttctcttagcaagctgcctttcaaatctatagatcaaaagtttatggaaaagtcgaagaatcaattaaataagtttttacagaatctgctttcagatgaaagactgtgtcagagtgaagctctttatgccttcttgagcccttctcctgactacctcaaggttatcgacgtgcaggggaaaaaaaattctttttcattatcctcgtttttggaaagacttcctcgcgacttcttctcccaccaggaggaggagacagaggaggacagtgacctgtcagattatggtgatgatgtggatgggaggaaagacgccttggctgaaccatgtttcatgttgattggggagatttttgaacttcgaggaatgtttaaatgggtgagaagaacattaattgccctcgttcaggtcacttttgggagaaccatcaacaaacaaatccgggacacagtcagctggattttcagtgagcaaatgttggtttactacatcaatattttccgggatgctttttggccaaatgggaagttggcaccaccgaccacaatcagaagcaaagagcaaagtcaggaaacaaaacagagagcacagcaaaagctgcttgaaaacattccagatatgcttcagagccttgttggacagcaaaatgcccgccacggtataataaaaatattcaatgcactgcaagaaacaagagccaacaagcatctgttatatgcgctgatggaactgctgctaattgaactgtgtcctgagctgagagttcatttagatcaacttaaagctggccaagtttgagactacacaaataaaccaccagaaaaatgtctgtgtaataatagacatgaaacattttcctcttttccacagagggcttaactgagaaccgtattgatttttattttagttacctccctctagttttatgtgaaattagtagaatcagggaggacgggacttatgctgtggtaggcaacagaaaaaaacttctattgattttaatttaatatgaatactttaaagatcaacataccgattgaaatacaaatgttaatatgtgagaacctaggaagtattttaaatatttatgaaaatattttgttttaaaatgaactatgaatattgtacagttaatttcctcactgaggactgtgaacattcttatattatttcatgtatattgaagaacattgttatgcaatgctttgtgtaaagttattgtgaagattttattgtctttatttttaccaaagatttcccatagtttgagcattcaaagcaataaaatataaaaatg

SEQ ID NO: 840 - DNA, 2600 bp, Homo sapiens
aaatttcaacatctagatcatcatggagtgggtcttagttgatgtcttgtttcctgagcctgtgtcaaatttccctgattcttcatatgtcaaggtattcagggttgtaacccatatgctgccaatactttattgtagaaactttagatttggttacatttctttgaagagtgttgatatttttgtttcagttggcaattgatttagttgggctctagcaaatggatggatgaaaaggagagggaaggaaggaaggatatatggatggatggatggatggatggatggatggatggcagggaggaaggaaaaaagaaagaggaaagaggaagtcaaggaaggagggagggaggagagaaggaaggaagaaagatggatagatggtaggaaaaaaggaaagaaggagggaggagggaagaaaggaagaagtaaggtaggaagaaaaaagatggatatatggatggagagatggatgacaggaagggaaggaaaaaagaaagaggaaggaggaaggggaggaaggaaggagagagggagagaggagagaaggaaggaagcgagggagggagggaagaaggaggaaggaacaaagatgaatagatggatagatggaagaaaggaaaaaagtaggaggaaggaaggaatgaaggaaagaagggagagaggaaggaaggaaagaagggagagaggaaggaaggaaagaaggaggaaatatggatatatgcatgaatggatggcaagaaggaagtaaaaagggagagagggagggaggaaggaaggaagggaggaaggaaggaagaaggatgggtcaatgaaaaaaaatatgtattatgaagctgtaaataccatgcactatgttagcaaaaaatatcatttgtttgtgaaccaaggtgaggaattgggaggatgacacttagtccaaccacctgggaagcctctcagtagagatgaaccatggccctccccctgcccttcaggccagtgcacataccacatcttcacattggttctgatctgagaccatcaggtggagttctgttgggggaaagacaaagcaacaataaaagcaaaagaaaacttttcggtgaactaatcaaaagccttaatcaattctccctgtttccttctctgcccccagagaggagggaaggctcacatgcacaatgagctcattttcctgagtgggttctaataaaggacagaacattaggtttttctctttaagggaacataacgctccttttagaattcattgggatattttggaacacaaataacaacagtggaaggcactcgtgtggtgataatttaatgtaattccgatgtcagtgacacgccacagtggcctagtcagcttccctgggggcggtttcttttgtgttttgcctgggagagtgagtgcgcggacattcatataccagcctggcagccccgtgcacatttcctcttttctcatctccattctcagaatggtttttttattataatccaaaggactcctagggagacaaaagaagttggagatttttccaaactcctaatcagaagagagtccacaagccaaaactagcccacatgcattttcgggtttggcctggaaatattttgtaacactttaaaggatttgttccaacatttaaaatagaagactttgcatggcaattccaatgtcaggcatccctagaaaaatcagaagagttggcaacctgggactcaccctcctgcactccaacaattggctggggtagagtagcagtagcctgccccttaatttggcctgccacgttctcttatatactatggacctatcagctccacttcactcatccgcattttttgccagcctttgtgggcatctgaccctgccaatcctgcccttaagctttggaagcctcaagccctggtcttctccacagactagcctaggtctctctatttcttgaagaagagagctctgggagccaaccgggtctgtactgttgtgatggaaatttccacccaatgaaaggaagaactagttcaagatttcccttttctctttcaaaaggttttgctgtagtacactttcagtcctgccgtttagttgatgcagtttgttggaatgacattgggctgctaatggtgttggccaaactctttgccatttcactgaagatcagtgtcatccagaagcaaggctatggagaagaagcaacccaaccacccacctcaggtcctaggcccagaatataagttctaaaggaaggtagatccagctctgcccacctgcccacactgctactccattttatatgcaactggagctgcaacaatagctctacagagcgttaggctcaaaagataccttacaaataattcagtccagtgtttttttttccatcaggagccaatagaaatcaagaaagtgatggtcaggccagatggctttagagcctcccatcccattcaagcatcatcagatatttgttaatagcccattttgtagccaggtgtggtggctcacacctgtaatcccagctactcagcagggtgaggtgagaggatcacttgaggccaagagtttcagaccagcctgggcaacatagccagacctcgtctct

SEQ ID NO: 841 - DNA, 3773 bp, Homo sapiens
tgagtaaacagggtagcatccttttagctggttgtgctttgactaactgatctgttctttcttacttgtagaagattccaagcaagaaagtattcagcagtggctggactctggattctttgtctctgcaaatgaaaactttcaacaagtcattgaccgcactgtttctttgtatgaacaagggatggttcaaatgactgtgaaagactacatgagatctttgcatcagttttcagaaactcccatcctatccagagggaccagtttcaactcttgctattctactgcaagtgtaccacaaagcattcctgaatggctggaattttgggagatagatccagtggagattctcttggatctggggtttggtgctgatgagccagacatctgcatgcaaatcccagccagattccttggttgtggctcagcagccagaggaatcaacatccgtgtttttcttgaagctcaaaagcagcgaatggacattgagaaccccaacttgtacggtcgtttccgacagctggaaatcctggaccatgtgaccaatgccttctcatctctgctgagtgatgtcagcatcctgccaaacagagctgaagagaaagctggaggagagagtgtgcaaagaacctcagtgagtgccgccaaagagcatcgaagaagaatgggtaaactcttaaggagagcttccaaacagaacatcaggcgggattgtaacccagaggtatcagagtccttcaaggtgaaggatgaagtttttgtcccctttacaaaaccatgggattgtggagcagagctagcagcaacctcaatcaaccacaagcaaaatcatttgtctctgtcagtagaacatcagtctctccaagcctgtgatgatttgctaccttatcctcctcatggtcttctgagcaagcagtggccttgctcatctatgccggccaagcaggctcctccttcctgtgtgtctgaggggtcagtcaagggcagaactcagaaggagaacttatttcagactaacaagctcaagagcttgtctcgtcttgcaggcaaaggaccagactcatttgaaatggaagaggtccaaagctttgaagaagagactggtaatcctcttgacatgacttcaggaactgtaggtgccagggtggacagagcaaatagctgccagtctgacagcagcgggttcctggaggagccgctggaaccgctgcccctccagatgccttccttgccaaacagccagagtcctgctgagaatggaggtagaaagccaagagatcagagccacagcttagtatcatcccaggactgtcagctagagtcggatgggccagattccaaaagtagggcgagcatgtctttttcaagccaagaagtgaatgccttggaacaaagggcctcagtatctgtgatggaggaagagtttctgcttgaggccatggaggggccaccagagctgtatatcccagacatggcctgtgccaagaccaccacgaggggagaatgcccaaggaaagacagccatctgtggcagcttctgccaatgccccatgctgagtatgaggtcaccagacccacagccacttccaaatatgatcatcctctggggtttatggtaacccacgtcacagaaatgcaggacagttttgtgaggcctgagggagctggcaaagtgcaaagccaccacaatgagtctcaaaggtcacctggaaatgatcatactcaagacaagttccttcatgttgactctgaggccccacgagaagaggaaagcagtggattctgtcctcacaccaaccacagcttactcgtaccagaaagctcatcacagtgtatccccaagcacagtgaaatcacaccttatgcaactgaccttgctcaaacatctgaaaagctcattccccacctccataaactgcctggagatcctgcccaggtgaagtcaaggtctggtactttgggtcagatactacctgggacagaagctgagatggaaaaccttcctctaaatactggcagctccaggtctgtaatgacccagatgtcctccagcctggtgtcggctgctcagagggctgtggccttggggactggtcccagaggaacatctttagaatgcactgtgtgtgatcctgttaccgcaacagaaacaagactggggacaaaagcaagacagttaaatgatgcttccattcagacttcagctctaagcaacaagaccttgacacatgggccccagcccctcaccaaatccgtctctctagactcaggcttctctagtatctgcccaatgggcacctgccatgctatacctgcccactgctgcatctgctatcatcaccaccctcactgccacggggagaggcaaagccctggccctgaaccctcagtctgtaggcactgcctgtgttcactaactggtcaccaggaagcccagttcatgacgactttgaaagcccttcaggacactacagtgagggagctatgttcctgcacagtccatgagatggaagccatgaagacgatatgccaaagtttccgggagtatttagaagaaattgaacagcaccttatgggacagcaggccctcttttccagggacatgtcagaggaggaaagggaggaggccgagcaactgcaaacgttacgtgaggccctgaggcagcaggtggcagagttggaatttcagttaggagaccgggctcagcaaatcagagaagggattttactgcagctggaggttctcacagcagagccacctgaacactattcaaatctgcatcaatataactggatagaagaaagcaatgggcagacttcatgttctaaaatccacccaggcatggccccgaggactgtgtttcctcccgatgatggccaggaggctccctgttcaggtgggacccagttggctgccttcactccacccaccttggagaacagcaccaggatgtctccttcatcatcagcttgggcaaagttaggtccaacccctttgtcaaattgtcctgttggagaaaaggatgcagatgtcttcctctagatcagagcaggttgggcttttgacctccccttctccatgtagactccgagctctcctgcagtttcttccttgctccttccctgtaacgcctacggaatgaagaggaacacctggctctaggatgtccctcacccggcagccatctgctttaccagtctcatttcctgctcatccctcagatgaatctccaattctattcccctaaaccacctcctgtgttcctgtttcctctcctttgctgaaacaaatgaagtatctcaccagtaagtcctagggcagaccccatctcctacacaggctttccttgatgatctgtggcagaagtgatccttattttttgaaactcctatatcactttgcttttttgttaaaacactgaaaacctcctgtcttgtgttaccattatctgtgtaggtcatatcttctccagtaaacttaaagctatttgaggactgtgtagtacctactaccctgtgtttaagagagactatctggaggaaagtacagactcctttctttatcatgtgtgacctcgggcacttgctctctttaccctagtttcttcctctgtaaaatagagagaagaaaaacaacatagagttgttggacagaataaataccatgaatcctgtgcagtgtttaatccaatgtccatcacgtagtaagtgttcaatgcatgttggctattattacaagtgcacataccaagaactcaataaatgctaactgt

SEQ ID NO: 842 - DNA, 1214 bp, Homo sapiens
gacaataatagcctagatgaactcccaagagatctattaaatcttgtgggctgaataaatatctcgtgcaggactgtgcaacagtagcccagagcatcctgcctgtgggcatccacctcccaggtgagggcagtgggaagctggcccgacggcagccagaacttgtttctcacctcccaccagcaaccccccacccaactctgggccccaggcacacgaagcacaagtctcaggggaccattcccacattgggggatcctgagggagcccatcactgcctcttgcatacaactgtccactaggaggcacgcccagtgtgggagagatgtatggtcttgccttccacctgtaaaaactgcacatatgcaagccatttgcactctggaactgcatgccgtgaaaactcctaatggtgtggaacttagtttgaatttgaaatcacgccgcatgcacaaagggacaggcccaggcccgacctcaggtcatccgcccgctggctgcagagcatccctgggagccaaggcgaggcccgtggagcctgagctttgtgtagctcgagctttgtgtagctcgtgcacttattatgcaccacctcccttcagtcaccactcctcttcctccgccatcctcatttatactgattgcacaccccccgctcaaacaacaatgtccttattatgatgaccatctcgtagtggtacattccattcctatttaaggtaagcccaaagcccacttttggattttctcgactgtccgagaaaagttgtgtaagcgcctgcgttcttctgggtttggctagatagggttgtgtccctctatggaatggagagtgatgtgggcaagggtgtcattttctcgcacaatacaactcactgaggatgcttctgtagaagtgagaaacacgatgagtacattcagaattacaataactcactctcactgggtaacttctcatgatagatttgtatgatcaatacgggtctatttttatgtcaactgaacactgtagggtaccttccagtctttttcaagattgttaaattgagacaagtaattgaataatttgtcctatttttattttaaaaaaagtgaatggactgaaatgttaaatgtgaatgtacatttcttaattgcaacttttctactgagtgtttgcactatactttctggaatcttatttaacaaaaataaagggaaaaaattgcttgact

SEQ ID NO: 843 - DNA, 981 bp, Homo sapiens
ctttttcactgcaaggcggcggcaggagaggttgtggtgctagtttctctaagccatccagtgccatcctcgtcgctgcagcgacacacgctctcgccgccgccatgactgagcagatgacccttcgtggcaccctcaagggccacaacggctgggtaacccagatcgctactaccccgcagttcccggacatgatcctctccgcctctcgagataagaccatcatcatgtggaaactgaccagggatgagaccaactatggaattccacagcgtgctctgcggggtcactcccactttgttagtgatgtggccttctcctcggacaaccggcagattgtctctggatctcgagataaaaccatcaagctatggaataccctgggtgtgtgcaaatacactgtccaggatgagagccactcagagtgggtgtcttgtgtccgcttctcgcccaacagcagcaaccctatcatcgtctcctgtggctgggacaagctggtcaaggtatggaacctggctaactgcaagctgaagaccaaccacattggccacacaggctatctgaacacggtgactgtctctccagatggatccctctgtgcttctggaggcaaggatggccaggccatgttatgggatctcaacgaaggcaaacacctttacacgctagatggtggggacatcatcaacgccctgtgcttcagccctaaccgctactggctgtgtgctgccacaggccccagcatcaagatctgggatttagagggaaagatcattgtagatgaactgaagcaagaagttatcagtaccagcagcaaggcagaaccaccccagtgcacctccctggcctggtctgctgatggccagactctgtttgctggctacacggacaacctggtgcgagtgtggcaggtgaccattggcacacgctagaagtttatggcagagctttacaaataaaaaaaaaactggcttttctgac

SEQ ID NO: 844 - DNA, 885 bp, Homo sapiens
atgcgcagcgcgcgctctacggcgctgaaccggggcgagcagagagctgtcagatactatagccatatgaagttgaacatggcagaagaagaggactatatgtctgattccttcattaatgtccaggaaaagtggcattggtcatgaggcatcattaaaacggaaagcagaggaaaaattggaaagctacagaaaaaagattcacatgaaaaaccaagctgaagaaaaagctgcagaacagtttcgaatgcgacttaaaaataagcaagatgaaatgaagctagaaggagatctcagaagaagccagcgagcctgtcaacaactggatgtccagaaaaatattcaggttcccagggaagcatggtactggttgaggcttgaagaggagactgaagaagatgaagaagaaaaagaacaggatgaagatgaatataagagtgaagatttaagcgtactggaaaaattacaaatattgactagttatttaagagaagaacatctatattgtatttggtgtggaacagcctatgaagataaagaagacctatcttcaaattgtccaggaccaacttctgcagatcatgactaagattattcccaataaagtggaaacttgaaaaatgttattacttcctagggatagacaatttagcagttggaaatctcaaattttttatgccagtaaagaaagggggactttatataatgttttgttctttttgtactttagaatatgaatgttcattgacttgaaaaaaataatgcaatggcatttcagaacacaagtatcacagagatggacagttacaatttattgctatattgtgatacgtgaggggtttaaggacaccaacaggtaacttcttattcccctcttcactttgg

SEQ ID NO: 845 - DNA, 2593 bp, Homo sapiens
ggagcagctgcgtacgctcatggacagtcctccgaggggcgaagccgggcagctgggcatgctcagtagtagttccccagcgtgcgcccggggagaccgggaacatggcgctgggagcgctgtagcagctgagaaggggctgaggcaccgccgcttcgctgacagccggccaccagaaatacactgtggtgaaatgcttccacctcttgctaaaatgaacactgagaaaaaatgaagaagactgacaagcaccagcgaaaagttgcagaatagaaatagccacactcctctggagtctttaattcatccacagccatcatataaaggttttggcatcgtgtttgggaagaaaaagaaaaagattgaaatatctggcccgtccaactttgaacacagggttcatactgggtttgatccacaagagcagaagtttaccggccttccccagcagtggcacagcctgttagcagatacggccaacaggccaaagcctatggtggacccttcatgcatcacacccatccagctggctcctatgaagacaatcgttagaggaaacaaaccctgcaaggaaacctccatcaacggcctgctagaggattttgacaacatctcggtgactcgctccaactccctaaggaaagaaagcccacccaccccagatcagggagcctccagccacggtccaggccacgcggaagaaaatggcttcatcaccttctcccagtattccagcgaatccgatactactgctgactacacgaccgaaaagtacagggagaagagtctctatggagatgatctggatccgtattatagaggcagccacgcagccaagcaaaatgggcacgtaatgaaaatgaagcacggggaggcctactattctgaggtgaagcctttgaaatccgattttgccagattttctgccgattatcactcacatttggactcactgagcaaaccaagtgaatacagtgacctcaagtgggagtatcagagagcctcgagtagctcccctctggattattcattccaattcacaccttctagaactgcagggaccagcgggtgctccaaggagagcctggcgtacagtgaaagtgaatggggacccagcctggatgactatgacaggaggccaaagtcttcgtacctgaatcagacaagccctcagcccaccatgcggcagaggtccaggtcaggctcgggactccaggaaccgatgatgccatttggagcaagtgcatttaaaacccatccccaaggacactcctacaactcctacacctaccctcgcttgtccgagcccacaatgtgcattccaaaggtggattacgatcgagcacagatggtcctcagccctccactgtcagggtctgacacctaccccaggggccctgccaaactacctcaaagtcaaagcaaatcgggctattcctcaagcagtcaccagtacccgtctgggtaccacaaagccaccttgtaccatcacccctccctgcagagcagttcgcagtacatctccacggcttcctacctgagctccctcagcctctcatccagcacctacccgccgcccagctggggctcctcctccgaccagcagccctccagggtgtcccatgaacagtttcgggcggccctgcagctggtggtcagcccaggagaccccagggaatacttggccaactttatcaaaatcggggaaggctcaaccggcatcgtatgcatcgccaccgagaaacacacagggaaacaagttgcagtgaagaaaatggacctccggaagcaacagagacgagaactgcttttcaatgaggtcgtgatcatgcgggattaccaccatgacaatgtggttgacatgtacagcagctaccttgtcggcgatgagctctgggtggtcatggagtttctagaaggtggtgccttgacagacattgtgactcacaccagaatgaatgaagaacagatagctactgtctgcctgtcagttctgagagctctctcctaccttcataaccaaggagtgattcacagggacataaaaagtgactccatcctcctgacaagcgatggccgggtttcttcagtgctccggggattcctagacttgatgttggtgagggagccctctcagagagcaacagcccaggaactcctcggacatccattcttaaaactagcaggtccaccgtcttgcatcgtccccctcatgagacaatacaggcatcactgagcagaggattcgtgtaggtggcaaagctagatgaggacatgagaataattcaggagaacaaaaggaaacacagaacatgcaaaaggcctgtgcattctagaccagccaattggtgggacagcgtgatgaccggcagggttcaacagaccagggcatcttcttgtgtcttaaacaggcatctctccactgacagccggtgtggtcacttggagcacggctttaataagtcattattatatttttcagcccttcatccagcaaatcagaaggactcagtacaaactccgttatgatatatcctagccacatgcagggtaacatgtaggattttctatattgaaagaatacttttctggc

SEQ ID NO: 846 - DNA, 2196 bp, Homo sapiens
gattcatgcagaagcccggcttcctgcgtcatctgtgtggccactcgcaggagaagcactatccttgcagcccttgtggtgagagcttcacctgtccctcctggcttgtgcgtcaccaggacagccatgctagccaggcctctccatcttgcctggtttgtgagagggactcctcgaccgatgagccgcccacgggcctcaggggtgcagtgtgggggagcacccctagtaatccttctgccgcactcagatttgagggcactggtacagagctgggcctcaggaggtgccctggggacaggcagcggggcagtggtgatcaggaaggtcttgggtgggggtcccttgcccagttctctttctcgcgtgaagatggagaatgtgggtagcacccagagagctccctaaaggggctctgagggcccaggggcagttggtgccccttaaatctgagcaacctctcctgggggccacttcttggccaggtcaaagtattctggccatggtcttggcttcccgggggagggctgttctcccaggcactgagattgcccatgggccttctcgttgcagggaggcggctgggatagaggccagtcccaaacacctgagcctcactgaggggaaggcctgggcttggagatggggtgcgcaggagtggctggctttgccttgttctattaggcgagtgattttcagagacaaaggtccaagttaggagacgtaattactcagtgctttgaagggacatccaaggtgctcactcttagccatagccgttggtttcctggatgctgactgtgaagattctaaagtgcttcctagggtgggcggtggtggcaggaggccttggacggagtccaggccagacccagcctcctgtttaataggctgagcccaagcgtccctcagatgcgaatccaacagccttggtgagttgtaagatttcatggaaactttccctgacttctgcctcccccttgctccccattacctgggaaaggcagctttgtgggccatgtgtcccggaagggcctgggctggctgtggcccagtgctcaggaccagccatcttggccctcacagcgccctgcccagttggtgtaatatttgtcttcaagccattgttggagcaggcaggcaaagggggctttctgaggatccaacgtgtgccagccactgggatacaaagacaggcctggttcctagctgtggggctgggaagggtatctgacatcaatggtggcacctggcagaggacacacagacaacagcaggcagcatgggctgcagtaaatgttgcagaagcacctaaaggttgagcagaagggaggtaggaaacctggacatggcctgccagcagctgagaagcccccctgagatcctggcggccccgccaccatctgaagatttaggccagtcccttgggcttttcaggcaggcccttatggtggccggccagtttgggaccctcccattttgatacattagttccccctcagctactggagatctcagccacaactgggctccagctgtgacccagactccgccaggatcccctagatccccagctgtcagataatcccctgtccccctcctcctccccactcaacccccagtgcttgacatgaatgcatgtgtgcttcctaggactagaggccggtgctgtctctaccattgccctcactttaaggggcacacgagcagatggtagcaagccctggagagcagcactcgggcaagtgaggtggctctggcactgcccctggactttcatgtttgtagcttgagctggttttaattggaagctctgtgatttacataatcacttacaatctctgtaaataaggaactatttatgaggaattgtaaatttcctctctcccccttcttaccctgtctgtgatcttgtctgtgatgcagtaatgatattccactctaggttcccatgatcagtggtgaaatatagtgattttcacctgtgcttccattctgaagttctggaaagaagtactggatggactgaagtccaggacaacgtcccaaagaaaggcagagtccaggtaggcttggaggaccaagccctggatgagcactggagggcagaggcctcagtgtccagcactgtgccctgcacatggaaagcccctacgtttgtggaatgaatgaataataaaaatgttttcataagtg

SEQ ID NO: 847 - DNA, 2253 bp, Homo sapiens
acatgaccggctttaagcaacatggcggctgccgtggtgcagcgcccgggctgagcgacagcaagtgcagcgggctcctaccccgggtgaggggtggcctccgcgtgggatcgtgccctcttcagcccgctcctgtccccgacatcacgtgtattccgcacgtcccctccgcgctgtgtgtctactgagacggggaggcgtgacagggcccgggtcccttctcagtggtgctctgtgcttcagggcaagctccccgtctccgggcgcacttccctcgcctgtgttcggtccatcctcctttctccagcctcctcccctcgcaggtgggatcgtcggtgggaccggagcgcgggcgggcgcggccccccgggaccatggccgggtccgacaccgcgcccttcctcagccaggcggatgacccggacgacgggccagtgcctggcaccccggggttgccagggtccacggggaacccgaagtccgaggagcccgaggtcccggaccaggaggggctgcagcgcatcaccggcctgtctcccggccgttcggctctcatagtggcggtgctgtgctacatcaatctcctgaactacatggaccgcttcaccgtggctggcgtccttcccgacatcgagcagttcttcaacatcggggacagtagctctgggctcatccagaccgtgttcatctccagttacatggtgttggcacctgtgtttggctacctgggtgacaggtacaatcggaagtatctcatgtgcgggggcattgccttctggtccctggtgacactggggtcatccttcatccccggagagcatttctggctgctcctcctgacccggggcctggtgggggtcggggaggccagttattccaccatcgcgcccactctcattgccgacctctttgtggccgaccagcggagccggatgctcagcatcttctactttgccattccggtgggcagtggtctgggctacattgcaggctccaaagtgaaggatatggctggagactggcactgggctctgagggtgagtctggtcttggcctgggggtaggtcagcgacgttctcactgatccctgtttcctacctttggaccccttcccaccgcccatttttcttttaagagacagggtcttgttgtgtcacccaggctgcagtgcagtggtgcagtcatagctcactgtagcctggaacgcctgggctcgagtgatcctcccacctcagcctcccaagtagctgggactataggtgcccgccaccatgcctggctaattaaaaaaactttttctttttgtaggctgggtgtggtggctaacacctgtatcccagcattttgggaggctgaggcaggtggatcacttgaggtcaggaattcaagaccagcctggccaacatggtgaaaccctgtctctactaaaaatacaaaaattagctgggcgtggtggtgcatgcctgtaatcccagctactcggggggctgaggtaggagaatcacttgaacccaggaggcggaggttgcagcaagctgagattgtgccactgcactctagcctgggcgacagtgcgagactccttctcaaaaaaaaaaaaaaaaaattttgccaggcatgatggctcacgcctataatcccagcactttgggaggctgaggtgggcggatcacctgaggtcaggagttctaggccagcttgaccaacatggtgaaaccctgtctctactaaaaatacataattagccaggcatggtgacgcatgcctgtaatctcagctactcgggaggctgaggcaggagaatcgcttgaacccgggaggcagaggttgcagtgagcagagatcgtgccattgcacacacaaaattttttttttttgtagagatggggtctttgtatgttgcccaggttggttttgaactcctggcctcaagcaatcctcttgccttggcctcctaaagtgctgggcttacgggtgtgagccatgcgcctggctccaaataccccttttttggggcagctctcattctgctgagcctgcaggagactggctgccctcacctggaagccatgtgctagacagaattcttgcgtgcaggtgacagaagcccattgtaaaactgtaagccccctagaggccgggtgcggtggctcacacctgtaattccagcactttgggaggccaaggtgggtggatcacagggtcaggagattgagaccaccctggctaacacagtgaaatcccgtctctact

SEQ ID NO: 848 - DNA, 2445 bp, Homo sapiens
gcttcatgaatgcacacagtcacgtcgcagaagtgcccacccagcttctgcccattgagggtctcaagcagagagcgtgagaagttctgcagatgtatgtggcgcacagcctctacagccgccgactccgactcctcttcaggcaccaggcctggccgtggccgccttctcaccgactccaaggcagcacttccgggcgcttctctttatttttatacagttttattgagatataatttacatgctatccagcccatctatttcaagtgtaccatgcaaggggtttgtatatattcacagagttgtgtatccatcaccatcgttttagaacattcatcactccagaagaaactacctacccatcagcagccactgcccatttccctgatctgccccgccctaggaaatccgtaatcactttcagtctatggatttgcctattctagaccattcatataaatgaagtcacacaacactgggtcttatgtgactggcttctatcaaagtttgcaaggttcatttatgttcatgggctgaccccacattggacaccgctgcatccatgtccatcacacaacacagctgccgtttcttctgcctgcttatgggaaagtcccctcttctcctccgttttcttctcttcctgccctatcacaccgtgcacttctccctttccttaaagaaccaccatcaactttaggaggagggaaaggggtggctctggcaggaaaagccagaatcccctctagccagcagagagagagaggaatggctgcatgttttctcccccagtccaaggcactgggtcttggctgggttgaaggttccaagctgctctcctgctgtgtcggtgagttctggtcaacctgcaacctcctgatatggccattgcagttcatcgagtcttcagggactccccatggcctggagtactttgccttgcttacacgggagaggagaatggatttatagagaacatcatctaaatccaacttgaccattgtgtggccacacttgctagattgctatagtctaaatctagcattgtagaaagacgggggagcttggagctgcacaaacccaggtctggaactggctccttaccttggaaggtgaatgatcctgccaggactcttagcctccctgggtctcaatttctttatctgtttcatgggaatgaggatctctgctgggtggttgggtgatgtgggggctgtgtgaaaacagcttgtcaatacaagccaaaatagaaatatttctccacagagtatgaaggtcaaatgagagaatacatttaaattaaatggaaaattaaaatggtaaaaaatgcaaagctgtattgaaagttccgagcttctctataaggagctttttgactatgtaagaatcctgtactcgttccccctaaatataaaaaaaaagttgaaggaggcagaagggagagtgatgcacgatgggcaaggacttcacctgctgttgctggctttgaggatggaggaaggaggccacaaacctagaagctggagcccctagaagctagaaaaggcagggacccgattctttccttgagcctccagaagggacacagccccgccagcaccttgactttagcctggtgagatcctcttaggacttttggcaatcagaactataagacagaaatggaagccactgagtctgtagctgtttgttgcagcagcaatagaaaactaatgcagggcccaagaaatcactggtgatgagatcgggaaagtgggctcaggaggtctggatctgtgatgagatggggaaagtgggctcaagaggtctggatctgtggtgagatgggggaagtgggctcaggaggtctggatctgtgatgagatggggaaagtgggctcaggaggtctggatctgtgatgagatggggaaagtgggctcaggaggtctggatctgtgatgagatgggggaagtgggctcaggaggtctggatctgtgatgagatgggggaagtgggctcaggaggtctggatctgtgatgagatgggggaagtgggctcaggaggtctggatctgtgatgagatggggaaagtgggctcaggaggtctggatctgtgatgagatgggggaagtgggctcaggaggtctggatctgtgatgagatggggaaagtgggctcaggaggtctggatctgtgatgagatcgggaaagtgggctcaagaggtctggatctgtggtgagatgggggaagtgggctcaggaggtctggatctgtgatgagatggggaaagtgggctcaggaggtctggatctgtgatgagatgggggaagtgggctcaggaggtctggatctggggtggggatctggagtggaaggggaattcatttgttcattgtctatccttttgtattgattgaattttttatatatatatgtgaattttcacaataaaatttttttcc

SEQ ID NO: 849 - DNA, 2528 bp, Homo sapiens
agctttgtcccttgcctcaagttcactgcagggcttctctcctctctggttatacagaaatgaaattataaaccaccagtaaccttggaaatttcaatcgattccaaatgactaaatatttaattgaatcattgcctatacttccagggatgactctggcgtttgctttttattgagggctccatgaaagccaggctctgcaatggctgctggggactgtgtctgttgcaaggaggctcccctgcagtgaggagccggggcactgcaagtctgttccatagcagccctttttgcaaatggtagttgatttttgcagaaggtttgtggccagatcgctatgtataatactgatgaagcatttttgttccagctctgtctcggaagacctaggctgtagacgtggggatttcagtaggaaacattatggatctgtggagctgcttatttccagtgatgctgatggagccatccaaagggctggaagattcagagtggaaaatggctcttcagatgagaatgcaactgccctgcctggtacttggcgaagaacagacgtgcacttagagaacccagaataccacaccagatggtatttcaaatattttttaggacaagtccatcagaactacattggaaacgatgccgagaagagccctttcttcttgtccgtgaccctttctgaccaaaacaatcaacgtgtccctcaataccgtgcaattctttggagaaaaacaggtacccagaaaatatgccttccctacagtcccacaaaaactctttctgtgaagtccatcttaagtgccaaagatgggcagctcactgatgatgagatgttcagcaatgaaattggaagcgagccttttcaaaaatttttaaatcttctgggtgacacaatcactctaaagggctggacgggctaccgtggcggtctggataccaaaaatgataccacagggatacattcagtttatactgtgtaccaagggcatgagatcatgtttcatgtttccaccatgttgccatattccaaagagaacaaacagcaggtggaaaggaaacgccacattggaaacgatatcgtcaccattgtgttccaagaaggagaggaatcttctcctgcctttaagccttccatgatccgctcccactttacacatatttttgccttagtgagatacaatcaacaaaatgacaattacaggctgaaaatattttcagaagagagcgtaccactctttggccctcccttgccaactccaccagtgtttacagaccaccaggaattcagggactttttgctagtgaaattaattaatggtgaaaaagccactttggaaaccccaacatttgcccagaaacgtcggcgtaccctggatatgttgattagatctttacaccaggatttgatgccagatttgcataagaacatgcttaatagacgatcttttagtgatgtcttaccagagtcacccaagtcagcgcggaagaaagaggaggcccgccaggcggagtttgttagaatagggcaggtgggttttcttctgaaaccttttctgcgagacatgtagttttgagttccatcctaaccagatggcccatgtgcaaagactttgtttgcctgctgctgtaggagctctgtaatttctgttaggattgttgtggcaaccacgagtgagatttttgagaaccgagtaggtgcagttctctgcaggcatcactgagagagcaacactctgcagaggtaggaatgctactgcctcaaggcaagtagccacagggcccagctctgggcccccctcttccagagaacacagatctcttgcctgcctcctaggaattttctgaagagtgaggagccgatttgggaaatgccccttaaacccatgactggcaggaggaagcacagagtggcagtggcactcacagaagacttgaattaccaccctatgacttggaaacaatccaagtcaccaccaagttaggtggtgcccagtcatccccttattccaggcattggagaaaatcactccctttgccccgctcgcatgtgacactggtatttctcagttccgggaggcgacacagctgtctgccttgatcacacatcacagcatggagaaggaggagtgccctcagctgcaaataaggttctggcccagaagtagaaagctagacaaggcaggtggagagaggaaagccatgtaatcaagggaagcttagttacaaggttctcaaacattggttcttgtttaaagatacccagactttattcccagagattctgattcatcaagtttgaggagggacctgagaatctgcattttttcaagctcatggtttataaatcacagtaatgatatattgattcattgaaatgataaaatgcatttggataatttgggttgcgacattgtcattaaggcttcactgtgtccagctaacttcaattcttgattaacaagtcagtagaggaacccgaaatgttagcctgcaattactcctgttttattaaatttttgtcaaatcac

SEQ ID NO: 850 - DNA, 2787 bp, Homo sapiens
ttttcccctcccatctcctcagatcggtggacgtgctcgcctccactcggggccaggtctatgtcccggtttcccgcagtcgcgggcagggcgccaaggcggcaggaggagggtgagcggtcaagagacctccaggaagagcggctctcggctgtttgcatcgccgatagagaagagaaaggatgcacgtcccaggagggaggaactactccaacttttcctattcagaaacaaagaaaaaagattattcaagctgtgagggacaattcattccttattgttactggaaatacaggaagtggtaaaacaactcaactcccaaaatatctatatgaagcagggttttcacaacatggtatgattggtgtaactcaaccacgaaaagtagctgctatatcagttgctcagagagtagctgaagaaatgaaatgcactttgggatccaaagtaggataccaagttcgttttgatgattgcagttctaaggagacagcaatcaaatatatgactgatggatgtttactgaaacatattctgggagacccaaatcttaccaaattcagtgtcattattttggatgaagcccatgaaagaactctaactacagatatcttatttggtttattgaagaagctatttcaggagaagtctcctaataggaaggagcatttaaaagtggtggtaatgtcagcaactatggaattagccaagctctctgcattctttggaaattgtccaatatttgatatacctggaaggctttatccagtcagagagaaattctgcaatttgattggtccacgagacagagaaaatactgcgtatattcaagcgattgtgaaagtcaccatggatatccatttgaatgaaatggctggagacatcttggtttttctgactggccagtttgaaatagaaaaaagttgtgagttactttttcagatggcagagtctgttgattatgattatgatgttcaagataccaccctcgatggcttgttaatattgccgtgttatggatcaatgacaacagatcaacagaggaggatatttttgccaccaccacctggaattagaaaatgtgtcatatccaccaatatttctgcaacgtctttgacaatagatggaatcagatatgtggtagatggtggcttcgtgaagcagttaaatcacaaccccagattagggttggacatcctggaggtggttccaatttcaaagagcgaggcattacagcgaagtggccgagctggcaggacttcttcaggaaaatgctttcggatctatagtaaagatttttggaaccagtgtatgcctgaccatgtgatccctgaaattaagagaactagtttgacatctgtagttctgaccttaaagtgccttgccatacacgatgtcataaggtttccctatttggatccacctaatgagagacttattttagaagctcttaaacaactttaccagtgtgatgctattgacaggagtggccatgtcaccagattgggtttgtctatggtggagtttcctttgcctccacatctgacatgtgcagtaataaaagctgcttccctggattgtgaagatctactacttccaatagcagcaatgttgtctgtggaaaacgtcttcattagacctgttgatccagagtaccagaaggaagcagaacagagacatcgagaattggcagctaaagctggaggatttaatgactttgcaactttagctgtcatctttgaacaatgcaaatcaagtggagctccagcttcatggtgccaaaaacactggattcattggaggtgcttattttctgcatttcgtgtggaagctcaacttcgagaactaatcaggaagcttaaacagcaaagtgatttcccaaaagagacctttgaaggccctaaacatgaagtactacgaagatgtctttgtgcgggctatttcaaaaatgtagctcgaagatctgttgggagaacgttttgcacaatggatggtcgtggaagcccagttcacattcatccttcctcagcacttcatgaacaggaaaccaaacttgaatggatcatttttcatgaggtattggttaccaccaaagtctacgcaagaattgtatgcccaatccgttatgaatgggtaagagacttgttacccaagttgcatgaatttaatgcacatgatttgagcagtgtggcccgacgtgaagtgagagaagatgcaagaaggagatggacaaataaggaaaatgtaaagcagctaaaggatggaatatcgaaagacgtcttaaagaaaatgcaaagaagaaatgatgacaaatccatatctgatgcacgggctcgtttccttgagagaaagcagcagaggacccaggaccacagtgacacacgaaaggaaacaggctaaggtggtgaaccctccaattcaggaagtgggaaaaggagccaggaaatgtgcttctactttgccagttatttcagacagcactaccaagaggaggtggtcagcacttgttattggcctatgaactaaaagcaaatcaaagctcataaatcaaagctcatcagttcccataaatgcagttgtcaaagaaaagatttggttgccatagtcataagcaatgatacatgaaaccaatgaaagacagtacatgtaataatattttcctcagtacaattttgctggccttaactggtatcaaacgctgtcattgagatgttttcaaagaacattgagttgtatttaatcagcgtgtactccatttgcattgaagcattaaaaattatttttctt

SEQ ID NO: 851 - DNA, 2322 bp, Homo sapiens
ccctgcacaacttcagcgcgaggctgtgggagcagctggtccacttccacgtcatgcggctgacggactcgctgttcctgtgggtgggggccacgccgcacctgcgcaacctcgccgtggccatgtgcagccgctacgttccgtgtccccaccaccttcacgatgcagaccttcttgggcccccgggaaagctctttctccagctctgcaaagaaacagaccctgtgagccctgggcaggccgcccacagaggacaggacagcagctgcagtcacagccctggttccccagttcgggtaccacagaagggagagagaagcttttttttttttttttttttgccagtggatagggtctaggtttccaggatagaaaggcactcataagaccccagctttgcagttcaggtttcgctcgggtgcctgagagggcaccaaggtgcaccgtcagcagaagtttccatcacaaacccttgttttggaaccagtcagagtgcacacaaacggtctcgactcagttcacttttgtctgagtacagagctcagcgatgatattctaggttactgaggcactcattaggccctgggcaaatctaaacatgcagttcttttccgtacactctacatctgcctgtgtcacccccggctcggagactgggaaggccacatgcagatatgcttcttagccttgtggggtggaactatggctgtagctacttctgctgaaactgcccttaggacatcatatgcatctttgaaagccaaatacataagtgaacacatctgcgtgtatgtgtatacaccatacatgcacacattcatacgcatgcatatacgtgtgcatgttttagttaacagaagtccttgggggctggacaatattttggctccaagggatgtgagcaactataaagtcatgagactgagtttcttgtgcggctccagcggctctgaaagcccctctgaagggagtccaccagcgcacagtgttacattcaccaggccaaggggtctgcagaggtgctggtgttgatctggcaatttacagggaagattcagaatggtgggggtgctggcctccaggagctgtctgcttgcacgtctgggagcaggaatgccacctcagccttctgttgcctctctgccttcctagcctggcatgtcttcatggagtaatcccctactggggagctaaaaaagaaaagggagacttcccgaagcggaggggaaccaggactcttcaagactgtcaaggtcaccagaaacaagaaagactgagcagctgtcagaccaggagactagggagaggggaggacaagacgcagtcctgggcggcatcccgggtgggaggagtcgtcatggaaagcacgatgatgggaggcaccaaataaaggctggggtttggtgaatggtagtgttccaatgtcactcttttagtttcgacaacagtaccacgacagtatcagacattcgcaatctgggaagtcgagtactgggaggtctgtcgttgcctctagagggatccttctgctccctcgggggctgtgtctccaggaccctggccctgtgcttccgagggccactctgaaccctggatggctcaagttcaaccctcctcttccacctccttcctgccatccagcggtaggagggtcacaaagctctttcattatagtttgaagaaaaaatgtgttgctaaaccgtagggatttgaataaagcaatgatgtttttattcaaacattgtttttgaactgagtgtcaccagccagggcacagaagggagaaggagaaacctttcacttgtctgagggagctcatgtctactgagtttccagaactttctcccttgccatacttgggtgcaaagattgaggtctgtgtgtaagcccacagggccggcgtttcagctgctggtccacggaccctctcagctcccaaggtccattatttttcctcagcaaaaatgggctactctgactacaggcacagtttctccatggttaaaataactaattttataaagagcttgaaaatatcatggttaacagaaaaccttggatccaatgatctgaatatctttgctattatagaactcatcagaaaccaactgtaatagctacgttttctcaccatggaagacttccgagaagaaaatttcaatgtccattagcaagtccatataagtttaaagttttaaaaagtatataccccaaactgaactcctgatatgttattgtttactaagtatgatgttaaagaagcaataacaactgcattatgacctgagctttttaaataaaattaaacctagaacccagtct

SEQ ID NO: 852 - DNA, 2347 bp, Homo sapiens
gactcaacagagctatggcgggtttgactgtgagagacccagcggtggatcgttctctacgttctgtgttcgtggggaacattccttatgaagctactgaagagcagttgaaggacatcttttctgaggttggacctgttgttagtttcagattggtatacgatagagagacaggaaagccaaagggttatggcttctgtgaataccaagaccaagagggttagatgccagaggattagaggcccgtgcaatggaggcccagtctttgggtggaatgcatgtcaatggcgcacctcctctgatgcaagcttctatgcagggtggagttccagcaccagggcaaatgccagctgctgtcacaggacctggccctggttccttagctcctggaggaggaatgcaggctcaggttggaatgccaggaagtggaccagtgtccatggaacgggggcaaggaaccctacagcactcgcccgtgggacccgccgggcctgcatcaattgagcgagttcaagggcagagaacatggatgatatgggcatctgtccgaggctgtactccctccctactggtgtcatgaggcttggatggaatagcagtcttgccgatgcaagaccccagagcagctatgcagcggggatccttgcctgcgaatgtcccaacccctcgaggcttgttaggagatgctccgaatgatccacggggaggcactttactttctgtaactggagaggtagagcctagaggttacttgggaccacctcatcagggtccacccatgcaccatgtccctggccatgagagccgaggaccacccccacatgaactgaggggagggccattacccgagcccagacctctaatggcagaaccaagaggacccatgctagatcagaggggtccacccttggatggcagaggtggaagggatccccgaggaatagatgcacgagggatggaggcccgagccatggaggcaagagggttagatgccagaggattagaggcccagtgcctggccccagaggacctatacctagtggaatgcagggtcccagtccaattaacatgggggcggttgtcccccagggatccagacaggtcccagtcatgcagggaacaggaatgcaaggagcaagtatacagggtggaagccagcctggcggctttagtcccgggcagaaccaagtcactccacaggatcatgagaaggtaagcaacactgtctgactgcctccttatgcacaattctagcctttttgattcctcttttcacagttaccatgtgacgatcctgggtcttcaaagtccctttggaggtgatgtttattctaacttagaactcttttatgatcttgttacctgaaaatttgtgagtctggtcctgaagttcctaatggatgtgaagttcttaagtggatgtaaatggcggcttattttatatttcacactcatctgccaatagcaggtttttcttgttcaggccagattgacctgaaaatccacaccctttttccttccctttctactttatccctaaaaacaatagtagattccccatgattatatctttctgtttttatatttgaccattgtggggagcttatgtctgatggaaaggctaaaatttgtgaaaaagagagactttcaaaacaggattaaaacttgaaggatttccagggctcacagataccatcttagtctccaggaactttgagttcatgaagttgtctgttttgaatcgtctaatcttaggtattttaatttatacttgttcttttcattgtaccttttctcaccagttttttttttattttttattttttttggaggggggctgttggtttttttctgtgtgaaatgttcttcctttttccattttgcttcatatcccactacagtagctttttggacagaagctggtggtgggttttttgttttgttttgtattttttagctgccatcattaaaactcactaccttttttttttcctctgcacaggctgctttgattatgcaggttctacaactgactgcagaccagattgccatgttgcctcctgagcaaaggcagagtatcctgattttaaaggaacaaatacagaaatccactggagcaccttgataggttttcaaaaatacctggcaagaaatctggaaattctataattttgttgaaatattgaaaaaagatgacctgcatcctaacccttgaatgactcaaatcagtgccaggtggcggactcccatcaccttctctcagaacaaaatcacttcattttattgtcttagtttgtgtattttctgtgacttgaaataaactttgaacacaattttagtacactgc

SEQ ID NO: 853 - DNA, 2567 bp, Homo sapiens
tttgtgacagggtctctctctctcacccaggctggagtgcagtggcatgatcttggctcactgcaacctccgcttcccgggttcaagtgattctcatgcctcagcctcctgagtagctgggactacaggcgtgcgtcaccacattcagctgattttttcagtgtatatttataattttctagtacacattttttattattcataataatagtgatgtctaacaattattgaaggcttacaactacatgtatgcattatcttatttaatccttggaacacttaattccgatgatgaggaagaaggtagcattgttcccagaagcctgtccccacctgcaccattggtactactgctgagtatttgtgtgttgagtgctgggctgggagcaggaaccagccatggccttgtcctcagggccttggagcttagtggtaggtagtactagttatgagaaaactagccaagttacaggtacattaagacaaagcttccattgttgagagaatcctgcatcatttgcttagatctttacatggcctttacctgctaatcacttgctaacctcccctaactttaagcttttggaagaattacaagggataccactgtgaattgcagcctttgctgatgtagtcgcatgtcctcctccagtctgtggacattctatatctcttgctgctctcctcctcctggcatgataatgttttgatcagttcattgcttacttgcatgtctgtgggaggaagaggaagtctcatcaggccaagtcatgtggtgaggctggaaatccataactgagattagctacccacagtgagcatgggagtgagtgctgtgagccacagtggtactgacgtcgactttctaattcccacagtcacagaatctcaaggactctgagccaattcaaagaaaagatcctgtacagtttgaatatgtaacttagcttaagagtaccctgcagtcacaagatttattaataaaagggtttggctttttaatttgtatttgtttaatttatttgttttatgcagcctgggtcttgctatgttgcccaggctggtcttgaactcctggcctcaagcgatccgctcgcctctgcctcccaaagtgctggaactataggcatgagccaccatacccagccaataaaggggtttcaatatatttctttttattttttattttttgagatggagtcttgctcttttgcccagggtggagtgcaatggcacgatctcagctcactgcaacccctacctcccaggttcaagtgattctcctgcctcagcctcctgagtagctgggactataggagcttgccaccacgcctggctaattttgtatttttagtagaaatggggtttcaccattttggccaggctggtctcgaactcctgacctcatgatctgcccaccttggcctcccaaagtgttgggattataggcatgagccactgtgcctggctgggttttagtatatttctcaattgtcctgatttcctcctgaagaggaaaaataacctgaaatgtgttggtggctgttgtttttttaacatgtctgttgactttcaggccctagactggagctggttacagacggaagaagaagagcacagccgcctggagcaggcctcatgatgtggggggactcgaccccctgacatggggcagcccatagcaggccttgtgcagtggggggactcgaccccctgacatggggctgcctggagcaggccgcgtgacgtggggctgcctggccgcggctctcacatggtggttcctgctgcactgatggcccaggggtctctggtatccagatggagctctcgcttcctcagcagctgtgactttcacccagggcccaggacgcagccctccgtgggcactgccggcgccttgtctgcacactggaggtcctccattacagaggcccagcgcacatcgctggccccacaaacgttcaggggtacagccatggcagctccttcctctgccgtgagaaaagtgcttggagtacggtttgccacacacgtgactggacagtgtccaattcaaatctttcagggcagagtccgagcagcgcttggtgacagcctgtcctctcctgctctccaaaggccctgctccctgtcctctctcactttacagcttgtgtttcttctggattcagcttctcctaaacagacagtttaattatagttgcggcctggccccatcctcacttcctctttttatttcactgctgctaaaattgtgtttttacctactactttggtggttgtcctcttttcggcaaagttggagcgagtgccaagctctccatctgtggtcctttctgccaagagcgactcatagtaaccaggatgggagagcagctgccttattctgaatcccaaaaattacttgggggtgattgtcacagaggagggacagaaagggtatctgctgaccaccagcctgcctacccatgcccatgtctccattcctgctcaagcgtgtgtgctgggccggggagtccctgtctctcacagcatctagcagtattattaaatggattcatttt

SEQ ID NO: 854 - DNA, 2244 bp, Homo sapiens
gtgcgaggtcaggccatgaacttgggagatggtttaaagcttgaaactgaattactggatggaaaaaccaagctaatattgtctccatatgaacataaatcaaaaatttctgtgaagatgggaaataaggccaagattgcaaaatgtcctttaagaacaaaaactgggcacattctaaaatcaacacaagatacttgtattgggagtgaaaaacttttgcaaaagaagccagttggttcagaaacatcacaggcaaaaggtgaaaaaaatggaatgactttttcatccactaaggatttatgtaaacaatgtatagataaagactatcttcatatccagaaagagatttcacctgcaactcctaatatgcagaagactagaaacaccgtaaatacatctctagtaggtaaacagaagcctcacaaaaaacacatcacagctgaaaacatgaagagcagtttggtgtgtctaacacaagaccaactacaacagattttgatgactgtaaaccaaggaaatagatctctttccctgactgagaatggaaaggaggcaaaaagtcaatatagtctatatttaaacagtatttctaatcagccaaaggatgagaacattatgggattattcaaaaaaactgaaatggtttcatctgtccagctgaaaataaatctgtcttaaatgaacatcaggagacatctaaacagtgtgagcaaaaaattgccatagagaatgaatggaaaccagctgatatattcagtactctgggggaaagggaatgtgatagaagttcgttggaagcaaaaaaagcccagtggaggaaagagctagttttgcagactgtacaagcatggtaccagcatctcctcggcttctggtgaggcctcaggaagcttttactcacggtggaaggcaaagggggagcaggcattttacatggcaagagagatgccaggctcttttacacaaccagctctcatgtgaactgacagagggagaactcaagcatcatcccaaggggatggcaccaagccattcatgagggattcatctcctgtgacccaaacacctccccttaggccccacctccaacactggggaatcacatttcaacatgagatttgaaggggacaaatctccaaactgtatcatcaaggtaaaagaagaatgaagagattaaacttatgttagcagtatcagaaggtttggtggtcttgatgtgtgtttatatcacaatttcatctttaaatattttctttcagcacattccacatcaaaatgcaataccaaatgtctgaaataatatggaactacttggaaatgaccagaatattttgtgctttaatcattttttttgttgttgttgttttgagacggagtttcattcttgttgcccaagctggagtgcaatggcaccatctcagctcactgcaacctctgcttgctgggttcaagtgattctcctgcctcagcctcctgagtggctgggattacaggcacctgccaccatgcccaacttactttttgtatctttagtggagacagggtttcaccatgttggccaggctggtctcaaactcctggcctcaggtgatccgcctgccttggcctcccgaagtgctgtgattacagttgtgagccaccacacctggccttatgctttaattattttaaaaatcagtttactgtttttttaacttgtctcagtaaagtgcctctatttaagtcatgcttccagtaacattcttggaatttaaatttatacaacattgaattttgtatttaaagaactactgttgattggggggttagttttgactatatctctcagacacaggcttttatgttttttacttgtcagcaattaagaaataatagctaacattcattgaatatttactttgtgccaagccctatattgagataggcactattattatccccattttatagaagaaaccaaggcttagaaagcttaccagcagttggccagctgcggtgggctcatgcctgtaatcctaccacgttgggaggccgaggcaggtggatcacaaggtcgggagatggagaccatcctggccaacatggtgaagccacatctccactgaaatacaaaaattagccgggcgtggtggtgctgcctgtggccccagctactcaggaggctgaggcaggggaatcgcttgaacctattccaataaaactgctccttattggtaattgtgataataaaattgtaccatactt

SEQ ID NO: 855 - DNA, 2581 bp, Homo sapiens
ggaaaatttacactggggagaaaccttacaaatgtgaagagtgtggcaaagcctttgccccatcaacagacctgaatcaacacacgaaaattcttactggagggcaaagttacaaatgtgaagagtgtggcaaagcctttggatggtccatagccctgaatcaacacaagaaaattcatactggagaaaaaccttacaaatgtgaagagtgtggcaaagcctttagtaggtcaagaaaccttactacacataggagagttcacactagggagaaaccctacaaatgtgaagatcgtggcagatcctttggatggtccacaaacctgaacgaatataagaaaattcatactggagataaactctacaaatgtaaagaatgtgggaaagtgtttaaacagtcctcacacctgaatagacatgagaaaattcatactggaaagaaaccctacaaatgtaaggaatgtggcaaagtcattacgtcatcctcaagctttgctaaacataagaggattcatacaggtgagaaaccctttaaatgtttagaatgtggtaaagcgtttactagttccacaacccttactaaacataggagaattcatactggagagaaaccctacacatgtgaagaatgtggcaaagcctttagacagtcagcaatcctttatgtacataggagaattcatactggagagaaaccctacacatgtggagaatgtggcaaaacctttagacagtctgcaaatctttatgcgcataagaaaattcatactggagagaaaccctacacgtgtggagactgtggcaaaacctttagacagtctgcaaatctttatgcacataagaaaattcatactggagataaaaccatacaagtgtaaagaatgtggcaaagcctttaagtcatactacagcattcttaaacataagagaactcataccaggggaatgtcttacgaaggtgacgaatgtcgcggtctttaaatgctcctcaatcctttctaatcataagataattcataatgaagagaaactctaaaatgtgaaaaatgtgagaaggcttttaatcacacctcaatctgttgtagacataagagtaattatattgatgagaagccaaattaaaattaaaaatgtggcaaagacttccaattctagtcagttcttaatgtaattcctactgaagaaaacacctggaaatacaaaaaatgtggcaaaacttgtaaccaatgcttagcatttttgcacatgatagtatttatatgtgagactacttgtacaaacataaaaatatacaaaagctattgtctacttgaaatttatagttaataaaagcattataaatgtaatttctgttgaaagaccttttagaaaatataggccattaaagtgaagaatagtcttaagacagagaatacaaagataaagagggctctagtacctgtacttgtatcccagaacttactatatgcattttgtactagaggaaaactctgaagcagttgcttaaactttgttcaacatcagagaatttatattggagagaaatcctacaaatgtaataaatgtggaaaaacctctgttcagaaactgcaggttaagaaaccagaggccaggcgcggtggctcacgcctgtaatcccaacactttgggaggccaaggagggtggatcacctgaggtcgggagttcaaggacagcctgaccaatatggagaaacctcgtctgtactaaaaatacaaaaattagcaggacatggtggtgcatggctgtaatcccagctactcaggaggctgagacaggagaatggcttgaacccaggaggtggaggttgcggtgagctgagatcgtgccattgcactccagcctgggtaacaagagtgaaactctgtctcaaaacaagataaaaagaaaagaaacaccagagaatttttactagaatataatttgtaggtgcagtaaatgtgaagaaatatttaggctaaaattaagactatgtaaacatcagaggatttacagtagaaagaactaaggaactaacacttcagactttaaaataaatcagagtattaagtataacaaaagttgaacctgttagaaaatttccttgtatataagttgaaaagtaggtttttgaagagatatattcgaaatatattttttcacttgaaaaaagtaaaaatttttttcaaaagcaaataattcaactctaaaattatactatttcaacattctcatttatgtgaaagcatgtgataaattgttgctgcgtcagagatatgagaaactcctttgcattaggtgggcattattcatagacttctacatgaaagagaagagaaataaaagatgcaccaggaaaatctgagcagagaggcttttagtggttgacttactgagtgatgcctgaagtaggtgttctgagtaatactttgcgttatactgagagagaatctgaattttagtagtaaattgttttgccaactgtatatttatgtaataagtgcaataaaatgcagtaaattttaaaattctcttaagataatgtgtgaacttaatttttgaaataaaaattgttattgtgtt

SEQ ID NO: 856 - DNA, 3117 bp, Homo sapiens
caaacacttcttatcatctggaggaaatgtcaatgagaaaaacgatgaaggagtaaccctgttacacatggcgtgtgcgagtggctacaaggaggtggtgtctcttatcctggaacatggtggagacctcaacatagtagatgatcagtactggactcccctccacttggcagccaaatatggccagacaaatctggtgaaacttctcctgatgcatcaggcaaacccacacctcgtgaactgtaatgaggagaaggcgtcagatattgctgcctctgagtttattgaggaaatgctgctgaaagccgaaattgcctgggaagaaaaaatgaaagagcctttatctgcttctaccttagctcaagaagagccctatgaagagatcattcacgatcttcccgtactgtcgagtaagctcagtcccctggtgttaccaattgccaagcaagacagtttgttggaaaaagacattatgttcaaagatgcaacaaaaggtctgtgtaagcagcagtctcaggacagcatccctgaaaaccccacgatgagcggttccaccaaacccgagcaggtcaagctaatgcctcctgccccaaacgatgacctggcaacgctcagcgagctcaatgatggcagcctgctctatgagattcagaagcgctttgggaacaatcagatctatacattcattggagacattcttttgcttgttaacccatacaaggagcttccaatttattcttccatggtgtcccagctgtatttcagctcctcagggaagctgtgttcctcgctgcctcctcacctcttctcctgtgtggagagagcctttcaccagctcttccgggaacagcggcctcagtgtttcatcctcagtggagaaaggggatcaggaaagtctgaagccagcaaacaaatcataagacacctcacctgcagggctggcgccagcagggccacactggattccagattcaaacatgtcgtgtgcatcttagaagcctttggacatgccaagaccacacttaatgatttgtccagttgcttcatcaagtattttgaactgcagttctgtgagaggaaacaacagctaaccggagccagaatttatacatatttgctagagaaatccagacttgtttcacaacctcttggccagagcaattttctcattttctacttgttgatggatgggttatctgctgaagaaaaatatggacttcatcttaataatttatgtgcacaccggtatttgaaccagaccatacaggatgatgcatccacaggggagcgttctctgaacagggagaaattggctgttttgaaacgagccctgaatgtagttggcttcagcagcttggaggtggagaatctgttcgtaattctagcagcaatattgcaccttggagacattcggtttactgccctgaatgaggggaactccgccttcgtttctgacctccagctcctggaacaagtggctggaatgttacaagtatcaacagatgaattggcatctgccttaacaactgatattcaatattttaaaggggatatgataatacgacgacataccatacagattgctgagtttttccgagacctcttggccaagtccctgtacagtcgtttgtttagctttttggtgaataccatgaattcttgcctccacagtcaagatgaacagaaaagcatgcagacattggatattggaatattggacatttttggttttgaagagtttcaaaagaatgaatttgaacaactttgtgtcaacatgaccaatgagaagatgcaccactatatcaatgaagtgctttttctccacgagcaagtggaatgtgtacaagagggagttaccatggaaacagcatattctcctggtaaccagaatggagttttggacttttttttccagaagccatctggatttctcaccttattggatgaagaaagtcaaatgatttggtcagtggaatcaaattttccaaaaaaactacaaagtctcctagaatcctcaaacacaaatgcggtgtactcccccatgaaggatgggaatgggaatgttgccctcaaagaccacggtacagccttcaccatcatgcactacgcaggaagggtaatgtatgatgttgttggggcgattgaaaaaaataaagactccctttcacagaatcttctatttgtaatgaaaactagtgaaaatgtcgtgatcaatcatttgttccagtcgaaattgtcacaaacaggatccctcgtatctgcctatccttcctttaaattccgaggacataagtctgccctgctcagtaagaaaatgacagcttcttcaattattggagaaaacaagaattatctagaacttagtaagttattaaaaaagaaaggaacttctacatttcttcaaagattggaacgaggagatccagtcaccatagcatcacaactcaggaaatcactaatggatattattggaaaacttcagaagtgcactccacacttcattcattgcatcaggcccaataactcaaagctgccagacacttttgataatttttacgtgtctgctcagctacaatatattggggtcctggagatggtgaagatcttccgatatggataccctgttcgcctttccttctcggatttcctgtcaaggtaaattcttctgctcttaaaatcgtcgttctcgctgctgttcagtgcagtgtactgacactgacactattgtagcaagggtcttctgttgtcttttttggcactgcttttgttgtttacttttttctatctccaataaacaaaatattctgggaaacaatgaaatacactgacaaagctcacataaaaaataattaaactgtactgaggacagtatcttggaaaccattctcatgttcctttcaaagtgtggctttccttggattaaagttttgtaaaatgattgcatgtgatatttactatttattatttaaaaggagaatgtatgtaagtgattatttccccttttatatatgaacaaaatattatttagatcagtggttggcaaactacactcatgggccagccaaatccagcctaccacctgtttttgtaaataaagttttattggaacatggccac

SEQ ID NO: 857 - DNA, 2317 bp, Homo sapiens
gagggttgggctccttggtaccatgtgggaagcgctgtgaagagttgttgccttccaagatatacccaaattcccagttccagcccgtgtcattaaaactccgctggcgtgaaagatgacgtccttagcccagcagctgcaacgactcgccctccctcaaagtgatgccagcctcttatccagagatgaagttgcttctttgttatttgaccctaaggaagcggccacaatcgacagggacaccgccttcgccattggatgtactggcctggaagagttgcttggaattgatccttcctttgagcagtttgaagcaccgttgttcagtcagctagcaaaaaccttggagcgaagtgttcagaccaaagcagtaaacaaacagttggatgaaaacatttcattattccttattcacttgtcgccttacttcctgcttaagccagcacagaagtgtctggagtggttgattcacaggttccatatacatctctataatcaagatagcctcattgcttgtgttctgccataccacgagacaagaatatttgtgcgagtcatacagcttctaaaaattaataattcaaagcacagatggttctggttgttgccagttaagcaatctggagtgccgttagctaaaggaactttgattacccactgctacaaagatcttggattcatggatttcatttgcagtttggtgacaaaatctgtgaaggtttttgctgagtacccgggcagctcagctcagttgagggtgctcttggctttctatgcttctaccatagtgtcggcgctggtagctgcagaggacgtatcagacaatatcatcgccaaactatttccctatatccaaaagggattgaaatcatctttaccagattacagagctgcaacatacatgataatatgtcagatttctgtgaaagtgaccatggaaaatacctttgtgaattcactggcatcacagatcatcaaaacattgaccaagattccctctttgatcaaggatgggttaagttgcttgatagtgctcctgcagagacagaagccagagagccttgggaaaaagccattccctcacttatgtaatgttcctgatcttattacaatacttcatgggatttctgaaacttacgatgtcagtcctcttctgcgttacatgcttccccatctggtcgtctccatcattcatcatgttacaggagaagaaactgaaggaatggatggtcaaatctacaagagacacttagaagctatacttacaaaaatatcactgaagaacaacttagaccatttgttggctagccttctatttgaagagtatatttcatatagttcacaggaagaaatggattctaataaagtgtctttgcttaatgaacaatttcttccactcattagacttttagaaagcaaataccccagaacattagatgttgtattagaggaacacttaaaggaaattgcagatctgaaaaaacaagagcttttccatcagtttgtttctctttctacaagtggaggaaagtatcagtttttagcagattctgatacttctttgatgctcagcctgaatcatccacttgctcctgtgagaattctggccatgaatcatttgaaaaagatcatgaaaacatcaaaggagggtgttgatgaatctttcataaaagaagctgttttagcccgattaggtgatgataatatagatgttgttttgtcggctataagtgcttttgagattttcaaagaacacttcagttcagaagtgacgatttcaaatcttctgaatctctttcaaagagcagaactttcaaagaatggagaatggtacgaggtacttaagatagccgctgacatattaattaaagaagagatactgagtgaaaatgatcagttgtcaaatcaggtggttgtatgtttgctgccatttgtggttatcaataatgatgatacggaatctgctgagatgaaaattgctatatatttatcaaaatcaggaatctgctccctgcaccctctattaagaggctgggaagaagctcttgaaaatgtaattaaaagcacaaagccaggaaaactaatcggtgtagcaaatcagaagatgattgagttgttggctgataatataaatttaggagatccttcttcaatgttaaagatggtggaggatttgataagcgtgggtgaggaggagtcctttaacctgaagcagaaagtaacgtttcatgtgatcctgtctgtgctcgtctcttgttgttcatctttaaaagaaacccactttccatttgcgataagagtcttcagtttgttgcag

SEQ ID NO: 858 - DNA, 2786 bp, Homo sapiens
tgaaataggagccaaggtatgctatgagccaaggattatgagtaatccaattttgtgcactttaagccatttgaaaaacagaaaagcaaaacaacaaaataatttttaagaaattgaatatagggtgttatgctctgaatgtgtccccctaaaattaatcaccaatgtcataagattaggaagtagggctttaaggtagtgattcagtcatgaagggagagtgttcacgaatgagtttaggatccttacacaaggactggatggagtgggcttcccctgttttgcccttccaccttctgccatgtgaggacacagtgcatctcctcctgaagacacagtgcacaagataccatcttggatgcagagaccagaccctcaccagacaccaatcctgctggcaccttgatcttggacttctagcctatggaactgtaagattggggaagatgccaggtgatagaatccaccctgcctctgacagcatccaatctggagcaaaggcttatttcaaccctcccccaagctcccaatacaagcccaaattctggaacaggtcctttccaacacctccttcagagaagctccctggctccaggcagtgcttgctcccctcactgcagcaggaagcctaacttgcgaactgcaggtgtgttccaggtggtcactggatgcaaggcattgacagatggatcccatcgatacccccactgcaaaaccatagtgcagtgaatagaagacacttctctgcaccccaaaagctccatgctgattgtgagaaggaaatgctggatggaggggttcctggaactactgtgagggtttcttttgatttctcctgcttagaaatggtgagagaactttggatgtggaacgtggaggaggaggaacacgaagtggggatctccacttggggtggtcagcactgcgggtgcccagcaaagtcactgcctggtccacatcccggaggggtctctgcgcctcagtcggcatcgcagctgatggtgaaacttttggtgtggcagaagagtgtccacaaacttcggaagatcgctgctcagagtgaggaatggagttgtattttgaataaaatatccacgcatccttttgtgagcaaggagcatgatggtacttagacctaccatttctcgttatggtggttgcggttacagtggggctggggtgtttacctggagcctggacatccactgggacatgatacccactgggaattttttgtgtcaatctggtctctgatgtccacctggggattgggtatccacctaaggcctgatgtttacctggagccagatgtgcacctgagacctgatgtctatctgtggccttatgttcccctggggaccgatgcacacctgaaggataggtattcatctggggcctgatacccaccagtagtatgggtgtcaaccttggggctggtgttcagctggcgtccactgtctacttggggcctggtgtacacatggggcctgggcatccacctgagacttgatgtttaatatggtctggagttcttttggggcctgttgtaccctggagcctgggtgtacacctggagcctgatgtcccaggtgaacaactgggtcccaggtgatcttcaggccctaggtgaaaactccaggctctaggtggacaaccaggctccaggctgatgtttactggggccagatgtctaccaggccccaggtgaaatccccaggctccaaatggacaacatagccccaggttccaggtggacattggaatccagatcaacaccaggccccagatggacacccaggcctgtggtggacatcggactgcagaaggtcatctggctcgaggtggacatcgggccccaggtggatgcctggtccccaggtggatatcgggccccacttggacaccagtccctgggtggataccttggcctcgggtggatatccagtctctagctaagcatcaggctccagggggacccaggccctagctgactggggactagtgttcatatggggccacatgtccatctgggccctaggtgtcaacttgtagcctgatgtcaacctggaagctggtgttcaccagagaggactaaggtcctcctggtgcctggtgtccaacttgggactttgtgtccacctggagaccgatgtccacttgggaccggatgtccagctggagcaagatgtccacctgcagcctaaaacttcacctaaggcctgatgttccccagggcctacagagcctatgtatctacctagggacttgtgtccaggtggggcctgaattccacctggggcctggaattaacctgggacctgatgtccacctgagacgtgggtgttcctctggagtctgatatctatctggggcccgggtgtcctcctgtggtctgatgtccacttgtaggctggtgtccacctggggcctgggtgtccacctaggaacctgatgtatacctgaagtccagtgtctacgtgggtactgatgtctaccaggaaagtgatataaacctggggcctgatagccacctgggccctgagtgtccacatatgttctgatttctcttttggcctgagtgtagggcctgagtgccacctgcttcctgacgttcaccaggaacctaggtattcacttgggagccctgggggcctctgcccttttggccgcgttgtctcctggcttttagggtggtgggattctcggctctgattgcagcaggtggattcacttagctctcctccccttttagcattactgtcttctgtaataaacctctcactttg

SEQ ID NO: 859 - DNA, 2887 bp, Homo sapiens
aatgtgtgtgagaaactgcagcttgatattaagcatgagaaagctcatgctgaagagaaatcttatgaacatggtgaaaatgctaaagctttcagttataagaaaggtcagcattggaaatttcaaactttggaggaatcttttgaatgtgatggatctggacaaggtttatatgataagacaatttgtattacacctcagagttttctaacaggagaaaagtcctgtaaggatgatgaatttagaaaaaaactttgataaaaccactttatttaaccacatgagaactgacaaaagggggaaatgctctgatcttaatgaatatgggacatcctgtgacaaaaccaccgctgttgaatacaataaagttcacatggctatgacacactatgagtgtaatgaaagggggattaatttcagtaggaagtcacccctcactcaatctcagagaactattacaggatggagtgcttttgaaagcaataaatgtgaagaaaattttagccagagctcagcccatatagtacatcagaaaacacaagctggagataaatttggtgaacataatgaatgtacagatgccctctaccagaaattagactttacagcacatcagagaattcacacagactttacagcacatcagaaattctacctttctgatgaacatgggaaatgcagaaaatccttttactggaaagcacacctcattcagcatgagaggccccactcaggagagaaaacttaccaatatgaggaatgtgcaaaatccttttgttcaagttcacatcctattcagcatcctggaacttatgtgggattcaaactttatgaatgtaatgaatgtgggaaagctttctgtcagaattcaaacctcagtaaacatctgagaattcacacaaaagagaaaccttgtgataacaatggctgtgggagatcttacaagtcacccctcataggacaccagaaaacagatgcagagatggaactctgtggtggcagtgaatatgggaagacatcacatctcaaaggacatcagagaattctcatgggggagaaaccctatgaatgtattgaatgtgggaaaactttctccaagacatcacatctcagagcacatcagagaattcacacaggtgaaaaaccctatgaatgtgttgaatgtgagaaaactttctctcacaagacacacctcagtgtacatcagagagttcacacaggggagaaaccctatgaatgtaatgactgtgggaaatcttttacctataactcagccctgagagcacatcaaagaattcacacaggtgagaagccctatgaatgcagtgactgtgagaaaacttttgcccataattcagccctcagagcacatcatagaattcacacgggggagaaaccttatgaatgtaatgaatgtggaaggtcttttgcccatatttctgttctcaaggcacatcaaagaattcacacaagggagaaaccctatgaatgtaatgaatgtgggagatctttcacctacaattcagccctgagagcacatcagagaattcacacaggtagaaaaccctatgaatgtagtgactgtgagaaaacttttgcccataattcagccctcaaaatacatcagagaattcacacgggggagaaaccctataaatgtaatgaatgtgagaaaacatttgcccataattcagcccttagagcacatcagaatatccacacaggggagaaactctatgaatgtagtgaatgtggaaaaacttttttccagaagacacgcctcagtacacatcggagaattcacacaggggagaaaccctatgaatgtagcaagtgtgggaaaactttctcccagaaatcatacctcagtggacatgagagaattcacacaggggaaaaaccgtatgaatgtaacgtatgtgggaaaacttttgtctataaggcagccctcattgtgcatcaaagaattcacacaggggagaaaccctatgaatgtaacgaatgtgggaaaactttctcccaaagaacacacctctgtgcacatcagagaattcatactggggaaaaaccctatgagtgtaatgaatgtgggaaaacgtttgctgataattcagccctcagggcacatcacagaattcacacaggggagaaaccctatgaatgtaatgactgtgggaagactttctccaagacatcacatctcagagcacatcttagaactcactcaggggagaagccctatgaatgcagtgaatgtgggaaaaccttctctgagaagtcatatgttagtgcacatcagagagttcatacgggggagaaaccctatgaatgtaatgtatgtgggaagccatttgcccataattcaaccctcagagtacatcaaagaattcacacaggggagaaatcctatgaatgtaatgattgtgggaaaacgttctcccagaaatcacaccttagtgcacaccagagaattcacacaggggagaaaccctatgagtgtaatgaatgcgggaaagcttttgcccaaaattcaactctcagagtacaccagagaattcacacaggggagaaaccctatgaatgtgatgaatgtgggaaaacttttgtccgtaaggcagctcttagggtacatcacaccagaatgcataccagagagaaaaccctagcatgtaatggatttgggaagtcctgagggaatgcataccttaccacataacacgtagtgcagaaactcatgtgacataggctgggaacttgtttcccttatccatttcctttttcattaggctcatagtttgtggaaaaatcccaatatgccgtttattcaggtggggctgaccatgggatatggtgctaatgatatatattacatttactcttggccctt

SEQ ID NO: 860 - DNA, 2138 bp, Homo sapiens
agctctgagctcgcggaggcgtggccggtgcgcggggcccgcggcgcgcggggatgggggtctcggtggatgtgcaccaggtgtacaagtaccccttcgagcaggtggtcgccagctttctccgaaagtaccccaaccccatggataaaaatgtcatctcagtaaaaatcatggaggaaaaaagagatgaatcaacaggggtcatctacagaaagaggattgcaatctgtcagaacgtggttccagaaattttaaggaagtccttaagcactctggtgattctttgttggaaaaaggtgagcattttgaaagtacctaatatccaattagaagaggagtcatggctcaatcctcgggaaagaaacatggccatacggagtcactgccttacgtggacacagtatgcatccatgaaggaagagtctgtcttccgggaaagtatggaaaacccaaattggacagagttcattcaaagaggcaggatttcaatcacaggggttggatttctcaactgtgttttagaaacttttgccagcacattcttacgacagggagcccagaagggaattagaatcatggagatgctgctaaaggaacagtgtggtgcccccttagctgaataaagaatcatcagagagctgtatccatgtctacttttttatttattttttttttttgagaatcacttcttggccacagcacatcacagacacagtttctggaatacaggtttgaggatacagtgttggcagcttcaagaagagaagaccttcttgccaggacataaaatgataccctcctctgggagcctgcttcgaatagtgggactcagggagataagaccttcttgctggatttttatgacacaatctctttataattttacaaataaaggaaaaaagacccatgtaagatatgtgtgcccttcctcagggtgttctgctggttgtctgatgatggtgtcagggcagctaaggacaggataaaggcctggagagggtgcttgtgcccttatgttatcagcaccgttgttcctaggattcgtgaggggattctggaaccaataagggagttgaactggtacctgattcacgggtggactggaacaaacaggaatgtaccagacctatgttgaagctaagccgtatttataacaatgtttaagattctcagaaatcaggagatttttatcctatccataagtaatatgtaactgccataagtatagcttttagaatgtaatatgtaaactgcgatttggtcctctggaaaaaaaaaaatgaaatgaagagtgggaaggcagtttcttttctgctaattcgttctgtgatggtgagcaagcaaatcattaacctctctgttttttattgggcaaatggggataatcaggcacaggtctttccgccaatgcgttatgatgattaaagaaggtaattttgtgcagggttttaagtcaacagacagacctgggtttgaatccaagtgctggcacctacttgctcagtgatcatgaacacaattttaaatctttctgaatctcatttaaaaaaatttgtgaaacaagatgatagaattaattttgtgagattgttggactgatttgagatcatgcctatgaagtacctagcacactgcctagtacatagtagaagtccaggaaatggaagccattattatgtaaaacgttttgcaaaggtactttttaactgtaacgtaaagtggtactactgtttgaaacttagatggcagtagtttgcatttctcgtgatcagaagccaaaatataaatacatactacctaaaaaatcttgaagagaggtaataatttgaaattcatcttcttaagataaaaatcagggcagggtgtggtggcttatgcctgtaatcccagtactttgggaggccgaggcgggtggatcacaaggtcaggagttcgagaccagcctggccaatatggtgaaaccccgtctctactaaaaatacaaaaaaattagctgggcgtggtggcgcatgcctgtaatcctagctacttgggagtctgaggcaggagaattgcttgaactcaggaggtgaaggttgcagtaagctgagattgtgccactgcaccccagcctgggtgacagagcaagactccatcac

SEQ ID NO: 861 - DNA, 3168 bp, Homo sapiens
aatccaccccagccccaggcactgaaccacgcgtgcagacccctcgtcctcagttctgcggagacagagtccccacagcatttctgctcctccctcaagactgcggcagagcacagcaccagtagaccccacacacagctggggcactggcagcatggagctgaagagaggaaagaccttcatcaagtccagcctgcaggtttcccacgagaaacccccagacccagcagccgtggctgcagccagggaggggacaggcccctggtcagtccttccaggagggcaacagaggccccacagtgagaagggcccccaagccagccccagtgcccaagaatacgacagatgccccaacaaaggggcgcagctggaccccaaagggggacccgcagccctctgtggagccaccttcaaaccggtgcgaaagtgcaagactcacgacagcatgtctggggcaggcagggccacggctgccacagggcagctggtgggcagtgcaagcttcccgggctccccgggcagccggcgcatgatcgactaccgccactttgtgccccagatgccctttgtgccagctgtggccaagagcatcccgaggaagaggatttccctgaagaggcccaagaagtgctttcggaacctattccacattcggagaaacaagactgaggacttggcctcgctggcggcggaggggaaaagcctgccctccccaggggacccgtcagaccctggggggcggcgaagcaaagccttcctccccccgggtgaggggccggggctggacggcctgtgccaggacctgttggacagcgagctcctggccgatgcatcctttggtctctgcagggccctgtgtgaggacgtggcctcactccagagcttcgactcgctcacgggttgtggggaggtgttcgcagatgagagctcggtgccatctctagagctgaacgagggcccggagagcccaacccaggctgctcagggcctggagagcaaggttcccaggggccctctccagggcagtgtggagcagctggcctcgcccgcccagaatgaagcctctgacttcaccaggttctgggacagtgtgaatcgctcagtgcgtcagcagcagcgtgccctcctaggcccgtggctttcaggcccccaggggacagacagggaccaaccccggctggacacagctgggctcgctgagctgcccctctgcccctgcagggaccctcgcagcggctccaaagccagctccatcgacacaggcacccccaagagcgagcagcccgaatccgtgtccacaagtgacgagggctactatgattccttctcgccaggacttgaggaggacaagaaggaagctgagagcccaggcactcctgccgccaccttcccacgggacagctacagtggggacgccctctacgagctcttccacgaccccagcgagggtcctcttggccccagcccagatgatgacctgtgcgtgtctgagagtctgtcagggccggccctggggacgccactgtccatatgcagcttccgagtgggggccgaggagaacttggccccagcaccaggccctgacctgctcagccagggcttcctacagagctcctggaagggcaaggagtgcctgctgaagctgtgtgacactgagctcgccatcaccatgggcatcgtcagctggctgcgccgaggccccacgccccgtgccccacccacccctgggcagcctgcagctccacctggttcccagggagcccctagggcacccacagagaagctggggggcagggagggcctggcctcagatgcagggggggcgacagtttgctcagcacccagcaggcaggagctgtgggcacacccgggcaccacaggcctgctcgccggagagagcaaggccctcggaggggccacacaagggactggcacactgtccagggatgcctctcgagaggaagagacacgaggtcactctgaaggcttgttctcctctatggagtctgcagccacttcgacaacagatacttccggtaaaaataaggccccagttccttctacctggccctgctcccagaaggagcctgggccaccaggggtcctggggtgtttccgaggcccctggaggccaggtcacggaggtgacactctggatgcagagcccatgctggcaggctgtgtggcccgtgtggcagccctgaagatcagctcaaacgaacagcccccggccgcatggcctccaaggcaagacatgggcagtgggctctttgggcagcgctgggccaggggccctgacatgctggagcagaaacagtccagcagctcccccagcatgaccaccatccatggcctaccctactcagccagcacacaggaccagaggtgtcgagatcgtgtccaggacctgagctggctcagggtggagcccaccgggctaggtgtccaggcctgggcctctgtggaggaccagcccttgcagctcagcacagaggctgtggagcaggtggcacacggcagccagctggactctgagccccgctcagcccctgctgcccggtggagttcccagggccaccatccagaaagcctgggcctcactttgaacagccagcaggaagggggggtctctgcaagtgccccagaatgccgctgcagcctcctggcccgtgagggcctcctctgtggccagccagaagtgggggcctctgggccagccatggctgagccccatctgtaggacaggctcacatgcaccaggaactgcatgtgtcttcatgaccactttcaggagagcctaggactcaaatctctatcttttgtccctgatgtggggactgtgttgggggtggggggtggcaggactcaggcatgcagagggtagcatgttcatgtggaggcatccttgcctgaacccaccagctcaggcagcccaccgccaaagacagcgcgaagctgcaaccacctagctgctcctcatgcaggggctggagagaggggctagggcttgaaactgagggggagaaagagctgcacattgtaaatgggaagcagagagccaatgagtctgcctgggatgtgtgtgaatcccaaaagacgcaatcccaaatgccatagtcccaagtgttgagaatccaaaatattaaaattactatactctaaaatccg

SEQ ID NO: 862 - DNA, 2319 bp, Homo sapiens
ctcacagtgtcctcggcactgcccgtccatggggacgtctgcactcacagtgtcctcggcactgccctccgtggggacgtctgcacacacactgtcctcggcactgccctccgtggggacgtctgcactcacagtgtcctcggcactgccctccgtaaatggggacgtctgcactcacagaatgtcctcggcactgccctccgtggggacgtctgcactcacagtgtcctcggcactgccctccgtggggacgtctgcactcacagaatgtcctcggcactgccctccgtggggacgtctgcactcacggaatgtcctcggcactgccctccgtggggacgtctgcactcacagtgtcctcggcactgccctccgtggggacgtctgcactcacagtgtcctcggcactgccctccgtggggacgtctgcactcacagaatgtcctcggcactgccctccatggggacgtctgcactcacagtgtcctcggcactgccctccgtggggacgtctgcactcacagaatgtcctcggcactgccctccgtggggacgtctgcactcacagtgtcctcggcactgccctccgtggggacgtctgcactcacagtgtcctcggcactgccctccgtggggacgtctgcactcacagaatgtcctcggcactgccctccgtggggacgtctgcactcacagtgtcctcggcactgccctccgggacgtctgcacacagtgtctttggcccagctcgggttaggagcactcgctctggaggcctgactgtgcttttgtaaattttcacaaacagtcactcaataggttttattttttgtttccaatgattcaatgaccaattctgctaaatttcacacagccgaaacacttgagaaaattggtagtaaagaacatttggaatccctgaggattttcagagttgagcgtgtgtggtggttagctgtattcctccactgggctgggccacggtgcccgggtctgatgggacattactctagaggcctctggaaggcgttggatgggtgggctgtgaggaaagaagatgagcctgcatagcgtgggtgggtctcctccgatccgttgaaggcctgactagaacagagataacaccctgcaccaggaaggaactctgcgtccgacggcttcagactagactggcagtgctggctcttccccgggtctccagccgagggtccaccctgcagaccttggacctgccggcttccacggtcacacaagccaattccctaaagataaatctctctctgtgtctccctctttaacaaaaggccacctttaacctttaacaaaaggcgacctgctgagaagtccttgtgctctgtgctttgaactggacatcaacaaacaacatggcgcttagtgtttttaaactgaccaagggacaagcctggagcagcctcttccggggcctcgattaaccaggaggaggtggctgctgtgccccaacccaggtgacagattcgggtgccggcacctcccctgagtctcagagtccagggagtcacaattctacagggacaacagaaacacacaaaagtgggcataaaataatcatcgatagaaggtttgtcactttgatgtctctgtgaactgatttaatgtggtatagaaagatggtcccgttactttagaggtggttagatatctctgtataatgcctgtatataataactcttacgtgatatagaaagatggtcccattactttaggggtagttagatatctctgtataacacctatatataataactcctatatgatacagaaaaatgttctcattactttagaggtagttagatatctccatataatgcctgtatataataactcttatgtgatatagaaagatggtctcattactttgggagtagttataaatctccctataatgcctgtatataatactcatatgtgatataaaatgatggtcccattactttaggggtacttggaaatctctgtataatgccgacatataattctcatgtgtgatgtagaaagatggtcccgttactttaggggtagttacagatctctgtagagctcctgtgtgtaatacccatatactatgcctctgttgattcagatagatcaattacttcatagaatgaatctgcgtgtctatttttaggtggatgagttgctatgttttaccattactattcttgctacattagtccagcttctacaggtaaccaaatgattttcattatcgtatatttataatgtctcatccagttattttctggaatgagagtacaaataaatgtatttctcaagctg

SEQ ID NO: 863 - DNA, 2553 bp, Homo sapiens
tcctccttctatactccctgaaacctgttttaaatttggctctgccattgaaccccgttgctctcacgttaccctctgccgcccgagggtgtggcgcctccctttagagtcttcgttgctctccgggtggggtctttactccccacctgctttggataattaagtaattgatgtacgtctccctcccagctgcaccctggagggctccagccagtttctcccctccctggatccaatcagtgagctgttgggtgctcagctgtggtctggatgtggttctcggcacggtgtcgggacccacctggctggactgtacccctctctctctgctttggtccctcttctttctttgtccccccaccatcacctcttggggcagggagggtgaggcagtttgtcctcctgctgctgttcctgctggtccctcgagggcgccccgcccaccggtcacccagcgaacgcggggcggggccgctgctggcgctgggccccagggcttgcagagagagggccacgccagcggaagggccggccaggaggtggcaggacttgccttactactgagtcgccggcatccccgcctcttccggcctctccgcccggagccctagcgtggaacatgacctttcggaccctctgggtggagacacagcctctgcctgggctgtgcagtgaggtggcaccaccatctcaggtcgtctggcccagtgcatctgtagctggcatgtgacttccagcaagctcctgcccctgagcgctgggaggagcaggtccagcaataattttttttttttttttttgagacagagtttcgctcttgttgcccaggcaatggtgtgatctgggctcaccgcaacctccgcctccagggttcaagcgattctcctgcctcagcctccgagtagctgggattacaggcatgcgccaccacgcccggataattttgtatttttagtagagacagggtttctccatgttggtcaggctggtctcaaactgacctcaggtgatccgcccacctcggcctcccaaagtgctgggattacaggcatgagccactgcgcctggccggacaataatgttttgagctgttgctgagtctggcttttgtgacgggaacttttagcactcaaggagtggccttgtctctggcctgtcccccagtgctcatgggcagccaaggcctggggactgctcaggcagggtagatgtatttgccaggccagctcccgtccctgggacctcagggagtagcttcatccctgaaggctgagtgtcttctgcctcatgtgggtggcccctctgcagggttctcaggcatccagggaagtgggtgccacagcgttgcctccagcctcactggggctggctggactttgctctgacaacacagcagtggctgggcccctgcaactctccagggctcagtttccctgttggccgcactatggcataggcccctgtgtggacaccgatgagctgaccccacaaatgccacccggccgctcccccaggcttcagtggcctaacagctgttgtgtcaggaaccagcttaaagaatctttcttgctttctcaaactctccaggaattcctggtgactggaagggggagtgactcaggccctcaacctctagcaggtaagggtgctacctcctgggtgggcatgcccagttcctcagtgggcccagcgcggcccagcctccgaggaagctctgagcagctggcttggctccgaggtatttttagctacagatccagcccccctccatcaccacaacagtcgagtccaaatcaaacgcgctccaggcaggtggggctggggttctgccagcctcctggccagcaggggtgggtgggcagactggggccagtatcagctgttctgcctggacccaggccgggctgggaaggcacacttgtgcttatttcccgcctccacttctgtgcaagcttgtgctgtcataagcagagatcacagccccatttcttggatggagaaagtggacactgaggtctgaggcttttgaggacagtcaggagccctcctatgggctccagtgatgcactcaccagcttctggtcctcttcttccacctcttagagtgccttggctccctcctgtcgtcctggggaacctcggccccagccctgcctccccagccagtcacagctcctccctggtcaccctgagggagctcagggcccggctggtagctgggttgctctgcttctgtccccgactcctgtggagcctggcaggcaactccatgatctgaccccggttaccttgacagccctgcctggcctcccctctcatggcccagccaccccagaacctgaagaggttttctagctgccgtgcatttgccaggctgggttacccaccctactttccctgcctgccctccagtgctgccaggcctagtgtgccagccagcgctcagccttcagtaaagggttcccctgcttccaacctccattgcactgcttcccctaagactgtgacctcctggaaggctggagcacaactgcctctcaataaacgtgttgc

SEQ ID NO: 864 - DNA, 3109 bp, Homo sapiens
ggtcgggttggggcggagcggaggggagtcagtgcgcagcagggcaggttcctgcggagccgccggagacggtcgggtttgccagggccgggcgggaccgcggggaccatggcggagccgcctcggatgatggacttccaaaaccagaactaatatcctggattgaacacgggggagagcccttcaggaaatggagagaatcacagaaatcaggaaacataatttgctcctctgttgatatgcattttgatccaggttttgaggaacagctgttttggggaagccagcaggctatgaattcaggaaaaactaaaagccatttccaattagatcctgaaagccagtgttcctttggatcctttgtttccttcaggcctgaccaaggcatcaccctcgggagcccacagagacacgacgccagggctcctccaccactagcctgcggccccagtgaatctaccctaaaagaaggaatcccaggtcccagaaatctggatcttcctggtttgtgggacgtccccgcctgggagagcacccagcacccttggcctgtctgcggggaaagctgttgggagaacaaccatttagtaatgcaccagagaggccactcaaaggaccggacacgtagggcctgggagaaattcaacaagagggcggagacgcagatgccgtggagcagccctcgggtacagaggcacttccggtgtggcgtgtgcggtaagagcttccgccggaagctgtgtctgctgcgccatctggcggcccacacggggaggggccccttccggaacgctgacggtgaaatatgcttccgacacgagctgacccatcccagccaccgcctcccgcagcagggggagaagcctgcccagtgcaccccatgcggcaagcgctccctcccagtggacagcacgcaggctcgccggtgccagcacagccgggaggggccggcctcttggagagaaggccgcggggcctccagcagtgtgcactcgggacagaaaccaggctcgcgcctgccccaggaggggaacagccaccaggaaggggacacggaggcgctgcagcatggcgcagaggggccctgctcctgctcggagtgtggcgagcgctcccctatgagcgccaggctcgccagcccctgcagggcgcatactggagaaaagcccttccagtgtgcgcattgcaccaagcgcttccgcctgcgccgcctgctgcaggtccaccagcacgcgcacggtggggagagaccgttctcctgcaggaagtgtggcaagggcttcgccaagcagtgtaaactcacggagcacattcgagtccacagcggagagaagcctttccggtgtgccaagtgtggcaggaacttccgtcagaggggacagctgctgcggcaccagcggctgcacacggacgagaagccctttcagtgcccagagtgtgggctgagcttccgcctggagagcatgctgagagcccaccggctccggcacggtggggagaggccgttctcctgtagcgagtgtggcagaggcttcacccaccagtgcaagctccgtgagcacctgagagtgcacagcggggagaggcccttccagtgcctgaagtgcgacaagcgcttccgcctgaagggcatcctgaaggcccaccagcacacgcacagcaaggagaggccgttctcgtgcggggagtgtggcaagggcttcaccagacaatccaagctcacggagcacttgcgcgtgcacagcggggagagacccttccagtgcccagagtgcaacaggagcttccgcctgaaggggcagctgctcagccatcagcgcctgcacacgggagagaggcccttccagtgtccggagtgcgacaagcgctatcgcgtgaaggccgacatgaaggcccaccagctgctgcacagcggggagatgcctttctcctgtgagtgcggaagggctttgtgaaacactcaaagctcatcgagcacatcagaacgcacacgggagagaagccttttcagtgtcccaagtgtgacaagagtttccgcctgaaggcgcagctgctcagccatcagggcctgcacacaggggagaggccttttcactgccctgagtgtgacaagaacttccgggaaaggggacacatgctgaggcaccagcgcatccacaggcccgagaggccctttgcctgtggcgattgtgggaagggcttcatttacaagtctaagcttgcggagcacatcagagtacacacaaaatcctgtcctgctccaaatgaactggacattaagaaaaggctcagccaactgtttgcaatgatagaggccgattggagttgaggcagagtgggacatccaaagcgttgagcaggattggtattgcccaggaatccacagcaacagtagccagacccgctggtagacgggttttaggagcaggtatccttctttgagcaagagtgtcatgcaagttaggaatatgaagaaccacaaaggattttctcttcagaagcatcaccaattatatttctttcttttttttttttttccaagatggagttttgctctgtcacccaggctggagtgcagtggcgtgatcccagctatattggaaaagacagcattataaaacaaggacataattttatgaaaaaggaggcatctgcaaacgaaaacaatttctacgaggttatatgtgattgttaacatttttaagaaaaggtgcacacagaaatccagataagatgtgattacctttgtgcatttgtataaaaatatatgtgtgtaattataaggaagttctgacattttaaaaagtaattgttataaaagtaaatttaggccaggcacagtggttcatgcctgtaatcccagcacttgggaggccgtggcaggaggatcacgagccaaggagtttgagaccagcttgggcaacatggcaaaaccctgtctctactaaaaatacaaaaattagccaggcatggtggtacacaccagtagtcccagctgctcctgaggctgaggtgggaggatcgcctgagcccagggaggtcaaggctgcagtgagcaatgatggtgccactgcactccagtatggatgacatagtatgacactgtccc

SEQ ID NO: 865 - DNA, 3240 bp, Homo sapiens
tgtatgtagcaatgagttgtgaatcttagtgcagtgggtttttttaaaaaactcaaaaagctgggaattaagtggtttcagtaataatgctataccgaggtgcttgcattgtatttcataattttgttacaaaccaaaattatttttaatgagaacagtcttgggttcagaggtgtgatgccagaatgtattttcgtactgttaggcccttggaacagataccggtgctttctgaaagatgaaagaaatgcaatgggtgctcttcatgcaaggttgcaaacctaccaagaatgcataatagtctcactttttcccaataaagagatgcgtgtgactagttttggacttttaaccttaatgggggttgcatgtctcctattgttaatcattgtcagctgcagtgacatgatccacagtcctgcatttactgcctttcacttaatgattttggacaggttttagagagccaggatgttggtctgggcctttatttggttttggctttagctgataatgttttagtgatgtcagctagtgcagttctcaaatggctgcctattagggaaagaattcagaggatttgactgctcctaatcatctgtcattgctgctagataatgattggcaatttttaagactcaactggaaatctcaacagttgctggtaaaccattaaccataaaaacgttgcttttgaacaccagtgctgaaaaaaatatttttttttttttttttgagagtgaaaagggcttggacttaagataggacaatgtggagaatggggggaagaatgcaaaacgatatagtatcccttatggatggtacatgtgcaacagggaactcttacttcatataccctttgcagtaatcattcagggaggaagaaaaacctggaacttgaatgaaggctgatctttgttttgtgcactgtggccctgccaggcatatagtgaaggtgaatgtcttctccctcagaaaaaaattggttccttgctgtcccagtaaggcatagcttttccagccctaactttaaaactcagtgaggacttagatgggaaagaatgaggtaaatacaaaggattgcaggacaacaactacagcgttgtgtactgtgggaaggggagttgggcactcttggaggactcctgctgaaggtggtcagcctgcctgacaatggaagacatacttgaatggggagcagggtatgtgctttcatatgaaaaaagagctgatgttaaaactcatttggtgaggtcaacgttgtcacataccttcacataagggatagtatattttgggttgcagtcaaacttgtgctcagactggtgaaactgagagtcaggcttttacattttaaagaaaatacagttttcattctaattcaggtgtctacttattttatgtaagaataattttagatttcccccccaccatgaagtttcttcctatttttttatgctgtaacttacccccaatctttatctctggatttttactctttaaattttgaagttgactagcattttcaaacctttattttatacccttgtcttttatattaactttttcttattattctttaggtaagaatgattgatgttggctgatattggagtgctcattcacatgaagtaagtttcctttagaaatcttaacccctacaggcttttgagtttgatttaaataatttcatttagatatgtggagtgaaacttcgatatttgagatgtttaccgtttctaagataatatccctttatttttgtttggaaattagggatgtatgtgagaaagcaagtgagaggcattataaaaatgtcaaacaatagaatttttaaaaagtggatggttatataacggtcatagaagaacagaaaagaaaacttgacttaaggggaataggccatattgtcaatattcaattcaattttagactccatctaaaactccatgattctttttttacttaagaaaatgtaggagaaggtcaggcatggtggctttacacctatattcctagcactttgggaggcagaagtgggaggattgcttgagcccagcctgggcaaaatagtgagaccatgtctctacagaaaaaaatatagccaggtgtggtggtgtgtgcctgtggtcccagctcccttggaggctgaggtgggagggatcgcttgatcctgggaggttgaggctgcagtgagcaagttaacattttttgttacaggtggatagatacttctcaagacatcacacagcgtgagtcaatcaaggagggaagccacaagcagactgacaacgtttctaggtaagttaaatgattcttagtctgttaaactgtcttcagaaaggcccttgggtggtacaaaaataacaatactaatgtgggaaccattaattttttattttttgagatggagtttcgctccttttgcccaggctgtagtgcactggcatgattttgactcactgcaacctccacctcctgggttcaagcgattctcctgcctcagccttccaagtagctgggattacaggcatgttctgccacgcccggctcattttgtatttttagtagagacagggtttgaccatgttggtcaggctggtctcaaactcctgacctcaggtgatctgtccaccttggcctcccaaagtgctgggattacaggcttgagccactccgccctgcctgttaattacaattaatgccatgttctttcattcattaaaagattttttttttttttttttgagacggagtcttgctctgtcgcccaggctggagcagtggtgcacagtcttggctcaccgcaagctccgcctcctgggttcacgccattctcctgcctcagcctcccgagtagctgggactgcaggcgcccgccacacacgcctggctaatttttttttgtattttttagtagagacagagtttcaccatgttagccagggtggtcttgatctcctgaccctgtgatccgccctccttggcctcccaaagtgctgggattgcaggcgtgagccactgcgccaggccgattaataagatttctttggtattagttcacttgacagttatataatgttatgtttgagaatttggtaactctgattcttgtatcctttggagtaatcataccctttaattagcaggatcaggtgagctgtgtccagaaaaccaacgagaaggagtggaaggaggaatgaacgtttcattctcgttaataaaggcattatcctaatt

SEQ ID NO: 866 - DNA, 2117 bp, Homo sapiens
agtactgatatgccatcccagatttctgtggttaatgtggatcaactgtgggaagattctgtcctaactgtcaaattccccaaattaatggtaccaaggttctccttccctgcccccagctcagaggatgatgtgttcatccccactgtgagggaagtgcagtgtccagaggccaatattgatacagccctttgtaaggaaagtccggggctctggggagccagcatcctgaaggcaggtgctggggtccctggggagcagcctgtggaccttaacctgcctttggaagctcccccaatttcaaaggtcagagtgcatattcagggtgctcaggttgaaagtcaagaggtcactatacacagcatagtgacaccagagtttgtagatctctcagtacccaggactttttccactcagattgtgcgggaatcagagatccccacgtcagagattcaaacaccttcgtacggattttccttattaaaagtgaaaatcccagagccccacacgcaggctagagtgtacacaacaatgactcaacactctaggactcaggagggcacagaagaggctcccatacaagccaccccaggagtagactccatttctggagatctccagcctgacactggagaaccatttgagatgatctcttccagcgtcaatgtactgggacagcaaacactcacatttgaagttccttctggccaccagcttgcagacagctgttcagatgaggagccagcagaaattcttgagtttccccctgatgatagccaagaggcaaccacaccactggcagatgaaggcagggctccaaaagacaaaccagaaagtaaaaaatctggtctgctctggttttggcttccaaacattgggttttcctcttctgttgatgagacaggtgttgattccaaaaatgacgtccagagatctgctcccattcaaacacagcctgaggcacgaccagaggcagaactgcctaaaaaacaggagaaggcaggctggttccgatttcccaaattagggttctcctcatctcctaccaagaaaagcaaaagcaccgaagatggggcagagctggaagaacaaaaacttcaagaagaaacaatcacgttttttgatgcccgagaaagtttctcccctgaagagaaggaagagggtgaactgatcgggcctgtgggcactgggctggactccagagtgatggtgacatccgcggcaagaacagagttaatcctgcccgagcaggacagaaaagctgacgatgaaagcaaagggtcaggcctgggaccaaatgaaggctgagaggtatggctcatcagtacaagagagatgcaaaaaactaagttggaaagtaaaggctacacacacatatggagcaccccatcccacagcacattacatccacctcacttcacagaacggagaacagagcagaaatgaccagaacacctttgtcaccatcacacagccctcctaaaatggaaccaaagcttcccagctccctcaaagctttggatgcaaagaaggcaccctgacttccacaagacaccagaattcacacggtactcagaggcactgctggggaagtttgttggtctttattagataaatttccagagacctgtccataatacccaacagaacatgactgtttctttgaggaaagggttataatgtctgtggtgtacaagtcgtttttggtataacttctttcctgctgctgctgcttcccggcaaacatagttttcctatttcaggcagagtgcggtatattccaggaaacactgtttcctactcacttagcttacttctttgttgaatgcctcactaatggcaagtttcaagatgttttgggtgacaatgcacacatgctgggcaaaagggtgatggccagtggctggcagctgggccagcagaagctaggacatctgtgagctgtcattctcatctatccatgtccactggcctgccagcatccgccagtgccttgccagtgtgcacggtcccacactgtggcccctgagtcccctaatgtacacgctgcagccagaatgcagatggagctggcttggctgttccctggatgggcaataaagaaagtgctgcatccc

SEQ ID NO: 867 - DNA, 1914 bp, Homo sapiens
ccttcgcgcgtgaggctgcggctctgacggctccttcaatttccgtgatcctcggagtccccaggagaccaggtgatggcagcagccagactcctgccagtgccggcaggaccccaggccaagctgaccttcgaggatgtggctgtgctcctctcccaggatgaatgggaccgcctgtgccctgctcagaggggtctctacagaaatgtgatgatggaaacctatgggaatgtagtctcattgggacttccaggatccaagcctgacataatctcccagctggagcgaggggaagatccctgggtcctggacaggaagggggctaagaagagccagggcctgtggagtgactactcagacaacctcaaatatgaccacactacagcctgtacacaacaagacagtttatcttgtccatgggaatgtgaaaccaagggagagagtcaaaatacagacttgagtccgaagccattaatttcagagcaaacagtgattctggggaaaacacccttggggaggattgatcaagaaaataatgaaacaaagcaaagcttctgtctgagtccaaactctgttgaccaccgtgaagttcaggtcttaagccaaagcatgccactcactccgcaccaggcagtgcctagtggagagaggccctacatgtgtgttgagtgtgggaagtgctttggccggagttcccacctccttcagcatcagcgtatccacactggagagaagccctatgtgtgcagtgtatgtgggaaggccttcagccagagctcagtccttagtaaacacaggagaattcacacaggtgagaagccctatgagtgtaatgagtgtggaaaagcctttagagtgagctcagatcttgctcagcatcacaagatacatacaggagagaagcctcacgaatgtcttgagtgtcggaaagccttcactcaactctcacatctcattcagcaccagcggatccacacgggagaaaggccatatgtgtgtccgttgtgtgggaaagccttcaaccatagcactgttctgcggagccaccagagggtacacactggggagaagcctcacaggtgcaatgagtgtgggaaaaccttcagtgtgaagaggacactgctgcagcaccagagaatccacacaggtgaaaagcccttccagtgcacagaatgtggcaaagccttcagcctgaaagcaactctgattgtgcacctgaggacccacacgggcgagaagccatatgagtgcaatagctgcgggaaggccttcagccagtactcagtgctcatccagcaccagcggatccacacaggcgagaagccctatgagtgcggggagtgtgggcgtgccttcaaccagcatggccacctaatccagcaccagaaagtgcacagaaagttgtgacccatggctgacacaagaatccattctcacagaaactgcatgtggaaccacaagcagccttcagcccaagagaagtctctgttaactctataggaagcttttctttggcgattcagtgtcacaaaataactccagaaagaagcacttagcgtgctgttcctgtggaaaaacttcagagactacctgttttattttcctcaacatcttgaagttatgttggagagtaatcatacaattgtagagaattttggtaaaaaacagccataattctttaacattagtttatttgaactaagggaatttaaggcataagaaccattatcccaataaaatcttacattccaaataaagttctttttctaagaacattacatgcccttcctaaatatcaattaaccatactaattattgcacttaaaatttgaaagtcggactattttcagtattctcttaaaagactaaagtattgtatggataaagtgatataaaaagatattttcatcaagc

SEQ ID NO: 868 - DNA, 2454 bp, Homo sapiens
gatatatccacgggctttgctttgagaaggaactgagtaggcagtgagaagagtcgagtgaagcctggcccgtgagtgcctcaacaactgagatgaacgtcgactcgcttgcaggcaagttgtcactcagcagcgatctgaactatatcctgggttccagaaaaggcagtggttcttaccgaaagcaggggaggaagccgcagcccaaggaggtcgtcacttgccgggaaggtggctcgggccaggctgcactcaaaacccgtgctctgtccacactgctacggggccagagccaaggaagcttccacttcttcccccagacagccccaacagcggctaccccaaggagccagcagccttgtgtcctgggatccccagcccctgcagaatgacccaccaggatctgaggtgagctcggctggggcagcctgaggccctgggccctgggcctggcggagagtcgctgtggtgatagcacatccaggtttctgaagaacaagctgagtcctagggaagagcaagacccctgtcccccatataacatatacactacatctactgtggcaaatacgtacacacaagcatctgtgcacatatatgttattgttcgacatagtttaattgtttgggttcatcttctctaactacaaaattaagtttacagttctctttatcgtcccaagtttcttcctttgtgaaaggcccactatcatctactcttaccacttccaggtaaatccatctccaaatattttgttcacagtctgcctcccgcctgaaagataagaaaagttgagtgggttccaaggagtctgagaaagctttgttttctatttcccgtcttccaaagctcctatacccagcagggtggggggccatgttatctaaactgtggctttacttttggctggaactaggtcacctcaagggctgaccgacttgaagccttcactgtgggaagtgcctgctctcttattatgaacaatagctggcattcccccccaggcacggtttccatagtcctcagcaaccctggagtgagttcgacgggaatgcaggcccagagaggagaggtcacagtcaggatgcaaactcagttctgcctgaccttcagtccgtttgtgtgagaactgcacacgtggctccaggcctgcggaggagccagaggacgggccggggaagcttggggcagagcggtgccctggtggcggcccatgggggcagagctgggctcctcccagaagcccctgcaggtcccagctccagggacttcccgggttgcagcaagatgcctcacccgggtgagtgcggctgtcctgtctggaccagacctgggccagggaggctgaagagggtctctggacacctgtggggctggggttccccactgtctgtgcccctgcccattcctggctgcatccgctccctaacctgcccctccctctgcctctctcctccccctgtcctccccctgtcctagcatcacagccaaactcatcaatggaggtgtagcagggctcgtgggggtgacctgcgtgttccccatcgacttggccaagactcgcctgcagaaccagcatgggaaagccatgtacaaaggaatgatcgactgcctgatgaagacggctcgggcggagggcttcttcggcatgtaccgaggtgggcttctcaggtcccctgggaggctgggcagcaggtgtgagcgtatgggacatgggggactggtgttccttccgttgctgcggggatggggccagggctgccagggggtccttcctgatgagcctctgtgctcttgggtggagacagaggcagctctgggtcctggtaaggcttccggagacccacagagcacaccccccgccaccgcctcagtaagagcaggcgagccctccctacctgcctgcctctctctgcctggctagaagcgaagagagagaggctgaaagggactgagggacggggcctgagctcctggcaaggagttctgggtggctcctccccagctcggtccagcgttgctgcggtccctgcggggtccccagccaggaggtaccttggacaatggatcccaagctggagttgagccggagctcgtatgcttgtgccgccgagaagcaaaacacaaaccctagacagccccgagctagcagccaatgggactggcttgtgcggcacagaggagcggaaccccagtccctgcgcctggcgcctgtcactggaactgctgttttatcatcagcgaccccaccagcagcaacaaaaataaaatggcttcctgataaccaaactgaggagtccgtaagaaaaaaatacgtaaaaaggggagaatgtggggccgggcgcggtggctcacgcctgtaatcccagcactttgggaggccgaggcgggcggatcacgaggtcaggagatcgagaccatcctggctaacacggtgaaaccccgtctctact

SEQ ID NO: 869 - DNA, 1902 bp, Homo sapiens
atgtgtgggtccaaagagctcaaatttgtacatctttccagaaaaagtactacccttcccctcccccaaaagtggcttttttaaagcttttgtgtcattttcccatttgtgcccatggacactgggtatccacaactacagcaggaaaaggctttgagcagaatcccaggacagctcttggtggatttgtccttcctcaagagcaggagtggattgttctgagctggctttggtgttttctttccccagaaagcttaggttttatgcagcttgacacctgggagaggtgtccagggtcttagatgtagaaatgtggcttgggagacattggcccatgaccctaacaccaggcgtgcaaatccccttggagcccagacccagtggcagccggggttgccgcccacctgcctgtgctgtgcactgggtgccttctgcgctcagctgcggccttgtctgtgaatccggagtgcggagccagcgggtgcctgtagtgggtggaattggggtctgcacttgcccctccgcccccaggtgggagtcacctggagcgtgaagggacgtgtctcatccccagtgtgtcggaccctggagacacagccgcagagcagccccttctcatgcatggacctcacctacgtcagcctgctactccaggagttcggctttcccaggagcagagtgctgaagctcactcggaaaattgacaatgttgagaccagctgggctctgggggccatttttcattacatcgactccctgaacagacagaagagtccagcctcatagtggccgagccatccctgtccccgtcagcagtgtctgtgtgtctgcataaaccctcctgtcctggacgtgacttcatcctgaggagccacagcacaggccgtgctggcactttctgcacactggctctgggacttgcagaaggcctggtgctgccctggcatcagcctcttccagtcacatctggccagagggctgtctggacctgggccctgctcaatgccacctgtctgcctgggctccaagtgggcaggaccaggacagaaccacaggcacacactgagggggcagtgtggctccctgcctgtcccatccccatgccccgtccgcggggctgtggctgctgctgtgcatgtccctgcgatgggagtcttgtctcccagcctgtcagtttcctccccagggcagagctccccttcctgcaagagtctgggaggcggtgcaggctgtcctggctgctctggggaagccgagggacagccataacacccccgggacagtaggtctgggcggcaccactgggaactctggacttgagtgtgtttgcctcttccttgggtatgaatgtgtgagttcacccagaggcctgctctcctcacacattgtgtggtttggggttaatgatggagggagacacctcctcatagacggcaggtgcccacctttcagggagtctcccagcatgggcggatgccgggcatgagctgctgtaaactatttgtggctgtgctgcttgagtgacgtctctgtcgtgtgggtgccaagtgcttgtgtagaaactgtgttctgagcccccttttctggacaccaactgtgtcctgtgaatgtatcgctactgtgagctgttcccgcctagccagggccgtgtcttaggtgcagctgtgccacgggtcagctgagccacagtcccagaaccaagctctcggtgtctcgggccaccatccgcccacctcgggctgaccccacctcctccatggacagtgtgagccccgggccgtgcatcctgctcagtgtggcgtcagtgtcggggctgagccccttgagctgcttcagtgaatgtacagtgcccggcacgagctgaacctcatgtgttccactcccaataaaaggttgacaggg

SEQ ID NO: 870 - DNA, 2784 bp, Homo sapiens
acgccccgcaacctcctggttccaagtgggagacatggtgctgtcggagctagcggcgcgcctcaactgcgccgagtacaagaactgggtgaaggcgggccactgcctgctactgctgcgcagctgcctgcagggtttcgtcggccgcgaggtgctctccttccaccgcggcctactcgccgcagcccccggcctggggccccgcgccgtctgccgcggcggctcacggtgcagccctcgcgcccgccaggtgagcacctggctcggggccttgaccaccgcccccaccccacccctcctcatccccgttcctgtcccagacccagagcgcaagtgtcctgttccctccgcgatgcggggcccaccgcgacgtccctccctcctgggcccctcctcaccgccgccccctgtagtttcagcctcagtgtcaggtgtgcgctgaatggaaaagggagattttgagacatcatgtcaacagaaatggagatgtgcactggggaaactgccggccgggccgctggcccgtggacgcctgggaggtggccaagagttggaagagactcaggtccccctcctccctcccttgctataggccttcatgccccgaggactagcagacaaacaaggacctgaggaatgtgatgcagttgctcttttaagtctcatcaactcctgcgatcacttcgtggttgatcgaaagaaagtcacagaggtaattaaatgtcgtaatgagatcatgcactcttcagagatgaaagtatcttctacgtggcttcgagattttcagatgaagatccaaaattttctgaatgaattcaagaacatcccagagattgtggcagtatactccagaatagaacagctgttgacgtctgactgggctgttcacatccccgaggaagatcagcgagatgggtgtgaatgtgaaatgggaacttacctgagtgagagccaagtcaatgaaatagaaatgcagttactaaaggagaaacttcaagagatatatcttcaagcagaagaacaagaggtgttgcctgaagagctctcaaatcgactggaagtggtgaaggaatttctgagaaacaatgaggatcttagaaatggccttacagaagatatgcagaagctagacagcctctgtctacatcaaaaactggattcacaggaacctgggagacaaacacctgacaggaaggcctgaggtgagttcaggcagatgatggtgttaaagaaggacagaatcacctcatctctttcatgtctattctctcatgtgaggccatcatgaacacacaacaatctaatctgaagtttgcctttgtccttattgtttcaaagaaaggacactgaggtttgtgttcttcacttaatgattcttacgtctgtgaagtaattcagcatcaactccctgtttagccaaatacacctgaagtcattggtctagaattaaatgaatcagctttataacataatcaaaaagcatttctgccttaaaatgacaccattgatgcctagctcttaccatggcattaatagcaattgactagtcaatttccataaggagaacttcttaaaatgagtaactgtcttcagcattttactttttcccccctcaaataaaaaaaaataaataaaacattctttttcattttaggttgcccgtcaacaaaaatcaggcatgttctgtgaaagtcagcatggcttccatctcagacatccttttctgtgcaaaaggaaaaagttaccagagtattgtacccaaacaaaaaggaatttttgttgttttgtcctggactttcctctaactctttggaactattttaatatttataaacttggggttgtataatctattgcaataaaaaatattagatactctatgccaaaacttgctaccaggccaggtgtgatggctcacacctgtaatccccagcactttgggaggccaaggcgggcggatcacctgaggtcaggagttcgagaccagcctggccaacatggcgaaaccccatctctacttaaaaaaaaatacaaatattagccgggcgtggtggcatgtgcctgtaatcccagctactcgggaggctgaggcaggagaatcgcttgaacctgggaggcagaggttgcagtgagctgagaccatgccactgtactccagcctgggcaatagagcgagattctgtctcccaaaaaaacaaaaaacaacaacaaaacttgctaccacccagggattttctgctatttaaaaggtgaatttcttttctggtactaaactgtagctgcttaacttagtaaaggctgtgtttggccaggcctgtgccagaggctcacctggagtgctccacccactggcaggcaagtcctattcctattcacccaggatccccaaggctgggctgggatataaatgttgggataggaaagaaatatttcctttttagaggaaagcaagaagaaacattgcctgaaaggtgattttctagtcatttccaattagtacagaaatgttactgcctctgggtgcagtggttcacgcctgtaatcccagcactgtgggcggatcacttgagcccaggagtttgaggccaacctgggcaagatggcgagaccccatctctacaaaaaaatttaaaaattacctgggcatggtggcacacacctttattctcagctactcaggtggctgaggtgggaggatcccttgagcccaggtggtcaaggctgtggtgagctatgatcatgccactgcactccagcctgggtagcagaacaagaccctgtctc

SEQ ID NO: 871 - DNA, 3666 bp, Homo sapiens
gcggcagcagcggctgtggtggttccgggtgtctttgtccccccggtgtcgctgccctggcccgcagccttttccccacgactctgaaagaggacagcgttcccaatgtcccagtttaagcgccagcggatcaacccgcttccagggggacgcaacttctcaggcacagcttcaacatctcttctgggtcctcctcctggtttgctcactcctcctgtggccacagaactgtcccagaatgccaggcaccttcagggtggggagaaacagcgggtcttcactggtattgttaccagcttgcatgactactttggggttgtggatgaagaggtcttttttcagctaagtgtggtgaagggccgtctgccccagctgggtgagaaggtgctggtgaaggctgcatacaacccaggccaggcagtgccctggaatgctgtcaaggtgcaaacgctctccaaccagcccctactgaagtccccagcacctcctcttctgcatgtagcagccctgggccagaagcaagggatcctgggagctcagcctcagttgatcttccagcctcaccggattcccccactctttcctcagaagcctctgagtctcttccaaacatcccacacacttcacctgagccacctgaacagatttcctgcccggggccctcatggacggttggatcagggccgaagtgatgactatgactccaagaaacgcaaacagcgggctggtggagagccctggggtgctaagaagccaaggcatgacctgcctccttaccgggtccacctcactccttacactgtggacagccccatctgtgacttcctagaactccagcgccgttaccgcagcctcctggtcccctcagattttctgtccgtgcatctgagttggctatcagccttccccctgagccagcccttttccctccatcatccaagccggatccaggtctcttctgaaaaggaggcagctccagacgctggtgctgagcccatcactgcagacagtgaccccgcttatagttcaaaggtactgctgctctcttccccggggttggaggaattgtatcgttgttgcatgctctttgtggatgacatggctgagccaagggagacgccagagcatcctctgaagcagattaagtttttgctgggcaggaaagaagaggaggcagtgctggttgggggtgaatggtctccttccctggatggcctcgacccccaggctgacccgcaggtgctggtgcgtaccgccatccgctgtgcgcaggcccagactggcattgatttgagcggctgtaccaagtggtggcgctttgccgagtttcagtacctgcagccgggacccccccggcggcttcagacagtggtggtgtacctgccggatgtctggaccatcatgcctactttggaggagtgggaggccctgtgccagcagaaagctgcagaggcagctcccccaacccaggaggcacaaggggaaacggagcctactgaacaggcacctgatgccttggagcaagcagcagacacttctagacggaacgcagaaactccagaggccaccacacagcaggaaacggacactgatctcccagaggcccctccaccccccctagaacctgctgtcatcgcacgccctggctgtgtaaacctgtccctccatgggattgtggaggatcggaggccaaaggaaaggatctcttttgaggtgatggtgctggccgagctgtttctggagatgctccagagggattttggctatagagtttataagatgctactgagccttcctgaaaaggtcgtgtccccacctgaacctgagaaggaggaggcggccaaggaagaagccaccaaggaggaagaagccatcaaagaggaggtggtcaaggagcccaaggatgaggcacagaatgagggcccggctacagagtcagaggccccgctgaaggaggatgggcttttgcccaaaccactctcttctgggggagaggaagaagaaaaaccccggggcgaggcttctgaggacctgtgtgagatggccctggacccagaactgttgcttctgagggatgatggagaggaggagtttgcaggagcaaagctggaggattcggaggtccggtccgttgcctcaaaccagtcagagatggagttctcttcacttcaggacatgcccaaggagctggatccctctgctgtgctccccttagactgtctgcttgcttttgtgttctttgatgccaactggtgtggctacttgcaccggcgagacttagagaggatcctccttacccttgggatccggctcagtgcagagcaggccaagcagctggtcagcagggtggtgacccagaacatctgccagtaccggagccttcagtacagccgccaggagggcctggatggtggccttcccgaggaggtgctcttcggaaacctggacctgctgccccctcctgggaaaagcacgaagccaggtgctgcccccacagaacacaaagccttggtgtcccacaatggcagcctgattaacgtggggagcctgctgcagcgcgcggagcagcaggacagcggccggctctacctagagaacaagatccacacactggagctgaagctggaggagagccataaccgtttctcagccactgaagtaaccaataagacgctggcggcagagatgcaggagctgcgagtccggctggcggaggccgaggagaccgcccggacggcggagcgacagaagagccagctccagcggctgctgcaggagctccgcaggcgtctgacccccctgcagctggagatccagcgggtggtggaaagggctgacagctgggtggagaaggaggagccggcacctagcaactgacggcctcgcacggaactgccatcctgtgagggcagcggtggcgcccggcaaagttggagcccttgcggtaccagaaagcagcgagagcgagacctgggagccagggcaggggtggctgaccccatgctcagcctctaggggacggcaggccatcaggctgggggctgtgctatgtgggatggatgtgtgaggaaccccggttccacttaacaactaaatacaacatcttttgcacccctagaatgtcattttgccctcaaccttggtatttctcctggggcccttttagtcttgtgctgactttctcctgtcctcttccagtttagaataagacaggggagaaaaaggcttttcgagtgtgggacaaggtctgatgtcagtgaacggaactgaagagcaagacatggagcctggctggggctaagcagccccctcctccggatggcacaggctctgctaggttccggacacaggcttctgggggaagggtctcccttggccatcacgggaatggagtccatgctagaaagagctcagtgttgggctgggtttgccagtagaacactgcgttccagtcaccccagtcttgccagaagaaaccagcacttcttccccgtggctcctgtgttcagaatgtggtattggctctggcccagccttctcccctgttacccataattcttgcctctttccataatccgtggtttcagtttgactttgtatataaagttggggtttttttttttttttttttttggcttgttttttaaataaaccaaagtcaaaaac

SEQ ID NO: 872 - DNA, 3081 bp, Homo sapiens
cttttgaatcacagctcatgaggcaacccacacaggcaggctggagaggagtggcaagaagctcaccttcggacagtagtaagcagagcaacagaggcccccagagacttcgcacaacggaaaagagatcaactcccgcatttgcaggggacgtgaaagtgcaatactgtgaggaacaaaaggaagcctcatctctggaagccgggaggaaaaacagtcggtgtagacagcagcggcagggaccagagctgaccagaaggctgggtcccagcaacaattagagacaggcagcagctgaggccccttctctgagaaccatttcaattgcacagtggccacagaaggctccattggcccggcagccagctctgcagagccatttgtccacaaggaaaataatagccccggcctcattgctttgggctgcagggaggacaatgacccaccatgaaaagagttaaaaagattctggggaaggggaaaggcaggcccacacggtggcaattcaagatcttttggatgccgtgagcgtgttctttaattaagcccctcttcttcagctcatcctgcagaaacgcacctgcttcccatctgccatccaaaacggcaagcacaagaatgacttcacactgtcactttcagagttccgctgtggcccacagtgatttttcaagaaaggcagccacagactcgctcgcgctttctctttctcctttcctctgaaagactctataaaaaccacattaaaaagtgtgtgagccaagcaatttcatttatcaaaggaagaaggtcatccatagcattcattctaagaatatcaggcacacggccagccctggacacaaggcatgaagaccagagggccctttattgacctaatctctattttgtcgccaaactgcatctgtgtctgaaagctgggacacacaatatttccctctaccaaaataattttattttctgcagcagcatgtaacaaacaattaatggtggtaacatgggcttctgtcattttctgaacaacccagttctgtttggtgttactgcagtggttgttattttgggtggttctgtgcttattccattctgccaattggtcccattcgcatgggcgtgagcccgtgccgtcatctaccaccttggaatccatgttattgccagaactgtgtggggccttgcttgagggcctgtcccctgtcctcttcacagatgtttctgtgccttcagggaggggactgattgtgctgtctccctctcccacccgtgtctgctgtctccaaaactaagggaggctgcggtgaaaccagcctggcccaggttcctctggtgcctgccgtggctcaaattatccaaactacagtggctgattcccagcgacccatcccttagtgcccttgtgccccgttgaagaagtggcccatgttatgaatagggaagctaaggtcattaagaatttgtgcaggcgtacaaagaaagtgcaagtcagagatccttgtctcagctactttgcttgaaaaatgactccatgctctgagatgctataaatggagcaaacagtgtgaagtggttctccccctccaagaaactgccccctgatgcgttcccccattagacacctgctcctccaagcctggtcttctctctgcaaccacttcccctatgcctccccccacccaccatgcatgactccttgtcacacacatgatctctggtcctaccttgcacttggtgctgggggctgtgattccctctgcctctgtctccccacatcgtccctgacatcacctttcaccgtgcactggtctcgcttcctcgggaactctatgaatggccttgttctctgattatttgattattccattatcaacccaaagctcactgggtctatggggctgagaggtcgtttttattacatcattttaattattcagataaaagactcgcaggcacagatttatcaccactgcctaaagaaaagcagagacacacataattccattttgaaaatccattcttaaaagcaaaaatatgattcagttgaaggtattcagaaaaaaaaatgctcattgaaaaaccctgatgatttttagcatttcaaataaattgtgtacagttacggtcatttgttaactattttggagactgcgagctgatcattatctctctttttcagataacaaaatgtatctaccttctcccagagtgtaaactaatctggtggctggaaaaagcaaacaaacaaacaaagatctgttaagaaagatctgatttttcaaatggcgcataccattccttgaaacagaggtgatgaataggtagagacaaaagcatcaaacatccaggcaggacctgtttatctctgggcagaaatctgttcaattccatgataaaacaaggtttgaagtcagggattcaatttcacaaactaaacagacgtgtgcacacacatgtgcacactgtgcatgtcccagtgcacacacgcagaacccatttcgtagggacacacatgtgcacactgcatgccccagtgcacacacgcacaacccatttcgtagggacacacatgtgcacactgcatgccccagtgcacacacacacaacccatttcatagggacacacgtgcacactgcatgccccagtgcacacacgcacaacccatttcgtagggacacacatgtgcacactgcatgccccagtgcacacacgcacaacccatttcgtagggacacacatgtgcacactgcatgccccaatgcacagacacacaaccgattttgtagggtcctagcagaattttctctgtaggaaaagcactcaatctcaaaaaaaaaaaaaaaaaaaaagttctgttttagacatgctacattggagatgtctattcacttcctaatggaagtagtggttagcagttggatgtaagagtcagaagttttagccaggcgtggtggcgcatgcctgtaatcccagccactcaagaggctgaatcaggagaatcgtttgaacctgggagacggaggttgcggtgagccaagatcaggccattgcactccagcctgggcgacagagcgagactctgtctc

SEQ ID NO: 873 - DNA, 2403 bp, Homo sapiens
gtccaacctggtgctattcctgaacggggcgccgttctgctgggagggcgcgcaggccagcgaggcgctgctgctcttcatgggcctcacctacctgggctcgccgttcggaggctggctggccgacgcgcggctgggccgggcgcgcgccaccctgctgagcctggcgctctacctgctgggcatgctggccttcccgctgctggccgcgcccgccacgcgagccgcgctctgcggttccgcgcgcccgctcaactgcacggcgcctggtcccgacgcctccgcccgctgctgctcaccggccaccttcgcggggctggtgctggtgggcctgggcgtggccaccgtcaaggccaacatcacgcccttcggcgccgaccaggttaaagatcgaggtccggaagccactaggagattttttaattggttttattggagcattaacctgggagcgatcctgtcgttaggtggcattgcctatattcagcagaacgtcagctttgtcactggttatgcgatccccactgtctgcgtcggccttgcttttgtggtcttcctctgtggccagagcgttttcatcaccaagcctcctgatggcagtgccttcaccgacatgttcaagatactgacgtattcctgctgttcccagaagcgaagtggagagcgccagagtaatggatgcagacaacatatgttttacagagtcttcatttgaggattccagaaatttcaaatattacaaccactcctcacacgctccctgcagcctggctgaccatgtttgatgctgtgctcatcctcctgctcatccctctgaaggacaaactggtcgatcccattttgagaagacatggcctgctcccatcctccctgaagaggatcgccgtgggcatgttctttgtcatgtgctcggcctttgctgcaggaattttggagagtaaaaggctgaaccttgttaaagagaaaaccattaatcagaccatcggcaacgtcgtctaccatgctgccgatctgtcgctgtggtggcaggtgccgcagtacttgctgattgggatcagcgagatctttgcaagtatcgcaggcctggaatttgcatactcagctgcccccaagtccatgcagagtgccataatgggcttgttctttttcttctctggcgtcgggtcgttcgtgggttctggactgctggcactggtgtctatcaaagccatcggatggatgagcagtcacacagactttggtaatattaacggctgctatttgaactattactttttccttctggctgctattcaaggagctaccctcctgcttttcctcattatttctgtgaaatatgaccatcatcgagaccatcagcgatcaagagccaatggcgtgcccaccagcaggagggcctgaccttcctgaggccatgtgcggtttctgaggctgacatgtcagtaactgactggggtgcactgagaacaggcaagactttaaattcccataaaatgtctgacttcactgaaacttgcatgttgcctggattgatttcttctttccctctatccaaaggagcttggtaagtgccttactgcagcgtgtctcctggcacgctgggccctccgggaggagagctgcagatttcgagtatgtcgcttgtcattcaaggtctctgtgaatcctctagctgggttcccttttttacagaaactcacaaatggagattgcaaagtcttggggaactccacgtgttagttggcatcccagtttcttaaacaaatagtatcacctgcttcccatagccatatctcactgtaaaaaaaaaaattaataaactgttacttatatttaagaaagtgaggatttttttttttttaaagataaaagcatggtcagatgctgcaaggattttacataaatgccatatttatggtttccttcctgagaacaatcatgctcttgccatgttctttgatttaggctggtagtaaacacatttcatctgctgcttcaaaaagtacttactttttaaaccatcaacattacttttctttcttaaggcaaggcatgcataagagtcatttgaggccatgtgtcccatctcaagccacagagcaactcacggggtacttcacaccttacctagtcagagtgcttatatatagctttattttggtacgattgagactaaagactgatcatggttgtatgtaaggaaaacattcttttgaacagaaatagtgtaattaaaaataattgaaagtgttaaatgtgaacttgagctgtttgaccagtcacatttttgtattgttactgtacgtgtatctggggcttctccgtttgttaatactttttctgtatttgttgctgtatttttggcataactttattataaaaagcatctcaaatgcgaaatcc

SEQ ID NO: 874 - DNA, 1780 bp, Homo sapiens
cttcctgtccccgcggctctgtgtcccctgctagccgtaggccgtgtgacccgcaggcaccgggagatccagaagtgaaacgccaggctctctggaggccaggagatgactctgttgacgttcagggatgtggccatagaattctccctggaggagtggaaatgcctggacctcgctcagcagaatttgtacagggatgtgatgttggagaactacagaaacttgttctccgttggtctcactgtctgtaagccaggcctgatcacctgcctggagcaacgaaaagagccctggaatgtgaagagacaggaggcagcagacggacatccagctatgtcttctcattttacccaagaccttctgccagagcagggcatacaagatgcattcccaaaaagaatactgagaggatatggaaattgtggccttgataatttatatttaaggaaagactgggaaagtttagatgagtgtaagttgcaaaaagattataatggacttaaccaatgttcatcaactacccatagcaaaatctttcaatataataaatatgttaaaatctttgataacttttcaaatttacatagacgtaatataagtaatactggagagaaacctttcaaatgtcaagaatgtggcaaatcctttcaaatgctctcattcctaactgaacatcagaaaattcacactggaaaaaaattccaaaaatgtggagaatgtggcaaaacctttatccagtgctcacactttactgaacgtgagaacattgacactggagagaaaccttacaagtgtcaagaatgtaacaacgtcattaaaacttgctcagtccttactaaaaatagaatttatgccggaggggaacattacagatgtgaagaatttggcaaagtatttaaccagtgctcccaccttactgaacatgagcatggtactgaggaaaaaccctgcaaatatgaagagtgcagcagtgtctttatctcttgctcaagcctttctaatcaacagatgattcttgctggagagaagctctccaaatgtgaaacatggtacaaaggttttaaccacagcccaaatccttccaaacaccagagaaatgagattggagggaaacctttcaaatgtgaggaatgtgacagcatcttcaagtggttctcagaccttactaaacataagagaattcacactggtgagaaaccatacaaatgtgacgaatgtgggaaagcctatacacagtcctcacacctcagtgaacacaggaggattcacaccggagagaaaccctaccaatgtgaagaatgtgggaaggtcttcagaacttgctcaagcctttctaaccataagagaactcattctgaagaaaaaccctacacgtgtgaagaatgtggcaacatctttaagcagttatcagacctcactaagcataagaaaacccatactggagagaagccctacaaatgtgacgaatgtggaaaaaactttacccagtcctccaaccttattgtacataagagaattcatactggagagaaaccctacaagtgtgaagaatgtggcagagtcttcatgtggttctcagacattaccaaacataagaaaacccatactggagagaaaccctacaaatgtgacgaatgtggaaaaaactttacccagtcctcaaaccttattgtacataagagaattcatactggagagaaaccctacaagtgtgaaaagtgtggcaaagccttcacccagttctcacacctgactgtacatgaaagcattcatacttgag

SEQ ID NO: 875 - DNA, 2299 bp, Homo sapiens
gtacagatgtgagtctttgatgaagcccccaggcaggcaccaaggtgatgggactcagggccttggcttttagatacatcccagtccctgactgacatctgaccatgagggctggatgggtgggaacaaggaggagtagatggcaaaagtacctgagcccacttcccagccacagggtgaccctggcactgtaaaaaccctttgtcagtcatgccagaaggttctagaactgcccacctcttccatttcagtcctgctgaaaccccttagcctatttccgactcctctgtccatgctctgagttcagctgggcagtgtgtgggctatcacccctttcatttagacctacctagctggcccccatctgcagagccttccttagcaccattaggccttctacttgtgtccatttgaagcaggaggggctggatttggaaaagtctttgaagtgagagcaccacgcttgtcttcgttagaaactgttaactgcagaaaaaagttccagatggcaagggagcccttaagtggagattaggttgcattagactccaaaaccagaaaggaaaaagggtgatgggagtggagacgtgattggattcaggcccagaacctgtgaccatgctctgagctcagacttggggagggaggggtgtggctcccaccccttccagttaagacctgcctagcagagccccagtctccagccccttccctagcaccagagtctggtcaaaatgccacagaaaatgagctgctctgccagcaaactgtggagctgcctcctctccaggcctggcatcccttggtcagcccctcctgggagggcacagccgtattacagtgccagtgtgcctggccatcagcatcttcacccttcccagtctgtgtggggaggctgtaaaccccgtggattcagctctgtgtggagtttctgtgctatggtgggactgctcattttgccccatcatccctttggcctcccacacacctgccccttcccagggatcacgtgtgtctccagcctttcacctttctattgcaatggtggcctttgtccaggcaagagcaggcctgatggatgtactggtgagccccacagttggatgtcagctcagccgtccaactgagaggaacagtaggctcagttcctccctgacccctgacaccaggccgcagtgggcatgcacaggcccacagaaagtcagtctgggttttgcttttctcgtgagcatcacagttaaagaagcgctcattgagcaactacagtgcacttggtcttctgcaagtgctgggcacctagagataggaacagtcatggtccctgctcttaaggaactgatgacctggtggggccctgttgtcttcaaggaacccagaagccactgggccccaaaggtggaactgaaggactgggggcagctggctctcagcctgccacctctgcactgcctgcctttaaagaaccccaccccaccccatgatggccccctctgttccccttgtatttcagtgactgtgaattgaggttaggaaggcacacctgcccttctgtgtgctctctccacacgaaggatgacagatactgtgaattcagccctcacggccaactgtgaaggggatggagaaggctgggagggctcggggagagctcttaggggctgcggaagtccccacgggggtctgagagtggagcccaagctttggccctccaggcatccccagtttccagcctcacctctgaagccctgctgcctttaaccaccagagccgcagccccctgggtttctgtctaactcgaagtcttgaatcctagctagtttggggttgtgagcagtgtgtagcaaagttgatctctccatgtcaccaaatcaaaacaccctctgtcatcctacggcatttcctcttgaggtcacagagaggaatggcaagccctggaaacctgtgttattctgtgttgatttggtgtggggggagggtggagacgtaaatgtgaagccagttggagtttgtgctatgcagcagtgttagccaggatctcattagcgtgcaaacctagcatcttctgtggccacaagccacacacttgctttttttgaatgtgatgtaaaatttgtacagtaaagtttttatattttctatcaactacatttgtcttccagacatgctattaatttaaattaaaatggttagtattaacaaacatgctgtatcgggtttttttgccactggcaagaacatgccctctgtgctaagccaggcctgggtgtctggagtttgtgaataaagttataccaaggtg

SEQ ID NO: 876 - DNA, 2257 bp, Homo sapiens
tcctagctctgagaatgcctgcggaatgatcgccccccagggcggctgccgccgctgccgctgctgctgttattgctactgctgctgccgccgcctctgcttccactcggctctgactggcaggcagaaagtgcaactgacgagggaaaggtctctgcagtgagtggagagcctacataaaagagagtaaagaggggcaaaaacccagatcagaatgcaggcgacgtccaaccttctcaacctcctgctgctgtctttgtttgccggattagatccttccaagactcagattagtcctaaagaagggtggcaggtgtacagctcagctcaggatcctgatgggcggtgcatttgcacagttgttgctccagaacaaaacctgtgttcccgggatgccaaaagcaggcaacttcgccaactactggaaaaggttcagaacatgtcccagtctattgaagtcttaaacttgagaactcagagagatttccaatatgttttaaaaatggaaacccaaatgaaagggctgaaggcaaaatttcggcagattgaagatgatcgaaagacacttatgaccaagcattttcaggagttgaaagagaaaatggacgagctcctgcctttgatccccgtgctggaacagtacaaaacagatgctaagttaatcacccagttcaaggaggaaataaggaatctgtctgctgtcctcactggtattcaggaggaaattggtgcctatgactacgaggaactacaccaaagagtgctgagcttggaaacaagacttcgtgactgcatgaaaaagctaacatgtggcaaactgatgaaaatcacaggcccagttacagtcaagacatctggaacccgatttggtgcttggatgacagaccctttagcatctgagaaaaacaacagagtctggtacatggacagttatactaacaataaaattgttcgtgaatacaaatcaattgcagactttgtcagtggggctgaatcaaggacatacaaccttcctttcaagtgggcaggaactaaccatgttgtctacaatggctcactctattttaacaagtatcagagtaatatcatcatcaaatacagctttgatatggggagagtgcttgcccaacgaagcctggagtatgctggttttcataatgtttacccctacacatggggtggattctctgacatcgacctaatggctgatgaaatcgggctgtgggctgtgtatgcaactaaccagaatgcaggcaatattgtcatcagccaacttaaccaagataccttggaggtgatgaagagctggagcactggctaccccaagagaagtgcaggggaatctttcatgatctgtgggacactgtatgtcaccaactcccacttaactggagccaaggtgtattattcctattccaccaaaacctccacatatgagtacacagacattcccttccataaccaatactttcacatatccatgcttgactacaatgcaagagatcgagctctctatgcctggaacaatggccaccaggtgctgttcaatgtcacccttttccatatcatcaagacagaggatgacacataggcaaatgtgacatgttttcattgatttaaacagtgtgatttgtgataaactctataagaccccttccgtttttttcttcactattatttttcatcatttctccaaagcaaagcattcttattgtaaagttggtgtttcaaaaacatagctgagcttgtctaacttaccatgttggaaacacatcttaacttctaaatttacaaggcctatcatgtccttgtcatgaaaagcactaaaaaaaaaaaagagtttaagtggctaaagtcatagttttgcaagagattaatgatctgccttatattagagtcagagactaatggtggcttaaatgcacgaatgtctttttttttaaaactgtcattttttactgtcttttgctccatatcaggaaatattttggtaggaattaggagaacaaaaagcacttttatcccatttatttctttaaaaaatgtaaggatttcatttatattgaaaaataatattaatcattttgctgttaacacaattctctgatgcggtgctgtacagtcatttttaaatctcttgctaacattttattggcagtatgtatttctaccattgtaaccaccattgtgctattgtatctcttcacttctgtgaaagtaatattttttataaaatacactgaaatttaacctcagt

SEQ ID NO: 877 - DNA, 3822 bp, Homo sapiens
gttaaaatagcgagataattccagatgctatatgaaaatcaggcagtcgtaatctgcctatggtgctgggcaggagaaggaaaacaggcagtcttccatattggagagccagcttttgatcatgcacctaaaaataccgtgtacatgcctcctccccttccatctggccagtgtgagtccctttccttttcacctgctcttactctcctgtgacgtgatctttaaacccctcctctccgaagcctcacagagctgctgcttgcagagtgtgggaggcgccagtggggactggagcgcggtgcgcaccccagccgagcttgtgtgtgcttctggcagagcttttagactgaagattttcccttcgtaatgccagaagcgttcctagaacttccccagctaaaacagggagacgctaacgtctctacctctaaggataggcccgccaaatagagttagcgtgaagaccccagcttgaccagagatggtgacacctggggatttatggtcagcgacctgagtgaagcaacatcctccttgccactggctggtctgttcattttaacatgaacatgttttaatgcagactgttcaagctgtttcaaaacagtcattaaaaatacacatgcaggagcacctgtattaaagactttgtttggaatctggagtggaagctctgactcctactgcgcccttctttaggggtctctccctcggggtccacttggctcgaggcggcagcgagcccagcagctgagtggccggcggcacacgacccagagggaaggagaggcctgcaccccgctgcctcctggacccagctttgctgctgtcactgtttcttcaggagaggctgtaggcaaacccttgctttccagcatgaaaacaaccctggtcccagcaaggcaggctcttttctgtgtctcgctgtttcaggagcctgctattcctgggattcttaaagttttcctgccctactaagcaccagtttctgctaacggtgacaaaaattgtgtgtgtaagacccagagccgaggctcagagtgaaaacagacaagtagtatataatctaagtgactttttaaaatggaggagccattctggaagcgtgagaagcagacagtgttttgaggattgtctgggtggaagggcagggccgggtggtgtggctgccctcgacccgtagctggtggtcctagagtgtggtgagtgtgctcgcctccacgggtcctgctggggctctagcccggcccgtttccgcttctgccactgggacttgctcagctggattccttaacgcacgcacacctgaacctgcagaccaagcccgtggacccgaccgtggaggggggcgcgcaggtgcagcaggtggtcaacatagagtgcgtgtccgacttcacggaggcgccagtcctcaacattcagttcaggtaagagccgcctgtgcgccccgggccaaggggtgtgtgggcgcctgagctgtgtgcctgggctccatgactgtgcctccgtgtccttcctgaggggacccggggcgtgcgggtgctcacggtgcatggatgcggcctgagctattgctgcccccggctctgcagagcgcaggaaacaaggggaggcggagccctgggctccgggacggcaggtggcagctcccacatggggccttgctaggatctttctgggcaccatggggcccacctcatggggtggcagacagccagggcccccgcgccacctgcccggcttggtaccagacgacagctgtggggtgcaggcagctggtttccttcggccccctggcctggggggcgcgttttttgctcagttgagctcagatcgtaccactttgcttattttttaaaagcataggattttcctgttgcgactgttcattactctcacttttcagtgactacaaatagcgtggatacagtcagcccgtcccctgctgggtgtctgcaaggttaggaatgttgagaaaagcacactttctaacattaaaaagacagagaacttaagattgtatactgtagaattcggggacatagacatgcaagtttttgtttcattctttgtgcaaatgcctttgcctttttaaagaaaaaacatcacactatttgcacagacttggagttctgggaaacagatgaatggggagaagtgaggcacagggacgtcctgcctgagtatgcggccctggcctgtcctcctgtctgtgggtgacactggacactgagccacacacgatccgtggggactgaaggctcggccccccgacccgctctggtgggtggcagtagatcgggacgcttctcactccaggctctttcccggtccctggggctctcagaggagtagctgactgtctctttctgctgctgctgctgctggcaggtatgggggcaccttccagaacgtgtctgtgcagctgcccatcactctcaacaaattcttccagccgacagaaatggcttctcaggatttctttcaacgttggaagcagttgagcaatccacagcaggaagtgcagaacatcttcaaagcaaagcacccaatggacacagaagtcaccaaagccaagatcattggatttggttctgcacttcttgaagaagttgatcctaatcctgcgaatttcgtgggagctggaatcatccacacgaaaaccacccagattggatgcctgctgcgcttggagccgaacctgcaagcccaggtcaggccctcaggaaatggtggaacacacttgagttgctttttattctggcacaatgtacgtggtgagatgtgtagctctttagtgcagttcagtcagttttgacagatgttgtttaaccaccaccctgtcaatacatggttgcctcccagcctccccgcagctggccaccgtggagcatcatccctagtgcagttcagtcagttgtgacagatgttgtgtgcctgtttaaccaccaccctgtcaatacatggttgcatcccagcctccccacagctggccaccgtggagcatcgtcccaccatggagcagcctggccctgggcggtggctctcccagctgttcctctctgtcaccgcgttgttccttctcaccacgtcccgttctggcgacggacacctgtctccgtttcacttgggtggcacccaggagtgctgctgtcgcccagggcctgtgtgtggttagtgctgcaagaacatcccacagcttctccaggtggccgtgccactttgcactcccgccagctacgtacgagacgccaggcgctcccatgccagccctcagttttcatgctgacagtgtgtgtggtgctcaggcctctgccgagttgtgggtgcctccagagagtggtccctgggcatggcccacagggttctgcatggcggatcctggacccgagggctgtgtgagcctcggcgtgcccgttgacctgctgtgctctctgtttcagatgtaccggctcacgctgcgcacaagtaaggaagccgtttctcagagattatgtgaattgctctcagcgcagttttagtcctgaggatggaagaccaggctcgtgtgtcttgtgttgtcttcgtctgtgccgtttgtcttcgtggccatcctgcagatgagcaccgtgtccagtgccacagcacaaggcgcctccccgccccgccgccccacacctctcccctttgggctggacgggaacacacgtgtgtggctcaggaggaaaagctcagcctggactgtggcagccacggcagaaggtggatcttgggatcaatttttataaaaatcgagacagttctgtggttaaatctacaaattaaagggaaattagaagttgg

SEQ ID NO: 878 - DNA, 2063 bp, Homo sapiens
cagcctcccgagtagctgggattacgggcgcccgccaccgcgcctggctaatttttgtatttttagtagagacggtgtttcagcatgttggccaggctggtctcgaactcctggccataggtgatctgcctgcctcgtcctcccaaagtactgggattacaggcgtgagccactgcacccacccacgcctggctgatgtttttattttactcatcctgactgaggtctgacaatcctagaagctgaagttcccgggcatccttttgtttcttctgactccccttagtgatagattttcttgtgatttgggattggatgctcatggccagctgggggctctgtgggaatccggggtggcctactttgcaggcagtccttccagatggttcagccttggctttcgctagctacccaggagcgccagccccagcccattttgtgtgtggttctcagcttgcaggtggccaccaaagccaaccccccccactgccccgattgtgggtccctatgtttgaggttcccggtgatgtttcggggggcttctcccttcttacaagctcggtcatgcatatatttgatctggcgttgccaggcattctgtaagggagggcttttccagttcctggaaatggaactggaaaatgtggctggaaacattaatatggctggaaatggaatttgcctgcagccactacttttgaacccatcttccgggcaatcccttctgtcttgccggtggttggaaacttgcaggtggaagtcttccccacccagttctgcagcccttggctgccgagcaggaatgcctgagatgtctggctaattcctcggaatgtcccagttcaggccaacctccctcccccttctcccaccaggccttcttgggcagcagggaggcagctctggagggagccgctgcctcagcagtttcgccccagccaccctcactgcctgggccttcatgtaaggaggctgggtggtgaggccctgtggtgaggagcaggggttttgcattcacggaggacctgggttcaaataccaggaccgttgcttaattctgggtgacttcaggctttttttttttttttttttgagatggggtctcgctctgtcgcccaggctggagtgcagtgacatgatctccgctcactgcagcctccgcctcctgggttcaagcaattctacctcagtctcctgagtagctgggatgacaggcacgccccaccacggtccagctaatttgttttttgggtttctgagacggagtttcatgctgctgcccaggctggagtgcagtggtgcaatctcggctcactgcagcctctgcctcctgggttccaagcgattctcctgcctcagcctcccgagtagctgggactacacccagctaattttttaatagagacggagtttcaccatgttgaccaggctggtcttgaactgacctcaggtgatctgcccacctcggcctcccaaagtgctgggattacaggcgtgagccactgtgcctcgcctaatttttgtattttcgttagagacagggattcaccatgttggcctggctggtctcaaactcccgacctcaagtgatcctcccacctcaccctcccaaagtgctgggattataggcatgagccactgggccccgccaggcttttttgagacagtatcgctctgtcgcccaggtttgagtgcagtggcacagtctcagctcactgcaacctccacctctcaggttcaagcaattctcctgcctcagcctcccgagtagctgggattgcaggcgcccaccaccatgcccagctaatttttgtatttttaatagagatggatttcaccatgttggtcaagctggtctcaaactcctgacctcaggtaatccacccgcctcagcctcccgaggcatgagccaccacgccaagcccaggcttttctttccatcggaaaattatcatctcaataagcacttcagtaagaaaaaccacaacataatcatcgaagcaatccctcacggatggagttgaggccacttccagactttcctaatatgaagaaggcatcag

SEQ ID NO: 879 - DNA, 2638 bp, Homo sapiens
ctgcgtggatgatcagtgtagtggaagcagggacttgctgagagctgaaatctctgtttgatttgctgtaacatgtaaagcgaaactgggacattttactttacagtctattaaaggttatacaaaacttaaaagaagcagcaattctattcgcttgttattggacttgaaactccctttgacctcggaaactgaagatgaggttgccatgggaactgctggtactgcaatcattcattttgtgccttgcagatgattccacactgcatggcccgatttttattcaagaaccaagtcctgtaatgttccctttggattctgaggagaaaaaagtgaagctcaattgtgaagttaaaggaaatccaaaacctcatatcaggtggaagttaaatggaacagatgttgacactggtatggatttccgctacagtgttgttgaagggagcttgttgatcaataaccccaataaaacccaagatgctggaacgtaccagtgcacagcgacaaactcgtttggaacaattgttagcagagaagcaaagcttcagtttgcttatcttgacaactttaaaacaagaacaagaagcactgtgtctgtccgtcgaggtcaaggaatggtgctactgtgtggcccgccaccccattctggagagctgagttatgcctggatcttcaatgaatacccttcctatcaggataatcgccgctttgtttctcaagagactgggaatctgtatattgccaaagtagaaaaatcagatgttgggaattatacctgtgtggttaccaataccgtgacaaaccacaaggtcctggggccacctacaccactaatattgagaaatgatggagtgatgggtgaatatgagcccaaaatagaagtgcagttcccagaaacagttccgactgcaaaaggagcaacggtgaagctggaatgctttgctttaggaaatccagtaccaactattatctggcgaagagctgatggaaagccaatagcaaggaaagccagaagacacaagtcaaatggaattcttgagatccctaattttcagcaggaggatgctggtttatatgaatgtgtagctgaaaattccagagggaaaaatgtagcaaggggacagctaactttctatgctcaacctaattggattcaaaaaataaatgatattcacgtggccatggaagaaaatgtcttttgggaatgtaaagcaaatggaaggcctaagcctacatacaagtggctaaaaaatggcgaacctctgctaactcgggatagaattcaaattgagcaaggaacactcaacataacaatagtgaacctctcagatgctggcatgtatcagtgtttggcagagaataaacatggagttatcttttccaacgcagagcttagtgttatagctgtaggtccagatttttcaagaacactcttgaaaagagtaactcttgtcaaagtgggaggtgaagttgtcattgagtgtaagccaaaagcgtctccaaaacctgtttacacctggaagaaaggaagggatatattaaaagaaaatgaaagaattaccatttctgaagatggaaacctcagaatcatcaacgttactaaatcagacgctgggagttatacctgtatagccactaaccattttggaactgctagcagtactggaaacttggtagtgaaagatccaacaagggtaatggtacccccttccggtatggatgtcactgttggagagagtattgttttaccgtgccaggtaacgcatgatcactcgctagacatcgtgtttacttggtcatttaatggacacctgatagactttgacagagatggggaccactttgaaagagttggagggcaggattcagctggtgatttgatgatccgaaacatccaactgaagcatgctgggaaatatgtctgcatggtccaaacaagtgtggacaggctatctgctgctgcagacctgattgtaagaggtcctccaggtcccccagaggctgtgacaatagacgaaatcacagataccactgctcagctctcctggagacccgggcctgacaaccacagccccatcaccatgtatgtcattcaagccaggactccgttctccgtgggctggcaagcagtcagtacagtcccagaactcattgatgggaagacattcacagcgaccgtggtgggtttgaacccttgggttgaatatgaattccgcacagttgcagccaacgtgattgggattggggagcccagccgcccctcagagaaacggagaacagaagaagctcgtgagtagcacccgagattcagatcatctgttctgccagctgctgttccttaggaaaagcgtttgaattcttgctgctcttcagcgctcatgcggctctgtgttagctcaccctgccctttaaatgtttataatgatagaaatcaggccaggagaagcccagctgaacacgcaacgggtttcaatcaagagttgttttcttcattaggtccacttgtacagcaagagacacacggtgcttagtcctctcaaaagccagccctttcttcattggttcatttgtcaccaagattctaacagaatttcaaaaaaaaaatcccacatttcaaataaaattatctcacataagt

SEQ ID NO: 880 - DNA, 2312 bp, Homo sapiens
tgtctttttatttggtgggattgtttgctagtagtcaagtctattgttctcctttgtgattgcttgagaagagcttatgatttcatgagataagacaggtgtttctaggaaggctgtgtataagagggaaaggagaaagtaaggttgaccagggcactgtatccagcaagtggcctaggcccaggatgttcacaatggttcactgtagctttgtaacatttcttggcacagctctgagctgcctgcactttaactaggaagcaggaagagtaattgtttccttcattatgtttctaagtcaactgcatcatggggattgacctaatgttgagctccagcagaggtgggtgggacctggcagggctgtttcatagcctctcttcaaatcatggatcctctcgaaggttctgcctgatggggccatgtgccaaggctcgtctgcttgcctcttgcagtgacagttctttttggtctgtaatgtaaatatcatggccctgaaatcccctagctgtccgtgctttgtcacttcttcaaagggaactgacttgttttccaatggaggaggaacatttgctgcctacactggtttgaagcattaaaaggggagaaaaagagctaagagtaagtgttgcctcattctttgtattcacatggaaatttttaaatcttcatcaaaggatcaggagaaaaatcacattgaaatccaatacaagagctcacagcttaacacagaatttttcaaaattgattctttaaaaattgcagaaactatgaactgtgtagctccagggttcatagttttccttaccctcctcagcctctgcctctgtcttgccttcctttctacctacactccatctgtttggttttgtgtcagcatgcagagctttgaatgggggctggtagaggtggtgggaagtatgcagcaagtcaggtttatagagctgcccatactttcacccctctctcaggcctcattatctcatctctcagaatattgtaactggtctccctttcttcagtttccttattccaggctttcttccacattgctaccagaattaccttaataagagataaaactgttcatgtcactttcttgcttaaaaactaccactggcagccaggtgcggtggctcacacctgtaatcccggcactttgggaggctgaggtgggaggactgcttgagtccaggagttcaagaccagcctgggcaacatagtgagactttgcctctacaaataataaaaaaattagctgggcatggtggcacatgcctgtggtcccagctacttgggaggccaaggcaggaggatcacttgagcccaggtagtcaagactgcagtgagttgtgattgcaccactgcactccagcctgggcagcagagcaagaccccgtctaacaaggaaaaattaccactggcttctcagtccagactttctagactgctactgtaactcctcagtgggttcatcttacctgctgccgagatagagacgatttatcaagatgggagaattgcaataaagagtttaatacacatagaggcagctaaacgggaaaccagaattttattattactcaaatcagcctcccccagaattctgaggctagggtttttcaaggatggtttggtgggcaggggtctagggaatgagtgctgctgattggttggggatgcaatcataggggtgtggaaaccagtcctctgctgagcccagttttggatgggggccacagaggggtcactggtcccagtggagtcatccagtcatcagaaatgcaaaagtcagaaaagacatcttaaaaagccaatcttaggttcaacaatagtgatgttacttacaggagtaactggggaagttgcaaatcttgtgacctttggaaaaatgattggtaatcatgagaattcaggcccctcttgtaatcctaaatttgtacgcttttattagttttataaaggcagtttcattttgagaagggctattatcatttaaactataaactgtaataaatttctggctaggcatggtggctcacacctgtaatcctagcatgttgagaggccggagcaagcggatcacctgaggtcaggagttcaagactcctgacctcaggatggtcaacatgacgagacaccatctctactcaaaatacaaaaattagccaggcatggtggccggcgcctgtaatcccagctacttgggtggctgaggcaggagaatcacttgaactgggaggtggaggttgcgataagccaagatcgcaccgctacactccagcctgggccacagagcgagactccatctc

SEQ ID NO: 881 - DNA, 2245 bp, Homo sapiens
cacaatgcagttcgcggcgcggcggacatggcggtggagtcctgagctagtcgtgtcccggcctccagcggcggcagcggcgacggcggcggcagcaggaggcggagggagagcaggagccactgagatgaggaggcgtcgcgcgcgcctgtagctcgcgggcctcgcagtttgcttgcctaaactggacttgaagcaatttaaactactggagatctgccattttataatatcacaattggaaagaaacagattttcaaataatggaagagtctaaaaccttaaaaagtgaaaatcatgaaccaaagaagaatgttatttgtgaagaaagcaaagcagttcaagttataggtaatcaaacattgaaagctagaaatgataaatccgtaaaagaaattgagaacagctctccaaataggaatagtagtaaaaaaaataagcaaaatgatatttgtatagaaaaaacagaagttaaatcatgtaaagtaaatgctgccaaccttccaggtcctaaagatttggggttagtccttcgagatcaaagtcattgcaaagcaaaaaaatttcctaattcaccggtgaaagccgaaaaggcaaccatttcacaggcaaaatcagaaaaggcaaccagtttacaggcaaaagcagaaaaatcaccaaagtcacctaattcagtgaaagcagaaaaagcatccagttatcagatgaagtcagaaaaagtaccaagttcaccagcagaagcagaaaagggacccagtttactgttgaaagacatgagacagaagacagaattacaacagattggaaaaaaaattccaagctcctttacttctgtggacaaagtgaatattgaagctgtagggggagaaaaatgtgctctgcaaaactcaccacgatctcagaagcaacagacatgtacagataatactggtgattctgatgatagtgcttcaggaattgaagacgtatcggacgatttaagtaaaatgaagaatgatgaatctaataaagaaaattcttcagagatggactacttagaaaatgccactgtgatagatgaatctgcattgacacctgagcagaggctggggttgaaacaagcagaagaacgcttagaaagagatcacatctttcgacttgaaaaacgatcaccagaatataccaattgtcggtatctatgcaaactttgcttaattcacattgaaaatatccagggggctcataaacatataaaggagaaacgacataagaaaaatattttggaaaaacaagaagaaagtgagcttcgctctctgccacctccttcccctgcccacttggctgctttaagtgttgcagtcattgaattagcaaaagaacatggaataacagatgatgacctcagagtccgtcaggaaattgtggaggaaatgtcaaaggttataacgacatttttatcagaatgttcacttaggttgtatggctcatctctgactagatttgctctgaaaagtagtgatgttaatatagatataaaatttcctcccaagatgaatcatccagatcttctgataaaagtacttgggattttaaagaaaaatgtattatatgtagatgtggaatctgattttcacgctaaagttcctgttgtggtgtgcagagatcgaaaaagtggtttactttgtagagtgagtgcaggaaacgatatggcatgtctcactactgatttacttactgcccttggcaaaatagaacctgtctttattcccttggtgttagcctttcgctactgggctaagttgtgctatattgactcccaaactgatggtggaatcccttcttactgttttgctttaatggtgatgttttttctacaacagagaaaaccccctcttcttccttgcttacttggaagttggattgaaggctttgacccaaaaagaatggatgactttcagctgaagggcatagtagaagagaagtttgtgaagtgggaatgtaattcaagtagtgcaactgagaaaaactcaattgctgaggaaaacaaagctaaggcagaccaaccaaaagatgataccaagaagacagaaacagacaaccaaagtaatgccatgaaggaaaaacatggcaaatctcctttagcattggaaacaccaaatcgggtatccttgggacagttatggttagagctgcttaaattctacacactggattttgctttggaggaatatgtcatatgtgtacggatacaagatattttaacaag

SEQ ID NO: 882 - DNA, 3179 bp, Homo sapiens
ctgggagaactcaggcatgtgggacagagggaaaacagattttaggttcatgactcattctgcaactgccaacaataaaatagtgacccaaccacatcacttattctcacaagttctggagacctttcagatcaaaacaaggctctcatacttgctcagaactaacttcaagatcagctaagaagctacttgattgagccaaagaggactttagtttcacagaattttaggtcatatttattctgaaatataactgagctattcatgagctccctggaccatttcccacacagccatatttccatggctttgtggcaaaggggaccatcaaaggttttagttcggttagagtagtgtttacaggcttgaactttgagccttttagagagaccaccaggatttcatggatacagaaggattggagagagaggtcgaggtggacttaatggaagggaataagttattgaacattaaattttaaattagtggcagacctccaagagagtcatgccaaaaaagtttttatatttgctgtattaaactcaatggtaattacttttagtcattttccttagcactgaatctaaaccctgaattaccgagagcagttaagccacagtcccaggattttgttataaactcaaagaaaagcacaaaatctgagcccaggtaatgatccatcttaggaatcctagttctttttacatgatctcatattcatccaaaaaaattgtttcttctcaataagacaacgtagtagagtattctggaattaaatgcagttttatggcgtggcgggactttccatctctcgttttgagaatcttgccatgagaaagtgcttcccaatgagacattactacctcccagctaggaggcttagcacaatgctaaaggtggagcaacagaagaaattcagatggaaatgaaactacttcttcctgggaagtaaaagagctacatgaaaccagtccatcctgcagatttagttcatgccacagttgaagtttgtgtgatgtttcttagtagctaatttcaaatttttactgttagattctaagaaacagagtgggctaatgattggagcacagccatgagactccgctccgttagctgagcatgtgatcctgtgctaaatctttcttggttccttcatctttgaagatgctgtctgctactttagtgctgactgatttgcaaatcttggttgattagctccccaatcataaggtccctaatgattagattaaatgccttatactcagggggtgtgcagatatgctattcttccttctgtggcttgggtggaaaagctgcttgggcttatttcccaacagtgtgatgtaggatggcagaacttatctaggaatggcacctttgatgatccatataatgaaatgtgtagagctcaaagaaatctgccaacatgtatgtggactcttgagaggtgggctttcccagtacatgctaaacagacttgttatgccaagaggaagtgaatagaaatgatagcatcaaatatccaaactgacaggaagtttcttttgcatagcatagaacatggttgtcttctgagttccactaatgttccaggatatcttggccctctgcctctggctgctccctggtgtttggcaccatagcgttgtcacttacaaccattgccttgggacacacagagtgaactgtttgagtgataagtaatttaggtagaaactttacccttaatttcaaatgataccaaacagctcattactaccccaagggacgctctccgtagcttctggattccccagtttccttctagaaacaaggactccaatagcactataaccctaaacaggccctaacccagaagaatacaccacaaaatgcgattgattttctcaaaatatcacagtcttagacactatacaaataattcaagaaaattctttctaccctgcagtggatatagtattccattatattctccagcaaaacttttaggacttttcaaactcatttctaagccaaatagtttagataaatatttacccttatatttggggggaattcaggctcaccatttgccgaggcaagcccatcaacagtctagaggcatattctgtgtcattccttcccgtctccttcatagaatactactttttccttttgtctcctggccattctccatcatctgctgattattgctaaccacaggatgctggcaaagcttacagtgataggcacatgtgttcagtgatgtccaatacactcttatcacagtggttatcgcttcttactcttttcaaatgcattattctacccctcaacctacatccaatcattagaactatacctgactggagcccagaacttgggaccaatacttaattcaaatagcaggggcttgctcacaaacattaagcccaacaagaagcacagcactttgaaaagtcaaataggcctttggtagctctgtacatttgcaattttacatttgttattagtttatagcactaataacacttcagtcgtgaatctacagtctcaatatgataagtcttagaacatgttctagaaatagtggtaccttgctgctattatacttagtaacttataccccaatataataataagtattaaatacagattgtgtatgcattctttgtgtgtatatgccaactgtactacttaacctcactgatgagcaattagaaaaatacacaaattgtcatagtgaaaataagtcttggtcaattcagatgatacgtgaacctgataaatgctctaatagatatgctattttgtcctgtattgcttgttttacagtatggtgcatgttgtttgctaagtaaaatgataataataataaagtataccaattttaaggttagaattaaaattttgcacatatgcttcttgatattctgaaatgtattctgtggcttaattatcttattcatacacatttcacttggctttttacccctaggaaataattgtccaagtatatatctcgtcttctttcttgtaactttgattaaactgcttacttcaacttacaacattgtaaagccagaatacctcattttaacagtgaaaaaaaatatgatgacctgatgtgttctcttgtatttgatttgaactacctaaataggcttaactgtaataataaatatacaattttggcaggc

SEQ ID NO: 883 - DNA, 2288 bp, Homo sapiens
atttttgtgctaggagcctgataaaaccggcccggttctgtggaaagtgggcggcggagccagggtccctggaatggcggagactctgtcaggcctaggtgattctggagcggcgggcgcggcggctctgagctccgcctcgtcagagaccgggacgcggcgcctcagcgacctgcgagtgatcgatctgcgggcggagctgaggaaacggaatgtggactcgagcggcaacaagagcgttttgatggagcggctgaagaaggcaattgaagatgaaggtggtaatcctgacgaaattgaaattacctccgagggaaacaagaaaacatcaaagaggtctagcgaggagctcgcagaagcacccacggaagccccaagcccagaagccagagatagcaaagaagacgggaggaagtttgattttgacgcttgtaatgaagtccctccggctcctaaagagtcctcaaccagtgagggcgctgatcagaaaatgagttctcccgaagatgactcggatacaaaaaggctttccaaagaggaaaagggtcgcagcagttgtggtagaaatttctgggttagtggactctcttctacaaccagagctacagatttgaagaatcttttcagcaaatatgggaaggtggtgggcgccaaggttgtgacaaatgcccggagtcctggagctcgctgttacggttttgtcacgatgtccacagcagaagaggccacaaaatgcattaaccacctgcacaagacggagctccacggaaagatgatctccgtggagaaagccaaaaatgaacctgtgggaaagaaaacctctgacaaaagagacagtgacgggaaaaaggagaagtcgagcaacagtgacagatctacaaaccttaagagggatgataaatgtgacagaaaagatgatgctaagaagggtgacgacggaagtggagaaaagagtaaggaccaagatgatcagaaacctggcccctcagagcgatctcgagccacaaagtcaggaagtcgagggaccgaacggactgtagtaatggataaatccaaaggggtgcctgtgattagtgtaaaaacgtccgggtccaaagagagagcttccaaaagccaggatcgcaaatcagccagcagagagaagcggtccgtcgtgtcctttgataaggtcaaggagcctcggaagtcaagagactcagagtcccatagcagggtgcgtgaacgcagtgaacgcgaacaacgcatgcaggcgcagtgggagcgcgaggagcgtgagcggctggagattgcccgagagaggctggccttccagcgccagcggctggagcgggagcgcatggagcgggaacggctggagcgcgaacgcatgcacgtggagcacgagcgcaggcgcgagcaggagcgcatccaccgtgagcgcgaggagctgaggcgccagcaggaactgcgctatgagcaggagcggcggcccgcggtgcggcggccctacgacctggaccggcgagatgatgcctattggccggaagccaagcgggccgccctggatgagcgctaccattctgactttaaccgccaggaccgcttccacgactttgaccacagggaccgcggccgctaccccgaccactcggtggacaggagagaaggttcaaggtcaatgatgggagaacgagaaggacagcattacccagaacgccatggaggaccagagcgccacggccgggactcccgcgatggctgggggggctatggctctgacaagaggatgagcgagggccgggggctgcctcctccccccaggggcagacgtgactggggggaccatggccgaagagaggatgaccggtcatggcagggcacggccgacgggggcatgatggacagggatcacaagaggtggcaaggtggcgagagaagcatgtccggtcactccgggcctggccacatgatgaaccgaggaggaatgtcagggcgcggcagctttgccccaggcggggcctcccggggccaccccatcccacacggtggcatgcagggcgggtttggaggccagagccgggggagcaggcccagcgatgcccgcttcactcgccgctactgagtacttggaatcctgtgtcctgtctcgtggcaacaaggctatgttctgttaggagttaccttaaactgtgtaaaaatatttttttttaatctgctgccatattgtagctcaatacaatgtgaatttgtttttcgttttggggtttttttttttttgtaataaatgtgtttccgttcacatacccttt

SEQ ID NO: 884 - DNA, 2410 bp, Homo sapiens
cagcatgagttaatttaagtggattcactgctattcagttcatagcacattagtgactaggaatgtgtgttcagcctcctgagagaggaggggaggaagcttgatactgggtggaaacaactcttgacatctgtttccttgtgtgtcaaagaacgaatttgtatcaaatagatctgttttgagctttggccattatttggctaagaacttcagccatctcatctcagacaaattggacagcctctttgatacattttctagtagtcaaaatggggcagatgtagtttaatatgggtggaaaactgccccagcaagataccaggttatttactgtggtatcgaaagctctaagagaatggaagtggttcttttgcccggctggaaatagcagtgggaagacaagtctatccagaccaagcctgtccatacaacactggcaatcagttgatgagggaattaagtcagatgggagacggctttttttttttttttttgagttggagtctcaatctgtcgcccaggttggagtgcagtggtggcgatctcagctcactgcaacctccacctcccaggttcaagcaattctctctgcctcagcctctagagcagctgggattacaggctctcgccaccatgcccggttaatttttgtattttttagtagagatggggtttcaccatgttagccaggctgatcttgaactcgtgacctcaggtgatccgcctgcctcagtctcccaaagtgctgggattacaggcgtgagccactgtgcccggcctcagttgggatttgacggctctgaacctcagcaggggaagattgatgtaagaatccacttggtcagagtgatatatgtagacttgatgtttgagatggttctcagtttagagaatgtgggatatggtagaggtctttgttttttcccatgtcccaaaaggtgctgggcaagtagcttgaactcgagcctgttttaattataaaatagatcaaactgctctttcttggtgcccttactgctccttgatttttagtgcatttattttgagtatgaatgcataaagtctgagggcctaaattttgttaattttttttaacaaatgggagaggggaatcctcgatagtcacccaattttcctttttttttgagacagtctgactgttgcccaggctggagtgtaatggcgccatctcggctcactgcaacatccagctcctgggtttcagcaattctcctgcctcagcctcctgagtagctgggattacaggcgcccgccatcacgcccggctaatttttgtatttttagtagagacaggattttgccatgtttgccaacctggtctcgaactcttgacctcctgatccaccctcctctgcctcccaaagtgctgggattacaggcgtgagccaccgcgcccagccccatagtcccccaattttctaacagcagttttaaattctgtaacttctcctgtctgtaaacaaggctgtcttttcaaatggctctcctacaggatgtgataattatctattctataaagccgaggtttggagaggtaaatagctatttcacattaacacaataatgtcaatgccctatggaaaagataaaatacttggactatattttaaaggggaatctggggtcatgtatattgaagtttaactagatccctccagatttttggttttgatcctacacatttagatactagttttggattttagacagttggtgctgacagtgtgaaactcctattgcctgcagttaaattgaagccttggtttctcatgtgaacaggcagtgaagctggtattatactttaagtcctcatttcagaaatagtttccctccacccccaagcactaccacacatggtctccccacctggtttcagctagtgcattagttttatcttgttttttaccgctgggcaaaccttgctggaacaacaactgacttcatgatttgcacatttggagggcttaacgtctttgcaaatgaaaaatccactgtacaataacaagctcaaaggaactcggagcctttttagaagaaatcgtgctgaattataatgtggcttactgcaataatgcttctttgatcaggatggaaaggaaaatactgagtttagcagaaaacgatgtctaaatgcatttgtaatgatacaattgtttataaatgttttactattaggttgaaccataagaaattgccagtgtacaatttcatctacaaaatgactggcttaacctaaattctgcattttatactccaagaataagctcttcgtggcagctttctaagtgtgaaatgatggaactttctatttgccagaatgacctacacttctctaatagtttatctcatattgttagccaaacgctgattaaaatgcaaatttcaaact

SEQ ID NO: 885 - DNA, 3039 bp, Homo sapiens
agctgcgtcctgcgggtgttggttctgtttccatccgctccccctccttccctccagccggggccatgtccccaggcttggggattctctgacagtgaccaccggaaagtcccagcacccaagcttggctgagtccttgggagccctacccggctgcagccgtgtctgctttaataaaatgcaaaacacttcatttctttttcaatttaaaaggaaaatggttcatctcaagagttcatctcaggagacaaggactgtgccgagtgtcgcctcctgcctggagtgaccctgggcggggacccctgggtctgccgtcagccagcagagagagggagctgcaccagcctctcacatgagcaggagcacctatggagcacctgctgcatgcagtgggggcagggaaagaggtgaggccgcacctgctggagggggactgaagggcgagcagggtctgggggtggctctgagggtggagagcacacggcgcccggtctctccgcaatgccatccttcgtggccctggatgtgctccctgcctcggatgtcacctcgtgcctctctgcgtgccgggttggtccctgcagcctcatgaggagtggtcgcttggcctcggtttggcctgcactgtcctccggcctcacgtggccttgtcttcacacccagcgtggtcatgtcttgggagcccgtcacccacgcacgcctcagggtggagcccccgcctggactcaggaccccgggcaccacacccaggcggtggccccagaccctcccctgtccaaacaggagatctctcataatgcagccaggtggtgtccgggggactgaggcccaccagcgcctccgccttttcccggcctgatggcgaattctggtgctgcttcctcagccttggctcagatgccatcctgccgctgcaggatttgccttctgctctgcatcctggctctgtcatcagcagccctggtctcaaggggaggccccctgggcgcaccagctcccgcgtgtctcagaggctatgcagacaagagtccctggactgggctgtgtttgctggggctccttccctccagcgacgagtccccagatcatctcccgggtgtgcctcagttctcaaaggtcctggcagcccctctgcgccaggcagtggccgcacgccagcagcctcctcccacagcccaggagctggaggaaacagctcagccaagccgcgccaccagctagagccgggactccctccttgacattcagagctgctaagttttcctgcgcacggttggtttgacatttgcattggaatggatttatgttaacttcctccctgctgctggccggagaccaaatcctgctggttgctcaggcagtgatccccggatgggccacctgcctcattgcctgccctgccagagggaggctctgggacctgagaccacccaggcgcagacttggtgctgtgtagctcatggagcggccccgcctctgctcccaccgagccctccagcccccttgtcttggaaggacgcagctccccttcctggccctcccccaaccccaagtcctcgcccaagcgctgcttcctctatgaagcttccctgagcggccctcttggagggtcactgttccctggcaaattctgaccacacctggctcctccatcatttcatggacgcagccctggtcagctccacttgggtcggggctgacgtggctcattcccttgcaccccagcacagcgcaggacaggctattcagctggtgtccagtccgcctgtgctgtatgctccctgcagccgggagcagccaccacgcatccatccacccttccgtcctccctgagggctggcactgcctcccggatcctgccgcgtacacagcaggtgcagaatgggtgctcgctaactccatgggacgacggggtgtcaaacctgcagccaccagcttctgacgggagatttgctgagagcctgcaagtcccacgggcctactggggggctgtgcacagagagcctagggggccatggcccagccctggcactccccgcccacagcaattattgccccaggagccaggcccagcctgcacctccacaccggccctgctccttcctcctctaggtccaggccccaggagccaggcccagcctgcgcccccacaccggccctgctccttcctcctctgggcccaggccccaggagccaggcccagcctgcgcccccacaccggccctgctccttcctcctctaggtccaggccccaggagccaggcccagcctgcgcccccacaccggccctgctccttcctcctctgggcccaggccccaggagctgggcccaggccccaggagccaggcccagcctgcgcccccacaatggccctgctccttcctcctctaggcccaggcgcccgcctgacacatgtccaccatgttcaccttgcctgtgtcacacatgagaagactgagactcagtgagggcccagcagagcgggtggagctggtcagcccggctgtgccctgacatgtgggggtggggggtgtggaatcctaatgagggaaaaggagtcgggctggcaggacagagggaaggcaaaaagaagaagcaaagaagctttaagtctgcccttcttcactgtccaggacacacagccctcctgaagaaataactcacaatcttcctgtgcccggctatcgccagacccttggctgataggagaatggatgttagctgactgcaaccttggcgttatcagtactgcctgtggccctctccagcacacagcacaggcgccgtcctataacatccccagcaagccctcatttctttgcagtggctcctcccttgctgacctgccccttgcttcggctcctcccttgctgacctgccccttgcttcggctcctcccttgctgacctgccccttgcttcggctcctcccttgctgacctgccccttgcttcggctcctcccttgctgacctgcccgttgcttctgtgctatgcacattttctactttctctaataaatctgcctttctttacctac

SEQ ID NO: 886 - DNA, 3169 bp, Homo sapiens
atttaaacgggagacggcgcgatgcctggcactcggtgcgccttccgcggaccgggcgacccagtgcacggccgccgcgtcactctcggtcccgctgaccccgcgccgagccccggcggctctggccgcggccgcactcagcgccacgcgtcgaaagcgcaggccccgaggacccgccgcactgacagtatgagccgcactgccatgcccggggaggaggtgctggagtccagccaagaggccctgcatgtgacggagcgcaaatacctgaagcgagactggtgcaaaacccagccgcttaagcagaccatccacgaggaaggctgcaacagtcgcaccatcatcaaccgcttctgttacggccagtgcaactctttctacatccccaggcacatccggaaggaggaaggttcctttcagtcctgctccttctgcaagcccaagaaattcactaccatgatggtcacactcaactgccctgaactacagccacctaccaagaagaagagagtcacacgtgtgaagcagtgtcgttgcatatccatcgatttggattaagccaaatccaggtgcacccagcatgtcctaggaatgcagccccaggaagtcccagacctaaaacaaccagattcttacttggcttaaacctagaggccagaagaacccccagctgcctcctggcaggagcctgcttgtgcgtagttcgtgtgcatgagtgtggatgggtgcctgtgggtgtttttagacaccagagaaaacacagtctctgctagagagcactccctattttgtaaacatatctgctttaatggggatgtaccagaaacccacctcaccccggctcacatctaaaggggcggggccgtggtctggttctgactttgtgtttttgtgccctcctggggaccagaatctcctttcggaatgaatgttcatggaagaggctcctctgagggcaagagacctgttttagtgctgcattcgacatggaaaagtccttttaacctgtgcttgcatcctcctttcctcctcctcctcacaatccatctcttcttaagttgatagtgactatgtcagtctaatctcttgtttgccaaggttcctaaattaattcacttaaccatgatgcaaatgtttttcattttgtgaagaccctccagactctgggagaggctggtgtgggcaaggacaagcaggatagtggagtgagaaagggagggtggagggtgaggccaaatcaggtccagcaaaagtcagtagggacattgcagaagcttgaaaggccaataccagaacacaggctgatgcttctgagaaagtcttttcctagtatttaacagaacccaagtgaacagaggagaaatgagattgccagaaagtgattaactttggccgttgcaatctgctcaaacctaacaccaaactgaaaacataaatactgaccactcctatgttcggacccaagcaagttagctaaaccaaaccaactcctctgctttgtccctcaggtggaaaagagaggtagtttagaactctctgcataggggtgggaattaatcaaaaaccgcagaggctgaaattcctaatacctttcctttatcgtggttatagtcagctcatttccattccactatttcccataatgcttctgagagccactaacttgattgataaagatcctgcctctgctgagtgtacctgacagtagtctaagatgagagagtttagggactactctgttttagcaagagatattttgggggtctttttgttttaactattgtcaggagattgggctaaagagaagacgacgagagtaaggaaataaagggaattgcctctggctagagagtagttaggtgttaatacctggtagagatgtaagggatatgacctccctttctttatgtgctcactgaggatctgaggggaccctgttaggagagcatagcatcatgatgtattagctgttcatctgctactggttggatggacataactattgtaactattcagtatttactggtaggcactgtcctctgattaaacttggcctactggcaatggctacttaggattgatctaagggccaaagtgcagggtgggtgaactttattgtactttggatttggttaacctgttttcttcaagcctgaggttttatatacaaactccctgaatactctttttgccttgtatcttctcagcctcctagccaagtcctatgtaatatggaaaacaaacactgcagacttgagattcagttgccgatcaaggctctggcattcagagaacccttgcaactcgagaagctgtttttatttcgtttttgttttgatccagtgctctcccatctaacaactaaacaggagccatttcaaggcgggagatattttaaacacccaaaatgttgggtctgattttcaaacttttaaactcactactgatgattctcacgctaggcgaatttgtccaaacacatagtgtgtgtgttttgtatacactgtatgaccccaccccaaatctttgtattgtccacattctccaacaataaagcacagagtggatttaattaagcacacaaatgctaaggcagaattttgagggtgggagagaagaaaaggggaagaagctgaaaatgtaaaaccacaccagggaggaaaaatgacattcagaaccagcaaacactgaatttctcttgttgttttaactctgccacaagaatgcaatttcgttaacggagatgacttaagttggcagcagtaatcttcttttaggagcttgtaccacagtcttgcacataagtgcagatttggctcaagtaaagagaatttcctcaacactaacttcactgggataatcagcagcgtaactaccctaaaagcatatcactagccaaagagggaaatatctgttcttcttactgtgcctatattaagactagtacaaatgtggtgtgtcttccaactttcattgaaaatgccatatctataccatattttattcgagtcactgatgatgtaatgatatattttttcattattatagtagaatatttttatggcaagatatttgtggtcttgatcatacctattaaaataatgccaaacaccaaatatgaattttatgatgtacactttgtgcttggcattaaaagaaaaaaacacac

SEQ ID NO: 887 - DNA, 3112 bp, Homo sapiens
aaaaggaccatgagagggccggagccgggtccccaaccgacgatggagggagacgtgctggacacactggagacgctggggtataaaggaccattgttagaagagcaagcccttacaaaggcggcagagggtggattatcttcacctgaattttcagagctctgtatttggttaggctctcaaataaaatcattatgcaacttggaagaaagtatcacgtctgctggaagagatgatctagagagcttccagcttgagataagtggctttttaaaagaaatggcatgtccatattctgtactcatatcaggagatattaaagatcgtttaaaaaagaaggaggactgtttgaaacttctattatttttaagtacagaacttcaagcttcacagatattacagaacaagaaacataaaaattctcaattagataaaaatagtgaagtttatcaggaagttcaagctatgtttgatacacttggtatacccaagtcaacaacttctgacattccgcatatgctaaaccaagtggaatcaaaggtgaaagatattctctcaaaggtccagaaaaatcatgtgggaaaaccactgctgaaaatggatttaaattcagaacaggcggaacaactggaaagaatcaatgatgctctttcctgtgaatatgagtgccgccgacgaatgttaatgaaacgattagatgtgactgtacagtcctttggatggtctgatagagcaaaggtaaaaacagatgatatagcaagaatttatcagcctaagcgttatgctttgtcacccaagacaacgattacaatggcacatctacttgctgctcgtgaagatctatccaagatcattaggacaagtagtggcaccagccgggagaagaccgcatgtgccattaataaggttggtgtttctttcagtacagtggaaaatgaattgatgatatcttacttaatgtttttacagattttagtctatttttctttcatgtcctggtaaatgtttagaaaaaagagtggcaggggggttcagtctaggcttagttatgttatttttgtgtatgtgtgtatgttcacttgaatttgtgtattcataaatcaaagtattttctgaattagaggaattatgaattgtttttgtcaaagctttagcaagaattatgttccatctttctaaaaagtaatcattttttgtcagtaagaatctttcggaattgtttcaagtactgacagattcgttatatccttggtgtaaagggaagaagagtttgtgctttagagtcagaccaatctgggttcccatcctggctctgtcatttacttacagaaatgaccctgagcaagctactgaacttctttgagcttctgtttcctgatttggagtatacatccatttctctgacagtagtctatttaaacaagctcaaggagtctgaatttttcactttacaacagcaataacaataaagtaatttagtatgtttatgtcagcttaactggcatgtcctcttcatttaggtagagcactccatggcaaactttattacaaaagagcaaaaaatcagaaataagggatttggataattttaaagcatcgcttctcactcagtgtaacttgagataaaataccttttcagagggatggttgtttttaaagtcattttgctaactattgctaagttaggcatcaccagtgtttgcctctgtgcttccactgtggctcaatcctatgttctgaaagtgttctctctttaaatatattacctaacatcttgcattgggtgataatttagtcttgctggatcaagagttctatttctgtaagtaacattggccatctcttctgagtttataatttatggtctcattatttgagggtagtcttatgatcagttctggcatctccatatgcccaccaacataccatgtttggtagagagaccagtgagaataataaccaagaaaggctgttttttggatttggtagttaggacatcattgccatctttaaaagaatgttgcatacttagaaccttgtctcactttgaggatattgcactttttatatttcatttgtgatataaatcctaaacttggttttgattggaggatcaatggaagtgtataattaattggtcattttggttgaggcagttgcttttttactttctttcctgaaaggcagtagcaggaagctattggcttccccttgtctgtggtgagcagatgacacccttcttattgctatctttcctctgctcatggcatataaagctgctactttttatagaaggttggatacttaaactcttccctagtttatttttgaaaggattataaagcatagtaaaggaattatattaactgtgttttccttttaataatatggtactagtatcatcactgaaagtaagtgagcttaagtttcttaaaagaagcagttcattgagaatccttctctctctttgcagtgatacctggaattatagtttttatatcaatctctgacctcattaaggtcccatgttatatgtacttcatacatttttgaaatgaaatgtgcttaggaatataatcttttattggataatcaattaccaaatcaatggcaatggaaagtccagagttgttattgtataaatggatattaagttaatgaatgtaaggtatgtcgttatatatataaaaaatgttttcctaaaagaacttcttagtgaaatgggtactacatttgttacagaatttgctaaacaaatttaagtgagaaaaaaattaagcctttaagtttcagaaatactctctcagattgtttaaaaataatatattctaggctgggtgtggtggctcatgcctgtaatcccagcactctgggaggccgaggcaggcggatcacgaggtcaggagatcaagaccatcctggctaacacgttgaaaccctgtctccactaaaaatacaaaaaattagctgggcgtggtggcgggtgcctgtagtcccaactactcggggggctgaggcaggagaatggcgtgaacccaggaggcagagcttgcagtgagctgagatcatgccaccgcactccagcctgggcaacagagcaagactccatctc

SEQ ID NO: 888 - DNA, 2749 bp, Homo sapiens
attcccacctcctccagaagccccgcccactcccgagccccgagagctccgcgcacctgggcgccttccgccctggctccgctgcacgagctccacgcccgtaccccggcgtcacgctcagggaccggcgatgctctgcaggctgtgctggctggtctcgtacagcttggctgtgctgttgctcggctgcctgctcttcctgaggaaggcggccaagcccgcaggagaccccacggcccaccagcctttctgggctcccccaacaccccgtcacagccggtgtccacccaaccacacagtgtctagcgcctctctgtccctgcctagccgtcaccgtctcttcttgacctatcgtcactgccgaaatttctctatcttgctggagccttcaggctgttccaaggataccttcttgctcctggccatcaagtcacagcctggtcacgtggagcgacgtgcggctatccgcagcacgtggggcagggtggggggatgggctaggggccagcagctgaagctggtgttcctcctaggggtggcaggatccgctcccccagcccagctgctggcctatgagagtagggagtttgatgacatcctccagtgggacttcactgaggacttcttcaacctgacgctcaaggagctgcacctgcagcgctgggtggtggctgcctgcccccaggcccatttcatgctaaagggagatgacgatgtctttgtccacgtccccaacgtgttagagttcctggatggctgggacccagcccaggacctcctggtgggagatgtcatccgccaagccctgcccaacaggaacactaaggtcaaatacttcatcccaccctcaatgtacagggccacccactacccaccctatgctggtgggggaggatatgtcatgtccagagccacagtgcggcgcctccaggctatcatggaagatgctgaactcttccccattgatgatgtctttgtgggtatgtgcctgaggaggctggggctgagccctatgcaccatgctggcttcaagacatttggaatccggcggcccctggaccccttagacccctgcctgtatagggggctcctgctggttcaccgcctcagccccctcgagatgtggaccatgtgggcactggtgacagatgaggggctcaagtgtgcagctggccccataccccagcgctgaagggtgggttgggcaacagcctgagagtggactcagtgttgattctctatcgtgatgcgaaattgatgcctgctgctctacagaaaatgccaacttggttttttaactcctctcaccctgttagctctgattaaaaacactgcaacccagctaacttgtccagcatatgttgaatgggagccaaagtgtagcaaatgctgccaggaacctgtcggggcattccgggcgctgcctggggcgctgcagtctgggacctcaaggaaggaggctgcataggaccccaggagagacgcattttctctttcagatgcaaacaaaatcttacactcttctcctttggatacaatagagaaacggaaagaaaggaaggaacaagaggcctgtgttaagtcctgttgatgttaagtcctgttgagagcaccaggtaaacactctgcaccccttctcttagtagtaataggtttttcactccttggcctcagctgtcctcacaggacagtgggggcagatcagagaacacatcagaaatacatacaaagaaatcgtacaaactggacaggttcccctccccctgccacaactggcatcccaacagagggaacaagtactaaatcatttttgacgacgtaaataagactgaaaacaggttaaacagttgctgaacttaagggcatgacaaaaaggactcctctctctgacccaggtaggcaaaatgctttgggtgtgaggtaaaaaaaatgggtaagagcagctgtacagagtggggtgaaatgttaaacagggtgcagtgcccaagggctaagaaccaggtccagcgcaagcctgagaccacaggaggcactcacagctcacaaaggcgtctcgcctgattggccagggcaggatctgccgcctcttctcggtgcacagacagtcatgccaaccctgggcagggtggcatctgcccctgctttccccactgagtggggagacagggcagtgtgctcaggccctcaatcctcacgcaggtaggcctcctgctccgactcagcccgctcctccccttcctcctgtgttttctgacggagctcttctatctgtgcttctgccagcttggtttctgctttccgggagagctggtgcacctcttccacctgcagtttcaccagctgaatgtgattcctggcggttatagaggcctgatctgcgcctgccaaaagatgggacaatcgggttgagcagccgtgcagggcgcggaaggctcatgtggacgttggcctgggggtgctgtggctgtcatctgaacccctcttggggtcactttccttgacctccctgtcttctctctctgcaaagaaacttccacctctatgttcaggtctggatttaactgacactctgtcaaaaacagcatttttcttcagctgtcagcggccaacatcacaattattaaatgcaactctcacaatcatctttatagctacagagcttttagtacagacctttgattaatttttttaactacacatcttccatttctttttgacaaagagatcatgaataaaattgtcaaagatc

SEQ ID NO: 889 - DNA, 2696 bp, Homo sapiens
aggggcacccagagagatggaatgaggcagactcggaggtctgtattttttattgtggtaaaatagctataccacaatattggccaacttaacgatttttacaggaacaattcagtggcattaagtgcctttacaaggtggtgcaactgctttgagtctctgctggtgatgtcactttggcaaagggacgaaatgagccaccagtgcgtcaggcctgctcagagttgtttggaggtagcatggacacaggtgcctgtccctgccccctagctgggctgcagcgcatcctaacaatgctccaggggctgggccggccctgagcctggaggtgggcagggctgcaactgcctcctgggccactagagggcatgtgggagccactcacatgcaccccaggccccacttcctgggtagggtgcccggcccctcaaaacgagtgctgctctgagcttgttgggatggatctttccctccttcagcttccgcctgctggcaatgcatggcgtcctgcgcccccatttctgcctcggtgtcacagggcacacccctctccccccaaggtggctcttctcctcaggacaccactcccgttggatttagggcccaccctaccccagtgtgatctcatcttcactagttaccctgcaatgagcctatttccaaataagcctgtgttctaaggtactggtagtcaggacctcaacgtgtctgtcttttggggggacacagggaccccaagatgccccacagcaagtgacaaggggaagtgatgagatcagggtcccaggacctgccaagtctccccacacacgggggagcgggggtggggcccacatccttcagtcacggacatgccccagcccagggccctggtgcagggagagctgctctctgtgccctcctggggcaggtgcctgctgtgcttctcacaggcctccttgcctttcagaatcagttgtctggaaacctgctgaggaaattcaaaaacagcaacgggtggcagaagctgtgggtggtgttcacaaacttctgcctgttcttctacaaatcacaccaggtaagtgtcttgcacagggcaggtggccctgggaccttgggggtggcagcatgaggtgagggggccgccctcctctggaatgactcaggcctcttgggctccaggtgtcacggggatgacagggatgctggcggggggccctgtccacccgaggccctcaactctagggaagactgacattatcatccactgaaggacaacttctgccctaggaagggccacctgtcttctgcctggacaagggacgggggttggctttatctacagctcagtcctggcgggacttgccacccgggccatcacgtacaggcaaacactggctgccatggtcccttccaggcccacgcccgaggagggagctgcctgggctcccaagtccctgtctgatgcggggcagcagccaggcccagcagcagaagctgcccccgaaaagccactttgctttgtttcccctttccaggacaatcatccccttgccagcctgcctctgctcggctactcgctcaccatcccctctgagtccgagaacatccagaaagactacgtgttcaagctgcacttcaagtcccacgtctactacttcagggcggaaagcgagtacacgttcgaaaggtagacacccccttcccacgcacagggccctgcagaagaggaccccctcttccaaacatcaggatttctcccaagtcagcgagtgagatggccccacccttccctgccaactaagcgtttagacctggggtcccactgcccgacaccagcaggcgattctgttctcatggcagaaagtggggtcccaacctccctgcgcccttaccctgcacggtgttggctgaggccctagacatcttgcttggagatctctgacataacgtgtccgggatgatgaagctaagccccagtgagactgcctacatggtgtaatggcagggaccgcagacttcatttagccaagaaagaaatgcaacagtcaggcctaagaccgttcctgcaattcatattttgaatagagagcctgggcctctgcaaattgcatccccaagccgactacttgtgcagtttgccctgctgagccctcctcgccccgggaggcagaaggggaggggtcctcagcaatatgctgagcacctcctaaacaacatcacctgaaaaaggaacctagaggagagccattctcaaatctgatcctggactgagctcgagagctgggttgagagctgggttgatcaaagttgggattttgctattattgtgacaaagggtccagccttgcagtccagatcctgaaaggcctgggacaaggccaggtaatttggggagtccgtcctgcattgtgcaggatgttcagtggcatccctggccacccactagatgcccgcagcaacccctcagttgggacatctaaaaatgtctccagactttaccaaatgggacagcattgcacccatttgagaagcaccggtagagagcaaatacacaaatatataaaaagggagatttgggcgtggtggtgcaagcctgtagtcccatctcctgggaggccaaggctggaggatcgattgagcccaggaggtagctacagtgggcgataactgcaccactgaactccagtatgagtgacagagccagaccctgtctc

SEQ ID NO: 890 - DNA, 2469 bp, Homo sapiens
gctttaatgggaaacagtctgagtaaaacggggaaacttacaaggagctataggacgaacaatgtgacgggtggctttcagatggcctggctttggcctaaatagggtggccattccaggtgacacattttagtgtagcctctatttaaatatggagttctttcagtggagagtaaaggtgctcctcctctgtgtctggtttacacggctccgcgagaccaaagggcccctcggtctccttgagcagcctggcactctgcacagaggatccaggaacggtgtcatggagccacattctgcacagacttgatgatgtggagggagctgcctggatcacttcagcgcatcagttgtgatgggagagccaaggcacttgagggcgggattgcgtctggccacctgttgccttccacctgaagggaagatttccccagtgctcacagtgaggatgggactggaaaagcgttggtttcaggaaggtgcaggttctggctcctgcccactgcgaacatgctgatgggccagggcaactctttagtctttgtgagcttcagttttcttatctataaatgagaacaataagactgaccccaactgttgctgaggaatgatgtctttgctttcatgtctggtatttcttagagcctcattttacagatgaggaaactgaggctggctgcgtgctcagagggtttgctgaaggcctcacagccgcttagcacaggtgggactttaagccaaacttgagaccagagtctgtttctcctcactgccctgccgagggagcagatggggggtggtgggggaggtgaacgtcacccctggcgtcttctctagctcaggggccaggaggcctctcatctttaaagtaggaatgacaaccggcaggccctgggtactgagctgtgctttaccgaagagcggcaggtcctgacgccgtctcctctcaggagtggggtggcggcgtgctcagctgaggagccaggtggcagtcaggcttggcttggcctgcccagaagcagggctgtggcaggaccttggacacgtggcttccactgtttgagacttggtgaaatgggggtcatgatgcccttcacttgagcatctgggaattaagtgggtgaacaatgtgacctctggcacctgggttctcaggtgaattcctcatggcatcacagcagtgttgaaataggagcagatacgttacctccgcttgccagataagaaactgggacgcagatggatggactacctgagagttgtagataacattttcctgttcatggggtggaggacctggccctgagaggacaggatccctcctgctcctgccagaccagagacccaggacagggcgtggagcagacagggtgcctgggcgggggaaccctgagggatccacagagggtgcggtccttggagggaggacatgcagtgccacgtgccatggaccagccagtggaccccatggccagcaaggctgctcctggggccagtggggtggacagtcccgcccacgcaggtgactgaggtgccagtgtgggaatgaaaatgcggcctgtgctcctgggcccatgcgtctcacgctgcccttcctctccagggaagcctgtgtacctgctactttttcccgaacaattcatggtaaaaacacaaatggtatatggacaaaatactgaatgtggaagaaacctacttgacagtgttggtgaaaatagggccaggatttcacacccgtgaatgctttttactgaaaagtattttgtgtttttctcccagttacagaatgtctgaaggggacagtgtgggagaatccgtccatgggaaaccttcggtggtgtacagatttttcacaagacttggacagatttatcagtcctggctagacaagtccacaccctacacggctgtgcgatgggtcgtgacactgggcctgagctttgtctacatgattcgagtttacccgctgcagggttggtacattgtgacctatgccttggggatctaccatctaaatcttttcatagcttttctttctcccaaagtggatccttccttaatggaagactcagatgacggtccttcgctacccaccaaacagaacgaggaattccgccccttcattcgaaggctcccagagtttaaattttggcatgcggctaccaagggcatccttgtggctatggtctgtactttcttcgacgctttcaacgtcccggtgttctggccgattctggtgatgtacttcatcatgctcttctgtatcacgatgaagaggcaaatcaagcacatgattaagtaccggtacatcccgttcacacatgggaagagaaggtacagaggcaaggaggatgccggcaaggccttcgccagctagaagcgggactgaggctgcctcacgtgttgcaagaacagttttgagccattgttaacaatgccttttttcttcacataaagtagttgattacg

SEQ ID NO: 891 - DNA, 4098 bp, Homo sapiens
gcagtacagattccgaagccgcagcgccgtcccctcctttcctcgccccagcccgagcgggaagcggcagcagctccccagagccctggcttggcagggagggggcggcgcccgagcagccatattgcagccccccgggtccctcctccggccggcgcaggccccgcgctcacgacctcctctgggagccggatctgtcctctccatcgccgccacccgccggcctctgcgtcccttggcttccgacatcccgtctggccgtccccctgtgccggtccgagcctctgtttatttcctttcctactatcaatactcgaccagcagaaaaggaaagtttaaaaatgccaatcgcacagttgctggaactatggaaaaagatcgaggtggagcctatggaaatagagaccacagaggaggatctcaacctggatgtggggcccgccacagaagacactgcagaagaagaagaaggcgtcgtgaaggagatagacatcagccatcatgtgaaggagggctttgagaaggcagatccttcccagtttgagctgctgaaggttttaggacaaggatcctatggaaaggtgttcctggtgaggaaggtgaaggggtccgacgctgggcagctctacgccatgaaggtccttaagaaagccaccctaaaagttcgggaccgagtgagatcgaagatggagagagacatcttggcagaagtgaatcaccccttcattgtgaagcttcattatgcctttcagacggaaggaaagctctacctgatcctggacttcctgcggggaggggacctcttcacccggctctccaaagaggtcatgttcacggaggaggatgtcaagttctacctggctgagctggccttggctttagaccatctccacagcctggggatcatctacagagatctgaagcctgagaacatcctcctggatgaagaggggcacattaagatcacagatttcggcctgagtaaggaggccattgaccacgacaagagagcgtactccttctgcgggacgatcgagtacatggcgcccgaggtggtgaaccggcgaggacacacgcagagtgccgactggtggtccttcggcgtgctcatgtttgagatgctcacggggtccctgccgttccaggggaaggacaggaaggagaccatggctctcatcctcaaagccaagctggggatgccgcagttcctcagtggggaggcacagagtttgctgcgagctctcttcaaacggaacccctgcaaccggctgggtgctggcattgacggagtggaggaaattaagcgccatcccttctttgtgaccatagactggaacacgctgtaccggaaggagatcaagccaccgttcaaaccagcagtgggcaggcctgaggacaccttccactttgaccccgagttcacagcgcggacgcccacagactctcctggcgtccccccgagtgcaaacgctcatcacctgtttagaggattcagctttgtggcctcaagcctgatccaggagccctcacagcaagatctgcacaaagtcccagttcacccaatcgtgcagcagttacacgggaacaacatccacttcaccgatggctacgagatcaaggaggacatcggggtgggctcctactcagtgtgcaagcgatgtgtgcataaagccacagacaccgagtatgccgtgaagatcattgataagagcaagagagacccctcggaagagattgagatcctcctgcggtacggccagcacccgaacatcatcaccctcaaggatgtctatgatgatggcaagtttgtgtacctggtaatggagctgatgcgtggtggggagctcctggaccgcatcctccggcagagatacttctcggagcgcgaagccagtgacgtcctgtgcaccatcaccaagaccatggactacctccattcccaggggggttgttcatcgagacctgaagccgagtaacatcctgtacagggatgagtcggggagcccagaatccatccgagtctgcgacttcggctttgccaagcagctgcgcgcggggaacgggctgctcatgacaccctgctacacggccaatttcgtggccccggaggtcctgaagcgtcaaggctatgatgcggcgtgtgacatctggagtttggggatcctgttgtacaccatgctggcaggatttaccccttttgcaaatgggccagacgatacccctgaggagattctggcgcggatcggcagtgggaagtatgccctttctgggggaaactgggactcgatatctgacgcagctaaagacgtcgtgtccaagatgctccacgtggaccctcatcagcgcctgacggcgatgcaagtgctcaaacacccgtgggtggtcaacagagagtacctgtccccaaaccagctcagccgacaggacgtgcacctggtgaagggcgcgatggccgccacctactttgctctaaacagaacacctcaggccccgcggctggagcccgtgctgtcgtccaacctggctcagcgcagaggcatgaagagactcacgtccacgcggttgtagcgggtgggaccctggccccagcgtcccctgccagcatcctcgtgggctcacagaccccggcctcggagcccgtctggcacccagagtgaccacaagtccagcagggaggcggcgcccgccctcgccgtgtccgtgttttctttttcagccccggagagggtcctgacctgggggcttctccaagcctcactgcgccagcctccccgcccgctctcttttctcccaagcaaaaccaaatgcgccccttcacctcgcgtgcccgtgcgaggccgggggcttctttcagagcccgcgggtcctctcatacatggcttctgtttctgccgagagatctgttttccaattatgaagccggtcggtttggtcagactcccgacacccacgtcccaggtacccggtgggaaagtggcagtgcgagggcgcagccattggtggttgcagggccccagagggctggggtgacctggcatcccggggctccccacgggctggatgacggggttggcactgtggcgtccaggaggagatgcctggttctgcccaaaataatccaaagagccgtttcctcctcgcccttcagtttttgcctgaggtgctgggtagcccatcctttcctctgtcccagattcaaatgaggagtaagagcccagacgagaggaaggcaggctggatctttgccttgagagctccgtgtcaccaggatggaagggggtgcctctcggaggagcctgtgtccacctccagtctcggctttccccggggggccaagcgcactgggctgccgtctgtccccagctcccgtggccacacagctatctggaggctttgcagggagtcgtgggttctcgcacctgctcagccctgtgtcggcttcctgtgtgctcacctaaagctgtggttttgctgtgttcacttcgatttttctggtctgtggagaaactgtgaattggagaaatggagctctgtggcttcccacccaaaccttctcagtccagctggaggctggagggagacacaggccccacccagcagactgaggggcagaggcacaggtgggagggcagcggagatcagcgtggacaggagcgatgcactttgtagatgctgtggctttgtgttgcgttttgtgtctctgttgcacagatctgttttttcacactgatccgtattcccctgggtgtgcacacagggcgggtgtggggcatttaggccatgctgtgctttacttcattgagtaaaatcgagtgagaggttccgggcagcaggatcgacgcccagtccagccggcagagggaacacacgggtccttcattgtcctgtaagggtgttgaagatgctccctggcggcccccaagcagactagatgggaggaggcgccgctcagcccctcaccctgcatcactgaagagcggcgcctctgcagcaagcagggcttcaggaggtgcccgctggccacagccaggttttccctaagaagatgttattttgttgggttttgttccccctccatctcgattctcgtacccaact

SEQ ID NO: 892 - DNA, 2817 bp, Homo sapiens
ttcagtattgtaacagtgctttgttctgatgaatatctttcaaagataaaaataatctttttaattctactttcagaagtaataggtactcattgtataaaagtgaaacactgtagaaatttagaatctgaaaaagaaagttcctttgtaagatccgtaatcttacaactcaaagataatgttaaaatttgattttttcccggcatataacaggcttttttcctttttaccaaaatgggatgattctgagttccctgtcacgatatataaatctactttattcctttcataaacttccatgcacttccaccacctgtccccacacacccacccacatctgtatacacacattctgcctcccttgccgttaccctgtatgaactgttcatgctcctatctaaggccatctccctggcactgggtccatctcctctcattcctgtgattgtctcttctccctctcctgcatcatcagtttcccctgtctactggattattcccaccagcgtgcaaatatgctgtcatattcttttaaaaatgcttcccttgcctacacattctcctgtagctaccatcccatctcggctttcctccaagagttgtctgtactccctgtccccgattcctcacctcccattctctctttaatccactgcacccacacagctcaaatgtggtggtcaccggtgaccaccatgctgctaaacacagtggccaattctcagtgcccttcatggccatacatgtcacagttgctctcttcctctgggtcctcccttggcttccaggaccacacactctcttagctgtcctcccatctcactggctgctccacctcaggctcctctgtttgtttccccttttctccatgacatctgaaggaagaagtgaaccaggccttctctattgggctacttctctatttaaactctctcttgggagtctccattttcatggctttaaatttcatggctcacaactctcaaatttgtattttcaccccaaactttgcccctgaatgcccatcccatatctctaagtcctatttgaaatagctctaggatgtctaacaggcatctgtctcaaacctaacacatccacaacagacctattctactcccaaacctgcctgcttatcctgcaggcttccttatcactgtaaatagccactgcattcttccaggtgctcaggagagagatctagaagttttccttgacttgtgtatattcctcacacctcacatctaatttaagcacattaatgagcttaaattctttaagctcaatcttgaaaatatatctcaccaccttcgctcttcttctgacctttttttttttttttttgatacagagcttctctctgtcatccaggctggagtgcggtggcgcaatctcggctcgctgcagcctccacctcccaggttcaagcaattctcctgcctcagcctcccttgtagctggggttacaggtgtgcaccaccacacccagataatttttgtatttttagtggagacggggtttcaccacattggtcaggctggtctcaaactcctgaccttgtgatccacccgcctcagactcccaaagtgctgggattacaggtgtaagccaccgtgcctggcctttttttttctttaagagatgaggtcttgctctgttttccaggctggatcctgggcttgagggatcctcctgcgtcagcctctcgagtagctgggaccacaggcacgagccaccgatgcctggctaaatttttacttttttgtagagatggaggtctcgccatcttgcccaggctggtctcgaactcatggactcaagcaatcctcctgcctcagcctcccaaagcccatgtctggcctgggctgtctattctgtctcactgctctatgtgtttatctttttgctgataccaccctactttgaatactgtaactttatagtgagtcttgaagttgggtaatgtgagtatgtgagtcctctgactattttttttttcagaattgttttggctaatctagtacctttgcctttctctgtaaaaaaattgttttggctaggccgggcatggtggctcacgcctgtaatcccagcactttgggaggccgaggcaggcggatcacaaggtcaggagattgaaaccatcttggctaacactgtgaaaccccatctccactaaaaatacaaaaaattagccgggcacggtggcaggcgcctgtggtcccagctacctgagaggctgaggcaggagaatggcgtgaacccgggaggtggagcttgcagcgggccgagatggcgccgctgcgctacagcctgggcgatagagcgcgactccatctcaaaaaaaaaaaaaattgttttggcaaatctagtacctttgcctttctatgttgcccaggctggagtgcattggctactcacaggcatgatcatggtgtattatagcctcaaactcctggcctccagcgatcttcctgtctcagctcccaagtagctcccaagtgtgcaactgagactacaggtgcaaaacacagtgccctggcttttctgtaaattttagaatcagtttgtagacagtgtctgggaggaaaaactttttatctaccctcaggtttagtctttggggacctgtgaattaaacagacgaaagatatattaacaagagaaggccaagcgtggtggcttacacccataatcccaacactctgggaggctgaggcgggaggatcacttgagtccaggaggtcgaggctgccgtgggctagcatcatgccactgcactgccccatgggcaacagagcgagacccctgtctct

SEQ ID NO: 893 - DNA, 1856 bp, Homo sapiens
ttcattccgcaagcccagccccaggtctctgagtgccaccctagaggtgttaaacaaaggaggccaggcaaagtcccatctccctcagggcctaggcttgagatcacagcaggaggagccaaggagactcacgattaccctcctgaatcccttcagtcactcacaagtggcaatgctgggcaagctgagtaaaacaaaacccatctgcagaccagagtcagccaccttcccatctgtgtcaaggaagtgttcctgcaggcctggcgccggcctccgccccagggacgctgggctgaggtgttgggtctcccaccagggcctggaagacctgtgggcatgtgggaggaggagtcacattgcacaattgcagagtcccctccccactgccctccactgtgccaccatcagcgtggcaaccagaggtctacactctcagggcaattgctggctgcctcctccagggtctccttccagttttatatgacatctgggacccctgggatcttcacccctaccaaggagcactgaagtttatacactgccctgggagttgggggtgatgtgatgtgtgggaagcttcaggccacaggtggggccaggaggagtgagagatggtgaccaagcaggggggactccaagctatcaccctgtcccattctaaaggagcatctgttcaggcaaggcaagcagagggccactagcagccaggcccctgaccttcccctggtggctttgggaacattcctaactatgcaccacagctggcagatcaggagtgggaatggcagggccacctgcagctgtgattgggtggctatgtgcgaattgagcacgtcagtcctccacacaaggcccagactgtgtgggcacctgccgcgggaactcctgcctcttggcctgtgtcctgagctttgggtgtgcagccaagcttgggatggggttaggtgaagcctcacctctctacctgactctctcctgtcctccagtgccaccgcatccaccggtcactcgccagccagttcaagtacgccctggtgtggggcaccagcaccaagtacagtccgcagcgggtgggcctgacccacaccatggagcatgaggacgtcatccagatcgtgaagaagtaacggcgcctgccgggcctcccgcccacctgcctcgtctccctggggaggtggtcccactgggacacacaaacacccaaacagaaaaatacaaatacacgtaccccaggaaggggtccctcaagtctctgctatttacagaagtttcttcagtaggcagacgaagagtgtgttggggcaaaggggctcggttggaggcatttcccataagactgagccctctcatgggggttttgagtttgtagtgctgagcctgcatctgtgcctcccagccccctgcactgagggagcaagttgcccacatgcccgccagccagggcctaaagcagatggcatgctcagtgccaggctggtagctgggcctgtttgggtccctggaggctgtggctgctgtcatggcacctcactccctcagctcttgccagcttctctgacacttgggttgggggcccttccaggaggaaacccccttgggtgccccacacagggctctccatgatgggaaccagtggttagtggcttcaaaggcccagctgacaccctccacagcctaaggggtgtcctaaagtgcctccccctgtattccccctcccagggcagcccctgcccagcacaaaaccccaggaccctggctctgcacgcctggggcagggacttttgagtttaggatctgtattttttaagtccccagttctcctggctctcctttctgaaataaaggattgaaaacgg

SEQ ID NO: 894 - DNA, 2575 bp, Homo sapiens
aataaaaaccacaatgagataccatctaacaacagtcagaatgactactattagaaagtcaaaaaatcacagatgctggtgaggttgtggagaaaaaggaatgcttatacattataggtgggagtgtaaattagttcagccattgtggaagacagagtggcaattgctcaaagacctaaagacagaaataccatttgacccagcaatcccattactggatatatacccaaaggaatataaatcatattataaagacatatgcatgcgtatgttcattgcagcatttttcacaatagcaaagacaaggaatcaacataaatgtccatcaatgagagactggataaagaatatgtggtacatatacaccattgaatactatgcagccataaaaaagaacaagatcatgtcttttgcagggacatggctagagctggaggccattatccttagcaagctaacacaggaacagaaaaccaaatatcacgtggtcttatttagaagtgggagctaaatgataacacatggacacaaagaggggaacacattgcagcctttcggagagtggagggtgaaaggagggagaggatcagcaaaaagcactaatgaatactaggcttaatacctgggtgatgacataatctgtacaacaaacccccatgacacaagtttacctatgtaacaaacctgcacttgtatcccagaatttaaaatgaaagttaaaaaaataggtactgattttgttttgtttaggaattccttctctaccttgagatgatgatattttcttgtatagtatcttaaaaactctatagtcttttctttcacatctatgtctttaattgacctggaattgcatgaggcagggctctggtttagctgtttccatattaatactcatttgttccagcatattttttgcaaagacttcttttcctgctgatttgcattgctgactcttatatttcacgggttcatagatacgtgggtgtgggtctttctctgggttttctattatgttccattgctctatttgtctctccttaaactaatatcacattgtcttaaatattctaactttataatacatcttggtatctacaagagcaagttctcccaccttgttctttttctttaagaatgtcttggctattctttatccatattcattttaaactagcttgtcaacttttcccaccacaccccaaaatgctgggactttgagattgcactgattctataaatcaatttcagtagaatgacatctttacaatattgagacttctagttaacaaacacagtattttcactttgtgtgtttgtgtgtgtgtgtgtgtctcccaataaagtttaaaattttcttaatagagaacttttgttatatttattcctaggaacttggcattttggcattatattaaaaaaggcaacttcttttaaaatatcatgttaataaatgtctttttctggtataaagaaatgcaattgatttttatggactgattttgtatccagcaaacttgctaaactctcttatcaatactaaaatcttatctatagatccttttgaattttctacatatacaaatgcatcacctatgagtagtgacagattttcttctatttttcttagttttctatcttttatttatttttctttccttactacacagactgggatatcttgtagaatgctgaataaaagtaataacatcaggcatccttgttatagatctcaaagggaaagatttcatcattttaccattaagcatgatgtttcctctaagtgtattgcagatattctttatcagactaaggaagttcccttgtattcctaggtttgctaagagctttcatcatgaatggatgttgattttatcaattgttttttccacagatattgagatgatcatatgtgttttcttcttcaatcttttaatatggtgaatcccattaagttattttctaatgttaaaataattcatattccaggtagacccaacatggtcatcatatgttattaccatttttttggtattactagttatgtgttatacctttgaaggatttttgtatctatgtttatgagtgagatttaggggactacatggcccaatttatctggaacaactccagtttacacttctttttctgcatcattattgataacatttacactcttaaagtgcctgggtttggatgataaagtatatggtcacgctagtaagaatggcctgtggtattatattctcatattatctttgtccagttttggtatcacagcaatgttttctcattctatatttccgagaacagtttgtataagattggaacagttattttccttgaatgtttggtagaattcactgttgaagccatttgggggtcaaagtttccttactgaatccattattttataggttatagagttattactgttttctattttttagtcaactttgaggttataattttgtagtaatttgtcaattttttctaaattgtgttagcatagggtttttcaaaatatgtgctcatcttcttaatgtctgcaacattaaaggttctggtattggtt

SEQ ID NO: 895 - DNA, 2017 bp, Homo sapiens
agttttaattctgtctctaatctctgcaacagccgcgcttcccgggtcccgcggctcccgcgcgcgatctgccgcggccggctgctgggcaaaaatcagagccgcctccgccccattacccatcatggaaaccctccaggaaaaagtggccccggacgcgcgagcctgaggattctgcacaaaagaggtgcccaaaatgaagaccctgatgcgccatggtctggcagtgtgtttagcgctcaccaccatgtgcaccagcttgttgctagtgtacagcagcctcggcggccagaaggagcggcccccgcagcagcagcagcagctcgcagccggcggcggagagcagcacccagcagcgccccggggtccccgcgggaccgcggccactggacggatacctcggagtggcggaccacaagcccctgaaaatgtactgcagggactgtgccctggtgaccagctcagggcatctgctgcacagtcggcaaggctcccagattgaccagacagagtgtgtcgtccgcatgaatgacgcccccacacgcggctatgggcgtgacgtgggcaatcgcaccagcctgagggtcatcgcgcattccagcatccagaggatcctccgcaaccgccatgacctgctcaacgtgagccagggcaccgtgttcatcttctggggccccagcagctacatgcggcgggacggcaagggccaggtctacaacaacctgcatctcctgagccaggtgctgccccggctgaaggccttcatgattactcgccacaagatgctgcagtttgatgagctcttcaagcaggagactggcaaagacagatatccaacacttggctcagcactggctggtttacaatgacaattgcactggagctctgtgacaggatcaatgtttatggcatggtgcccccagacttctgcagggatcccaatcacccttcagtaccttatcattattatgaaccttttggacctgatgaatgtacaatgtacctctcccatgagcgaggacgcaagggcagtcatcaccgctttatcacagagaaacgagtctttaagaactgggcacggacattcaatattcacttttctcaaccagactggaaaccagaatcacttgctataaatcatcctgagaataaacctgtgttctaaggaatgagcatgccagactgtaatcccaggtattcactgcatcagacaccgagacactgaacttcctgagccaccagacaggaaagggtagcagaaaacagcttcactcctcaggaagtaccatggacagacgcctaccaggggtgacaaagcagtgcagttggattgtaaggaaaaattccggaattaatgcatcctaatgaatgttgtccccttcaatggtgttaccttaggagctgaacattcaattcagttacaccactatgactaaaaacagtttggatctcttagtattgcctttgaaactgcaacataagcaactcaacaatattagttgcattcctttatagacataccatgtcaaagacgtttttctatcaagttgtattctttcctgttctataacctttgtcatctgttagactctgtatgtgtgatttgtaaaaagcaggctgaaactatggacatgatttctgaagagcacatctccactgactttcataaagcaaatgtccaatatttatttattgagagttttttagtgcaatctgggccagtatttttatagattatgattatgtggtaatttatccttcctaactctttaatcctgaatgatggttggaaatggcctagaattaggttactctgttcacaatgctcattgttagcatgcaattggtatttgacttggaagtgttgtgttgtattttttgaacccctaggcttcagggaaactgctcttttgtaaaaagaatagcgatgacattttctaatgtgcagaaatgttccaaaaggacaaaattgaaaaccaaaaactatgttattaaaacaaaaaaatgctaacaagag

SEQ ID NO: 896 - DNA, 2375 bp, Homo sapiens
ttgtttgtttacttatttttatttttgtttctttggagatggggtcttgctatgttgcccaggctggtctcaaacttctaggctgaagcagtcctcccaccctggcctcccaaaatgctgggattacaggcatgagctactgccccagccggtgtatatgtttgatggctgatgattaagtactgcttgttgattattgattaataccaacaggaatcccaataaccctgtttaaagaggaatggagattgccactgtccatttagattaatgaggtgtcctgaagtgatggtgacatcaatgaaaggagggttctgacacgttctcacctcgcgggatggcagctgctgatttgtcccatggacattatctttctggggacccagtttgccttcatgaagaaaagacaccagcaggaagaatagtggctgactgcctaacagattgttatcaggattcagtgacctttgacgatgtggctgtggacttcacccaggaggagtggactttactggactcaactcagagaagcctctacagtgacgtgatgctggagaactacaagaacctggccacagtaggaggtcagatcatcaaacccagtctaatctcttggttggaacaagaagagtcaaggacagttcagggaggagttctccaaggatgggaaatgcgacttgaaacccagtggtctatacttcagcaggactttttgaggggtcagacatccattgggatacaattggaaggaaaacacaatggaagggaactctgtgactgtgagcaatgtggagaagtcttcagtgaacactcatgccttaagacgcacgtgagaactcaaagtacagggaacactcatgactgtaatcagtatggaaaagatttccttaccctgtgtgagaaaacctctactggtgagaaactttctgagtttaatcagagtgaaaaaatcttcagcctgacaccaaatattgtataccagagaactagcacacaagaaaagtcatttgaatgtagtcactgtggaaaatccttcattaatgagtcataccttcaggcacatatgagaactcacaatggagaaaaactctacgaatggaggaattatgggccaggttttattgactctacaagcctttctgtgcttatagaaaccctcaatgcaaaaaagccctacaaatgtaaggaatgtggaaaaggctatagatacccagcctacctcagtattcacatgcgaacccacactggggagaaaccatatgaatgtaaggaatgtgggaaagccttcaattattccaactcatttcagatacatggaagaactcacactggagagaaaccctatgtatgtaaggaatgtgggaaagccttcactcagtactcgggccttagtatgcatgtacgatctcacagtggagacaagccctatgaatgtaaggaatgtgggaaatccttccttacatcctcacgccttattcaacatataagaactcacactggagagaagccttttgtatgtgttgaatgtgggaaagcctttgcagtttcctcaaatcttagtggacatttgagaactcacactgaagagaaggcctgtgagtgtaagatatgtgggaaagtatttgggtatccctcatgtcttaataatcacatgcgaacgcacagtgcccagaaaccatacacctgtaaggaatgtgggaaggcttttaactattccacccaccttaaaattcacatgcgaatccacactggagaaaaaccctatgagtgtaaacaatgtggaaaggccttcagtcattccagttcatttcaaatacatgaaaggactcacactggagagaaaccctatgaatgcaaggagtgtgggaaagccttcacgtgttccagttcctttagaattcatgaaaaaactcacacagaagagaaaccctataaatgtcagcaatgcgggaaagcttacagtcatccccgttcacttcgaagacatgaacaaattcactagtgagaaactgtccatgtaataaatgtgggaaagctctcatttgttccagttcactttaaagacatgaatgaactcactctggagagaagaagctgcatgaaaattacttaattcctgtaatcccagcattttgagaggctgaggtgggtggatcacttgaggtcaggagtttgagaccaccctggccaacatggtgaaaccttgtctctactgaaaatacaaaaaatttagccaggtgtggtgggcacctgtaatcccagctacttgggaggctgagacaagtgaatcacttgaacccaggaagcagaggttgcagtgagcagagatcatgccactgcactccagcctgggcgatggagtgagactccatctc

SEQ ID NO: 897 - DNA, 2097 bp, Homo sapiens
gtttacacgctccggggcctgtaggcgccgcgagttccggctgtcgccgtcgccgccgcggctcctggaggtcggttgcgacgagtaacggcgccaggacgagccctgcgccttctttttcgatatgtacccgaattggggccggtatggcgggagcagccactatccgccgccaccggtcccaccgccgccgccagtggcgcttcctgaggcctcgccggggcccgggtactcgagctcgacgactcccgcggccccctcctcctcgggcttcatgagcttccgcgaacagcacttggcgcagctccagcagctgcagcagatgcaccagaagcaaatgcagtgcgtgcttcagccccaccaccttcctccgccccctctgccgcccccgccagtgatgccggggggcggctacggagactggcagccgccaccgccaccgatgcccccgccacccgggccggccctcagctatcagaagcagcagcagtacaaacaccagatgctccaccaccaacgagacgggcctcctggtttggttccaatggagctggaatccccccctgaatctccccctgtgccgcctgggtcctatatgcccccatctcagtcttacatgcccccacctcagccgccaccctcttactaccccccgacctcatctcagccctacctgcctcctgctcagccgtccccttcgcagtccccaccttcccaatcctacctggcgcccaccccttcttactcatcctcctcctcttcctcgcaatcctatttgagccattcccagtcctacttgccctcttctcaggcatctccttcccgcccctcccagggccattctaaatcccaactactagctccaccaccaccgtccgccccccctggaaataagacaactgtccagcaagagcctttggagagtggggccaaaaacaagagtactgaacagcagcaagccgcccctgagccagatccctctacgatgactccacaggaacagcagcagtattggtatcgacagcacttgcttagtttgcaacagaggacaaaagttcatttgccaggacacaaaaagggtcctgtggtagcaaaggatacaccagagccggtaaaagaagaagttacagtacctgccaccagtcaagttccagaatctccttcttctgaggagcccccattgccacctccaaatgaggaagtgccacctcctctcccacctgaggaaccccagtctgaggacccagaagaagatgccaggttaaagcagttgcaggctgcagcagcacactggcagcagcaccagcagcatcgagtcggtttccagtatcagggaataatgcagaagcacactcagttacagcagattctacaacagtatcagcggattatacagcccccaccacatatacagaccatgtctgtagatatgcagctgcggcattatgagatgcagcagcaacagtttcaacatctttaccaagaatgggagcgagagtttcagctatgggaggaacaactccattcctatcctcataaagatcagcttcaggagtatgagaagcagtggaaaacatggcagggacatatgaaagccactcagagctatctccaggagaaagtcaattcatttcagaacatgaagaaccagtatatggggaacatgtcaatgccacctccttttgttccatatcctcagatgcctccacctctacctacaatgccccctccagtgttgcctccttcattgccaccaccagtgatgccccctgccctccctgctacagtgccaccacctggcatgcccccacctgttatgccaccttctctaccaacctctgttcccccaccagggatgcctccttctctctcttctgcagggccaccaccagttctccccccaccttccctgtcttctgcagggccaccaccagttcttcccccaccatctctctcttcaacagcacctccacctgtcatgcccctcccaccattgtcttcagctacctgcgatctgtgtttgctctgacgaatggaatttatcctcacaaattggtgttctaaatgtcttaagaacctaattaaatagctgactac

SEQ ID NO: 898 - DNA, 2819 bp, Homo sapiens
cagttctctcgagctagtctgttcagcaatataaaaccatagggtatttcagaaatccagtatcacagggtgatcctttgggacttaccgtcttccacgtgaaagaaactaggcctccgattccctttatttcccctaaatggttattcttttaaaaaagcagatggagcactttattcccaacctcagaaatcacaccatctcactggaatccatgagggacacagagagaggggaccaagcctggcctgggggtgggggacctggatgtgtagcaaggatgggagaagcgaaatctgcaggtgctgggggcacctgcacactcacagctgcacaaactgcctcactgttacttcatcaatcacagcttcaaatgtctcaatcagcagaagattgtaaattcgatctttcagggaaattaatctattctgaaaggcaataacatgaagcaaggcaaaggaggcactgatggtttagtatactacataagggatttttttgttctattattaagaaaatctagacctgaaatgttttctcaactcttattgtactgtgtatatttatattgttgtcgtggcggctgtttttaaagggaaagtgttggttctattaatttgttaagtgtccatccaggtgggcctacctgattccacatatataagtacatatctgcttataaagcgctgtaaatggcagcaaggctgtttttggagaagagtttgggttttcctaccatccctttgaatgctacacatccgtctattttaacccaagtagttcatatttcagatatattttctcctttcatctcctctcactactgcagagtccagtaatacctagcataggattctgtcctgtgtcaaatggctaaaataaatttttgccccaatagacatgctgcctcattcaaaagagctgccgctgtcatcttgaggttccaggtagtgagagaagaaactcgacctgccagggtcaacagccatgaagaggtcgggggagtcatgattcataaacactgaaagaagtcaaggcttttggcagagagtgttgatttagatttttagtcttgattgatgggcagtatgcatcggtgtctagctgaagttgtctttaaatgcccttactcgtcacagtttaaacacttaggatgtgccaatcttaagtatcaatggcattttatgtccagctaacatcctaaagcattagaaattaaaaacgaaagacttttaaaaacatacatcaaacatgcttgcaccagagaagctttttaaaataatacactctcatagccaggtgctaatttaattttacttatgaaattaagagaggtgatgggttctagcaacagatattttcacggacatattctaaaaccactagagaattcgctacctctcagagccatcgatgctttgagctacctttataaacagggcacaaatgtttactgctgtggtttacaagaaaagggctactcacttattttgaaaccaacgaaccaacttttaactagggtgaacaaagcactcaaagtgctttgtgaaattggagcatacagagattttgagcttcaagtatttgctagttttaaaaagaatacaccttttctttaccttgtagcagcaattaaaagtcacacaaagcttgcatcgagtagggccaactgccacttgggtagcctatggtcacattcaatactgagaatgacttggaactcacagattaatatgaaagaagcagcgttcatcccaagacccatgctcacaattacagctccgtgccctgaggtagagttgagatttggattaagaaatagatttctaatacgactcaagatcatcctacaatattttctttggaaactaatttagcccatgatattttaaagagagacaagagaaggcctatttatcttgtctaagtgaacggcatttgtatattcataagctatttttggtaagaattttaaatcttttagctcaaggcctacagggcatcatgatctttgccttccttgaaaatacaatttaaattgtacaaacactttataaaaagctaattattggtgttagaacatgaccccacacaatgctgcttgacccctgaaactgacattcatgagcataacctttgttacattgttctttttgatgtaatttgtagaaatgttttttagttcgtaatggaaaatgtatgtaccctgaaaaattacttattttgtttaactttggtataaaggtgttgggcattttcttggggagggggggattacaaaagaagtttgtctcccacatcaaaaaacgttcaaagaaattaagtatttattatattttttgcagatgtttccatacaattcacataacctttttgtaaagagagatgaagaaatggattaaagatttttaatatttgaaatggtaaatagaactaatttattgtaatatatttctgttatttatagatgtttccttaatgttttactgtgcattaccactttcatttaagccttatccttgtgaatttaccatttcttttttaaaacatgtctagatgcatattttaaataactggaatgtaaatcactagcatatctgaattcccaaatgtaatttttaaaaattattttggtttggaaaaaaaagattcatttgaaagccttcagatggaggggtgggaacatttttatggctttatgaattggaatttcataggcttatttacctagattgtgtgtgaacaaaaaaatattgtaaatagatgaatgtttcccataatgtaaaaagaagaaattaataaaataattaatgcactgc

SEQ ID NO: 899 - DNA, 3445 bp, Homo sapiens
ggagttggtgggcagcaggggagacaatagcgaacatgctgtgtgggctcagccgggagacccctggagaggcggacgatgggccctactccaaaggaggcaagaacgcaggaggggccgacgtttccctggcgtgccgcagacagagcattccagaggagttccgagggatcactgtggtggagctgatcaagaaagaaggcagcacgctgggcctgactatctcaggtggcaccgacaaggatggaaagcccagggtctccaacctgagacctgggggacttgcagccaggagtgatctgctgaacattggtgactatattcggtctgtgaacgggatccacctgaccaggctccgccacgatgagatcatcaccctgctcaagaatgtgggcgagcgcgtggtgctggaggtggagtatgagctgcccccgcccgctcctgagaataaccccaggatcatttcaaagacagtggacgtctccctctacaaggagggcaatagctttggctttgtccttagaggtcagtgaaagaattgcccttggtattggggcagcaagaaagaggctaatactaattccatgtgtgtgctgtttggatttgaatgtaatttatgtgtatctcagttctgactttgaagaacacaggaccgttaaggtaagtattcagtgggaaaatctgccaagcaatgaagtaggcttggttggggagagtgagaggagaaagttgtaccggaaaatgatggtgaaagctgctaccgagactgagaacaaagtctggagcttcctagagatcagggaaaaggggaaataaggtgaggtcacagaagggaggcaagccatttaacagagagaagactttggtcatgttacccaccccttgcaccatctcttgggagggcgaatttattgttggtgtctcataagagggtccatggatagcaaggacaaggtcctcaaacaggttttattgaaggagcctgctcaggggctgtgtgggagcctctggatgggaaggggtgggtggatgattcctgcttcttgtcaaatcctgtccaggaggtgcccatgaagatgggcacaagtcccgcccgcttgtcctgacctacgtgcggcccggtggccctgccgacaggtgagccgaggcagaagaaatccacacactgcactgacctgccccaactcccctgcgaagaaggtggagtggggtcaccatgccccttccccagatgaagagatcgaggccctgagggaacactccctgcccggtgtcattcagggagctgttgatggaaccgggatgtaaccccaaatgagggaaacctcgagccctttcttccccaacatactgctgtctcaggggttggggtgtttggagaggggcagccttggtgtcgttcttccctttcctgctccttggttttcccgtctgtggaatggtccctaagagttgctatgagagatttgggggcacgctgattgaccactgctgtagccgtctgtgactcagtctcctgggtcctggctgatcgacccagctcggccccgcctgggcccagcccagaagggccaggaggagagaatgtggggaaagaacatgtccagttcccagcccctgatccctcggcctccccagtgggagattcctggccattttaagagaagcctggaacggccttgtcagaaatctaaatctgtccttgggacagggccctgtgatgagctattcatagaacccccgagaatagctttggccacctgttgggagaggcgttccaggctggggatgcgacccaaaccgaggtgaaccctgctggggcccctcccctggcccctgttgagttctttcccaggcgcgggttgtcatcaggccagaatcaccgctgagaaaccagggtgagggtggagcaatgggaagggaccaggacggctcagagcagcccccaatgccgtgtggcatgggcacagcttgcaccctctctgggccctggtgctgtcctttgtccctgaggcaggagttgggggtgacgcttgaagagcacccccagctcagacatttcagggttctgcactgagtctgtgaattactgcacacccagaggagtggcaggcggcagagccaccccatcctgtcttcatcccccccttgctttatgcagctccccactcctggagtggctcattccttcactcactcatgcgccccttcacccgtcccctcctccccttcctcccccacccattccctgcttcttcatcctccatgtcccgcttcccagtgccctcccagacaggctgtgcccagtgctgctgccgggccaggctggtgactggcccttccctacagggagggctccctgaaggtgggcgacaggctgctcagtgtcgatagaatcccgctgcacggggccagccatgccaccgccctggccaccctgcggcagtgcagccacgaggcactctttcaggtggagtatgatgtggccacccctggtgagttgggggcctgagtgtgtgggttggggcaggaggaggcctgggatggggggaggtggcagtggccatggatctttaccactgcaaaggctgcatgaccttatgaccttgggccagtcacagcttctctgggcagtaaatagtatgtgctaggcattgtttgatgtgctggggatccagcctagaacaacagaattgaggtgtctgttctcatggagctggcattctggtggagagaggacagtatccagaatagataagatatggtgtatgtcagttggcaataagtgctatggaaaaaagaaaagaggcaggggagagagatgggacaggctggggggtgctctctcactaggggagtaagggaatgagcgaggcatggaatgtccagggacagcattccaggagggcggaagagtaagtgcaaaggccctgaggcaggagcatggccagcatggttggtcacagtgaggaggctgccgtggttggcacaggtgagtgaaaggaggtaagggcagagcagggtgaggtggaagccgggaggccataggaagcggcagcagctgtccaagcgagagctaagggactgaaccaggctggtggctaaggaggggagaaggcacgggattcaggaaatatgatgacggtccagctggcctgatctgctgagatttagacatgggtgggcgagggcaggagctaagggtgcggccaaagttttaatttccagccactgggtgtgttaatggaggtgccatttcctgagatggggatgggttgtagtgaactttacagtttagtgctggtataccacaggctcttcataaactcaagcaaattcatttcacccagcaaagccctgggatcacagcccctcagacctgagctcctgcccctcctccactgctatcttatctgtcaaattgatataacatttggtagaagat

SEQ ID NO: 900 - DNA, 3880 bp, Homo sapiens
atgcatctatgacctgtatggtgtccccaagccaggttcatcgatctatgcccagtgaggtgtccccaagccttgcccagctatctcaggccaccactgcagtgcccttaagaccagctcatcaacctatggcctgtggtgtatccccaagcctagcccagccgtctcaagccacagggatgtcttcaaggctagcccaccaacctatgacctgtgtggtgtccttaagcccagcccagccatctcaagccattggtgtgtccccaagcctagcccacccatctcagaccactgcagtatccccaaggcaagcccaaccatctgtggcctccagtccaggcaagacaaattcatcctgtaccctagcctccagcctagccgagccagctataacccccagcctattcccaccatctgtggcccacacggaagccctaagcctggctcagtcacccccggacactaggttggccccaagccgatcccagccatctgtggtcagtggtacatgtcatggcctcaatgagccatgctggggctctaggctggattcaaatctgcagtgttcaagggtggactcagtagccccgtgtctgtgtcacccatcagcgtttgtttcagttagcctgggtggaccatatccctctgtggctggaaatatggaccagggtctgaaccagccatccctgggtactggggtgaacctatgtgaagaacctctgatggttagtgagatggtatccagccccccggacttcaagttcaacgacgtgtcccttgggttccatcatccacccagggttggtgggaggcatgtgtgtccaccctctgtggttagtgtttcaacaccaaatctctctcatgctgatgaggaggcctgttgtgtaggccagtgaatcacgcctctgttcaggggtgtggctgtaagccatccccaggagcctttggctgatgctatgttccccagtgggtctcagggggccacatctcctggcctagctgggaatctcccctggagaaccatagcaactggcatgggccaaagtcaatgtcaggtggccaatggcatggcttcccttgcatcccaggtcttagaggcaggtggccctttgacacatccctctggaaccacagggatggcccccagcccctctctggcttcagtgcccaacagactggccgtgactcagtctaatctttccctgaacagcatggaccccagcagctcccagatcagtgtggttattccaaaaaacatagactgctggcacccttctgaggcatccatggtcccacccagttaccagcagagagatgtgattccgcaggactctctgaagagcagggctggtcgtggtgcggcaggaggttttgtagccagtagaatgagcacgggcgcagtcccaggcactctgcctggtggcataacctccagccttcccccgggctccaccatccgaggcatgggtcacagccttcccgcaggctctgtgtccagttgggtggctcccagtctgatggcagacagaaagaagccaagtctatctgtaagaccctccgctagcttagctgctccaaacttgctcccaggttcagtagtgagtcgggtgagcccagttgtcccccctggttctgtgccaatgatgggggcctctagtgtggctcagagctgctccaaggggcccatggtgattgacatcactgcccctccttacctcaaagccctggctggggagaggtctttagcccccttgcagatgccccacaccaccagtctggctccaggtcactcctcagccccggcagctagtggcacagtgaggagtctacaccgagtgcccacggttctatcaagagccttacaattgagccaagatgctaggataatgccatctggggtcacaggggaccaagccaagctaggagaattggatgaggctgtgttccaagtgtcaggatcaagtggatccaatgacctattcagcaaagccagggtcactggtgcaacccagtggatgtactccagtcctctgggagctgatgggggccatgatcataggtccctgtctgagaaagggtctcttccccaagggaggtggctcccagccatgctagtggcatggtccctgtccctttccaggccccgggtttagccactaagtccccctcagtttatcaacaggggtctgtcactcacgtcatacccccaaatcactctcagggtacagtggcttctaatgtagtctcaggatcaccccagctggcccgtggcagtactgaggctttcagattgctttcagtgtctgtgggcaggatggggaatcctagtcttcttcagaggtcagggaccaccagcatggtctcacatgtgccactatatccgtcctcggctagaagggcattgtccagtcccttccagacagaagctgtccccaatccactccagaaaacagtgtctggaaacatggctccgagcagccgctgggacgccatgggccctaaaaattcctacagatccgtgcatggtaggattgttccagaactgctagaaagttctgtggccagggttaggcccttacagtatgtgcaaagacaaccatcccaggcctcagcccgaagtggtgcaaaccccacccacaggccctctgcagaggtaaggcccgtcatccgcactggggagatgacacactcctcggtcattcctccgctggccccgggagttcggagggtgtctctaggctatgagtcttccccaagtggttccctgccacccctttttaaccaggagtcaccgtggagacggcaggactcctatagcccccagaatcctgccgttagtcacaaggcatccctgaactccactatactccagggccccgcggacgctggtgtggttggtggccaatcgtggaaccgcgcatgggagccagccaggggtgctgcgtcctgggacacctggcgcaacaaggcggtggtgcctcccaggcggtccggggagccaatggtgtccatgcaggctgcagaggagatccgcatcctcgcagtgatcactatccaggcgggcgtccgtggctacctggcgcgtcgcaggatccggctgtggcaccggggggccatggtcatccaagctacttggcgcggctaccgtgtgcggcggaacctggcacacctctgcagagccaccacgaccatccagtctgcctggcgcggctacagcacccgccgggaccaagcccggcactggcagatgctccaccccgtcacgtgggtggagctgggcagccgggccggggtcatgtctgaccgaagctggttccaggatggcagagccaggacagtatctgaccatcgctgcttccagtcctgccaggcacacgcttgcagcgtctgccactccctgagctccaggatcgggagcccgcccagcgtggtgatgctagtgggctccagccctcgcacctgtcatacctgtggacgcacacagcccacccgtgtggtgcagggcatgggccagggcactgagggccccggggcagtgtcttgggcctccgcctaccagctggctgccctgagtcccaggcagccgcatcgccaggacaaagcggccacagccatccagtccgcctggaggggctttaagatccgccagcagatgaggcagcagcaaatggcagcgaagatagttcaagccacctggcgaggccaccatacccggagctgtctgaagaacacagaggcgctcttgggaccagcagacccctcggccagctcacggcacatgcattggcctggcatctaggaccctggctccctgcagtggggacttcgtgggaggcactcatggctctctgggtctaatgaataaagtcctccacagcct

SEQ ID NO: 901 - DNA, 2280 bp, Homo sapiens
agcctaattaaacattggagagttcacactggagaaagaccttacaagtgtaacgaatgtgggaaattcttcagccacattgccagcctcattcaacatcagatagttcatactggcgagcggcctcacgggtgtggtgagtgtgggaaagccttcagccgaagctctgacctcatgaaacatcagcgagttcacactggtgagcggccttatgaatgcaatgaatgtgggaagttatttagccagagctccagcctcaatagccatcggagacttcacactggtgaacggccttaccagtgcagtgaatgtgggaaattctttaaccaaagctccagcctcaataaccaccggagacttcacaccggcgagcggccttatgagtgcagcgaatgtgggaaaaccttcaggcagaggtccaatctgaggcagcacctgaaagttcacaaaccagacaggccttacgaatgcagcgaatgtgggaaagccttcaaccaaaggcctaccctcattcggcatcagaagattcacatcagagaaaggagcatggagaatgtgctccttccctgttcacagcacacaccagagataagctctgagaacagaccttatcagggcgctgtcaactacaagttgaaacttgttcatccaagtacccaccctggggaggttccctaggaatgctagctgtgttggaagctttctggagacaagttacattctcttactgtagagtttatcagcgttttttcactgctggggttgtgatagaagccatgtcagcaccacacactgcagctctccaaagagtgtgtccaccactccactgtgctcagggaaggcagacctctcctctctctttccaatccctaaagggaattaggagtagtctgaagccttgggaagatgtcattcccgccctgtatggctggtttagccatggacatgaccagcttttggctgtgaagacctgagcagggttttgccaacagcttgttctagagaaggtttccctttttctgggacattgttggtctcatgttatgcctgtgaaggatttgtccagccttcatgttactctacacaacaacttatctcctgtgtattgccctggttcatgtgatgataatggccttatgataaagccgcctttagtcttccatgttctgatcactgtgtggggtggttcaagagcagagttaagatctaccaaactgaaggggtctccagattatcttggaggggacaggaggatggcagagaaacaactgtcaatccagatttgacctcatttgcattgccaccaaggcctcctaggaaaaattgtaggaatttatgggtataatattgtggtctgaatggcgtgaatttttatcccgaggagggggcagttgtgacaacctccagtgcatgtgggaacagcatgaattgggtcccttattcccagggggtgccccatattccccaatactgtaaagcagatgctgtttagcacctgccaaggagccatatgccctgaagttcagcattaggcaggtatctcttaactgtaagacataccaggcccagctgggaccataatttgtacagaaacactggatgtgattaatagggagtaggcgagattatagcaaaccagcagaaatggaactctgctaaatgtgcatccgtgaatgctcccttgaatgtggctgtgcaggattcagggtttgcagaaattctcaggacctcagacctctgtcctatgactaatgttactggcagagcaaataatctaaaggttttggttttgtggattaccatctccgtgctgtgcatctgaaggccagtgctgtgctggcaggaaaatagggactgagaaaaagcagatcctatactatagggactgtagtatctatgacgtagccagccattctttgctcccaaggcaagaagaaagagatgacagagtcaatatagggttgccaaatcggattttctaaaatgagtaggaagttggatttttatgtgcaacagtttcttttaatgctttgttgatatgtgattgtcatgcaataattattcatatttggtaagttttgtacatatattatgtacactcagggaaccaataccataatcatgataatgaacgtatccatcacctgcaaagctacctcatgcccctttacattccctccttgccttccctaggaaaccgttgatttacattttttactttagatttgtttgccttttctagaattaacacaattggaatcataaagtatttatactctc

SEQ ID NO: 902 - DNA, 2113 bp, Homo sapiens
ccaccagtctggctccaggtcactcctcagccccggcagctagtggcacagtgaggagtctacaccgagtgcccacggttctatcaagagccttacaattgagccaagatgctaggataatgccatctggggtcacaggggaccaagccaagctaggagaattggatgaggctgtgttccaagtgtcaggatcaagtggatccaatgacctattcagcaaagccagggtcactggtgcaacccagtggatgtactccagtcctctgggagctgatgggggccatgatcataggtccctgtctgagaaagggtctcttccccaagggaggtggctcccagccatgctagtggcatggtccctgtccctttccaggccccgggtttagccactaagtccccctcagtttatcaacaggggtctgtcactcacgtcatacccccaaatcactctcagggtacagtggcttctaatgtagtctcaggatcaccccagctggcccgtggcagtactgaggctttcagattgctttcagtgtctgtgggcaggatggggaatcctagtcttcttcagaggtcagggaccaccagcatggtctcacatgtgccactatatccgtcctcggctagaagggcattgtccagtcccttccagacagaagctgtccccaatccactccagaaaacagtgtctggaaacatggctccgagcagccgctgggacgccatgggccctaaaaattcctacagatccgtgcatggtaggattgttccagaactgctagaaagttctgtggccagggttaggcccttacagtatgtgcaaagacaaccatcccaggcctcagcccgaagtggtgcaaaccccacccacaggccctctgcagaggtaaggcccgtcatccgcactggggagatgacacactcctcggtcattcctccgctggccccgggagttcggagggtgtctctaggctatgagtcttccccaagtggttccctgccacccctttttaaccaggagtcaccgtggagacggcaggactcctatagcccccagaatcctgccgttagtcacaaggcatccctgaactccactatactccagggccccgcggacgctggtgtggttggtggccaatcgtggaaccgcgcatgggagccagccaggggtgctgcgtcctgggacacctggcgcaacaaggcggtggtgcctcccaggcggtccggggagccaatggtgtccatgcaggctgcagaggagatccgcatcctcgcagtgatcactatccaggcgggcgtccgtggctacctggcgcgtcgcaggatccggctgtggcaccggggggccatggtcatccaagctacttggcgcggctaccgtgtgcggcggaacctggcacacctctgcagagccaccacgaccatccagtctgcctggcgcggctacagcacccgccgggaccaagcccggcactggcagatgctccaccccgtcacgtgggtggagctgggcagccgggccggggtcatgtctgaccgaagctggttccaggatggcagagccaggacagtatctgaccatcgctgcttccagtcctgccaggcacacgcttgcagcgtctgccactccctgagctccaggatcgggagcccgcccagcgtggtgatgctagtgggctccagccctcgcacctgtcatacctgtggacgcacacagcccacccgtgtggtgcagggcatgggccagggcactgagggccccggggcagtgtcttgggcctccgcctaccagctggctgccctgagtcccaggcagccgcatcgccaggacaaagcggccacagccatccagtccgcctggaggggctttaagatccgccagcagatgaggcagcagcaaatggcagcgaagatagttcaagccacctggcgaggccaccatacccggagctgtctgaagaacacagaggcgctcttgggaccagcagacccctcggccagctcacggcacatgcattggcctggcatctaggaccctggctccctgcagtggggacttcgtgggaggcactcatggctctctgggtctaatgaataaagtcctccacagcct

SEQ ID NO: 903 - DNA, 3276 bp, Homo sapiens
tgatcccttggaggcattcatggctgaagtggaggatcaggcagctagagacatgaagaggcttgaagaaaaggacaaggaaagaaaaaacgtaaagggtattcgagatgacattgaagaggaagatgaccaagaagcttattttcgatacatggcagaaaacccaactgctggtgtggttcaggaggaagaggaagacaatctagaatatgatagtgacggaaatccaattgcacctaccaaaaaaatcattgatcctcttccccccattgatcattcagagactaactttgaataattggacctgcagattgactatccaccatttgaaaaaaacttttacaatgagcatgaagagataaccaacctcactccacagcagttaatagatctccggcataagctcaatcttcgggtctctggtgctgcacctcctagaccaggaagtagctttgctcattttgggtttgacgaacaacttatgcaccagattcggaaatctgaatacacacagcccactccaatacagtgccagggtgtgcctgtggcattaagtggtagagacatgattggtattgccaaaacaggtagtgggaaaactgcagccttcatttggcccatgttgattcatataatggaccagaaggagttggaaccaggtgatggaccaattgcagtgattgtgtgtcctaccagggagctttgccagcagatccatgcagaatgtaagcggtttggaaaagcatataatcttcgatcagtggccgtatatggaggagggagtatgtgggagcaggccaaggcccttcaggagggggcagagattgttgtgtgtaccccaggtcgactgatagatcatgtgaaaaagaaagctaccaatcttcaaagagtctcttaccttgtgtttgatgaagcagatcgaatgtttgacatgggatttgagtaccaagttcgatccatagcaagtcatgttcgtcctgacaggcagactctcttatttagtgcaacttttcggaagaagattgaaaagttggccagagacatcctgatcgaccctattcgagtggtgcagggagatattggagaggcaaatgaagatgtgacacagattgtggagattctccattctggacctagtaaatggaactggcttacccggcgtctggtagaatttacctcttcagggagtgtcctcctctttgttactaaaaaagccaatgctgaagagctagcgaataaccttaaacaggagggtcataatcttgggctgctccatggggatatggatcagagtgagagaaacaaggtcatttcagactttaagaaaaaggacatcccagtcctggtggccacagatgttgcagcccgtggtctggacattccttcaattaagactgtcattaactatgatgtggcacgagacattgataccctactcactcccaaggacagcaattttgctggtgacctggtccggaacttggaaggagccaatcaacacgtttctaaggaactcctagatctggcaatgcagaatgcctggtttcggaaatctcgattcaaaggagggaaaggaaaaaagctgaacattggtggaggaggcctaggctacagggagcggcctggcctgggctctgagaacatggatcgaggaaataacaatgtaatgagcaattatgaggcctacaagccttccacaggagctatgggagatcgactaacggcaatgaaagcagctttccagtcacagtacaagagtcactttgttgcagccagtttaagtaatcagaaggctggaagttctgctgctggggcaagtgggtggactagtgcagggagcttgaattctgttccaactaactcagcacaacagggccataacagtcctgacagccccgtcaccagtgccgccaagggcatcccaggctttggcaatactggcaacatcagtggtgcccctgtgacctacccgtctgccggagcccaaggagtcaacaacacagcttcagggaataacagccgagaagggactgggggcagcaacgggaaaagagagagatatactgagaaccggggcagcagccgtcacagtcacggagagactggcaatcggcatagcgatagtccacgtcacggagatggtggtcgccatggagatggataccgccatccagaaagcagcagccgtcatactgatggccatcggcacggggagaacagacatggaggaagcgcaggccggcatggggagaaccggggtgcaaatgatggtcggaatggggaaagcaggaaagaagcttttaatcgtgagagcaagatggagccgcctaaacgcaagaaaagtcgatgggacagttagaggggatgtgctaaagcgtgaaatcagttgtccttaatttttagaaagattttggtaactaggtgtctcagggctgggttggggtccaaagtgtaaggaccccctgcccttagtagagagctggagcttggagacattaccccttcatcagaaggaattttcggatgttttcttgggaagctgttttggtccttggaagcagtgagagctgggaagcttcttttggctctaggtgagttgtcatgcgggtaagttgaggttatcttgggataaagggtcttctagggcacaaaactcactctaggtttatattgtatgtagcttatattttttactaaggtgtcaccttataagcatctataaattgagttctttttcttagttgtatggccaggcagtccccattttaggagttggcttctgcaaattcaatccattgagctaactgttggggagcaatttggtagttgtagacatttgcagggaagggagatgtctgattctaaatgagagttgatgctcaggtccccagccaggtttgcatccagccctgagacatgtaggaaacacctttcagacccaggctctgaagattcccagaagccacaaggattgaagggaaaaggtgatcctggtaactgttccaggattgctccaggtttgagatggtattgctaaatttaaaattaaacaagagacccaacaacagcttttaaagtgtcttctatttcattgtatttttttaacttgccccaatgatagaaaagtcttttgctgaaatgattttgatgatttttgtttatcgtttataaaaaggaaaagaaatatacaaactttgacttttgtgactttgtgaaggtttctttaagatgtgcattcctttctgcttgctctctagtaaatgttttactaccggg

SEQ ID NO: 904 - DNA, 2335 bp, Homo sapiens
gtagtaaaaatccagtctgaacaaacatgggaaaagtcagcctccctcctgccccccttcccgcccaggcaggccaggcagcagcagtaatgacactgactgagcggcgggcactctgttgtcctggggccgggctgagagcgctggccagggtcatctggttccaggcagtgtctccccttggccctgtgaccatcccctctgcacagcaggctgcaccagcacttatgtccccacgtcactgccctgagcgcctatctgccacccctgggccgctgccgtgggtgcagggcagcccttgctgggagggagtggggtgagctggccctgtccagcctctgtcctcgcccccaggtgcagtcggctgccctggacgagatgttccagcaccgtgagggctgcgtcccacgctaccacaaggccctgctgctcctggaggggctgcagcacatgctctcggaccaggccgacatcgagaacgtcaccaagtgcaagctgtgcattgagcggagactctcggcgctgctgactggcatctgtgcctgacctttctggcctggctgggccccccgtcctgccgagccctgcagagtgggctctgtgtgctggctggactcctcgggacaagcccatggcgctgatcgctggtgctgagccctgccctgggccccacggacagtcagcctgccggcctccctgcagctcacggggcagaaccagcacatctggagccacacagcttggggggtgtctcccatcttttacaggtggggatcacagaatttctgcccctccagctgcctggctcagcaggcgtgggtgccaccaccctctagccccagggcagccccggaggacaggcaagggcctgagaccactgccgactcaaagccaaagcgagctcctgcttagggcaggtcagcaggcactgtgcccaggaagagcctgcggcctcggcgtcccccagtctccaggagcctctccctccgagatacccacccagctttgtcaatcacccaagcactttatgcatatagagacagaacctggacctcaccagggactgctgggcagcgattcctggcagtggcctggtgtttgtacatacacatatgcagacacatgccagggccccccaagcccgagcaccggaccacgttgctgcccaggtctggacctcagcgggagaactggctccggggggagtggggccctgcgctagaggcagaggcagttctttgttcaagcgttcctctggggaccggcagcagaggcaccgtgttctctcagccctggatacgtcttgtaatctttcacactttattcctaaaacgtgtcttatttttatgcagctcattttttctttaaaggagaaaacttgtaggtgtttaagaattggttttgggagggcgaggactgggccaggttagaggcagatggcacaggggcgtgtggcgggcgggtgaggctgctttgcacacctgtgttggtggctgtcccctgccgcccctccctgtggcagcagcaggacaggtgtgtgcccagcaccctccctacctgggcctggaagcagatgaggggaatacttcatgcaaagaaaaaagtaacatgtgcaaaagctccccgtccagctttgacagtcagttttgatgtcagctcctcggcagggtaggcctgatgacagccctgtccctccctgcctctgccttgcccaaggccacggagggcgtctgcagagaggcctgccttccggattccaggcgggcatgccctgcaaaccccgcctgggcctcccttggtctgcccagccctcggttagccctgcctgaatcagtagatacttgaacgagtccccagtctgcgggaggcagtggtggggccatggacccatgcggggggttccagggtcacacgccacataacagacaaaaatacacacacgtgtgtttttctttgcaatacttgaaatattgccactgtgcttggacttagaagaagaaaatccccgtgacttcttcctcatcaccttgatggctttattctcaccttgtggggcatgtttgtatttattgcttcatggccgactggaatcctgagtcctgggaagctggcactgcggggatcttgcccggtgtcctggtcctctcgcttccgtcgcggccgcatgtgcgtgtgtccaagcaggtcctgggcgcctcaactgctgcccctggttgaatgttctcttgatagtgctggaccctttgtctattttaaagcgaattttgtgtgatttcctgccctttgcgttatattgtataataccaacgtaaggaaataaacctttggaattgtt

SEQ ID NO: 905 - DNA, 3004 bp, Homo sapiens
aggttgtatctttgctgagctgacaacagatttctctatggatcaaatattctaatcaaggaaagatacggtgaaacttcagtcttcttctggagaaatgctgaggcgagattagtgcagctacattctgagttgaaggaaatgcagtgttctgagggcccctttgtgtcctgatggctggaggacgcttcctcctggttagatcctcaagctccttgcctcattgacaaatgtctcctagtcccctttttccctctgactctgaggaactaaatagcttgactatctctaaacagagactggccctgccactgaccctcctgtccctctcatagcataccctgacagatactcaatagaaaacacctgcagaccatgtgcacacttaactttcctgcccaacctgcctccccaacggcccatgctagaatagcttgtgcccagaaaacaaacggtgacacttcatctcttcagcgtcagaaaatgggcatagaatgtacccatgcaattgaatgtatctcattctccactggcatagtagatataaactattcctttgcctaccttttactgccttatcctggaaatattggggaaaataagccatatcagtgagatttacctaaaaacaaaggaaggaaagtcactatggaaaccaagtagatgctttttgtaagtttggtggagcataactggcccagaagtctgggtgcctgagttctagttcgtgctctgtcaactggtagatttgtaattctaggtcttggttttcttacctggtgaataagtcatgatctctaaaacccttcctgcccttaatattgtctgaatttcaaggggaaaaaaaaaatctggttcctttaattatttttttttaacacttaaattcctaactttattagacaagaagtatggcccacttaacagttaaggaacgtaaatttgttattggctcgaaataataatttgacacaatactagtcaaccatttagaggccttggaaaaagaagaggaacagcactgaaaattccaagtatgattggaaattatctgggagcggggaattaaatattcaatgcatgaaagcaattgtactggcttctgggaaaaaggaaacaagaacattgctatggaacttgttacccagagaaaggaagtgaaaagatttacaattataagcacgaaattcattggcagattacctgctttatctacagacagattgttttggggtttggttttgtctaggcagcctctggccaggctccttaattgcttgctctgctaatatttcagcttcctctcttgactccttgaggaaccaaccgctctttggaagacaaacacttagccacctctgtgctccagggtaaccctgagaagctctgctgtctggggcaagctttctttccaaagggaatgagaggaaggcaagcaggcagggtcctgcagcgtcaggccttctggggaaagtttcctcattttgtttgacagggtcctcagtacatcagacacccagatttgaatataagttcagagcctgatctcaagctaaatcagaatgctttggggactaaccatgatcgagaattggccaaatagtatggcatataaacagccatccagccagccgcaagtaaaggaacgtttgatccttggcaccttaaatgattgattgccttcaataggcaaactgctggtctggaaatctcgttgaaggctgaatacttcatgcggagtaggacaagccttagcccacttcaggttgaaaggaaaggccataggactcaaaagataatgactctgaaactaaactccttccttctgaagctgacagaggtacttagtgcatctcaagactccatctcataaaactcatttgtgagggatttgctctagatttttctaaacattttttcatctattgtccagacttgcaaatccagtgtggacctgatggagatacccttcacacctgcactcccaccccctcggcagggagacgtctcagtagaggagaacacacccattatgctgggatttgtatttataaatcacttcccttttagggatgagcggtgtggggcgtgtgtgcgtgtgagtgtatgcgcgtgcgtgtgtgaccctcaagtgtactttgctcaatttagacgtgcagtatttccagaaacaatgaaaaaagtaagatgttttcttctttatgattctgctcaaaacaccacgtgccgcctcagagctttttctagagcctcggtcctcaatgacgcgcttgacctgttgatgcctcagcccagcgaagcccctcacctgtgccccgggcgacagctcttcagtgtgcagtgcaggcctggggtggactgccaggccttcgctctgtgccagcaacgccgttcttgttgctcctccatgaacaggggtacaagccctggcccctcctcgacactaagccccccacagactcagcctccaaggaaccgctgagcacccttgaagcatgtcattgtcagtgatacctttttattctatggaactctaacctattcgtgtcatattgaccttttgctgcatgagtcataaattatgaaatcagtcttacagtttttgaaatgtagccagcatttgtaaggctaaacctttttcatgaactgaatttaagtgaataaccaagccacagttcctcctcaaatggagagtgatgatcgacatttgaatctctttgccctttccaacggctatggcatcaggttctaaaataagctcgtaatttttcctgttattttaataatatggaaatattagcatagtgtttcttttgatagtgatagactataatccatatttaaattttatagagaagaaattttattgtactgtgatgtagatatttattatccaggtaaggatttgcccggtgtgtattttttacaattgagacattttactttaatctttaaaaaaaatgcattaaaaacacactcaaaaaaaaaaaaaaaaaaaaaaaag

SEQ ID NO: 906 - DNA, 2651 bp, Homo sapiens
cggaacatttggaagaaatccagagcaagcgacaggagcggaagagaagaagcacagccaaccctgcctacagcggcctcctggagaccgagaggaaacggctggcctccaactatctcaacaaccccctgttcctcacagcgagagccaatgaggacccctgctggaagaacgagatcacccacgatgagcactgtgccgcctgcaagcgaggggccaacctgcagccctgcggcacctgcccgggggcctaccacctcagctgcctggagccacccctcaagacggcgcccaagggcgtgtgggtgtgccccaggtgccagcagaaggccttaaagaaagacgagggtgtgccctggactgggatgctggccatcgtgcactcttatgtcacccacaagacagtcaaagaagaggagaagcagaagctgctgcaacgaggcagtgagctgcagaacgagcaccagcagctggaggagcgggaccggcggctggcgtcagcagtgcagaaatgcctggagttgaagacaagcctgctggcccgccagaggggcacccagtcatccctggaccgcctgcgggccctcctgagactgatacagggcgaacagctgctccaggtcaccatgacgaccactagccctgccccactgctggccgggccctggaccaagccctcagtggcagccacacaccccaccgtccagcacccccagggccacaactgaccccgagggaccagtcttcatacccacggaaagttattgggaccctgcttacacagcctgggggttctgtcggccttaattcataaacactatgaatttcagacaaaaattaaccagacagaggagaggagggaggaagagctgggcgagaggcctagagccaggaccaggtgggggtgcggccctgtgccctccaaattcacagggggtacctaggagccaggtggggtacgacaggctggggcacacagtccccccccggccacctcggggctgcctgggcctctggcttccaggccctgctctccacggcctccctctggcccgttggaggggcaggctgaggctgtggaggggacaagcacgccccccagaacgcagtctccactgagggcaccgcctattggtgtcctgtgggagggcgagctgagaacacatggactagctgagtggtagcggtagttggaacgagaagcggggtagtggatctaggtagttcctcaatgccccacgctcctaggaggtccccctggggtgggcgggcgggcctggggcactccgtcgcctttgcagaaccacctgggcccctttctgtcagtattattagggttacgaattgcagctgtttaacttgaaagacactgtcggaggtgagcatctgggcgccgggacgctgcagtgatccccgccagagcctgtgcccttcctgctccgtctttggggtcctcaaggctgcctccttccttttgccaatctcttggactcagtttgccgttgaagcgtttttctcatggagtttctgggcagagtggagctgcaaccctgttgtggggggcagcatttggcaggttttctctttggggttgaatcattcaacttaacgactgaagccctttcttgtctcctttggaagagccgataagtattccactcctcccttcttgccagtgcagacactatgccaaaaaaataacttcacacttttgtatggcgtttttattgtgagatatttaatgtgaatggttggggggactctggctgacttcctttctgcttctagtagtctctgcttcaaggtacaaatgggaacacctcccctcgggaagcctggccaagctggaagatccggcaggttttttaagagccgggtggagggttggggaggaaagaaagggcggtggcctcgggaggttccggccttcggggaccagacttgctgccaagggcttctgcatccagggtgggcagtggcagcttgtcaccctcgcccgattcccacatcccagtcctgagggactcagcacaacaggataagcgtccaggagccacgggctcccaccccgagcatatcacatggtgccgaattgcactgaacacgcgtgtgtgcatcgcacgcggccacgaccacagacacgcatgcacacacgcagaggtgcagagcgaggaggccggcaaatcccgcagctgccacggtccctcctgtcattctcacgactccgggagaaactgtgctgtatgatacagatctattttaatacacttaccactgggtgaacaggatttttatattcttttattgatgaacaaagtgaaccatgtgagccacacgtcttctatattggctactctgtgccaagtatgcattaccgcgtggcttgcggtgtccatgtcttcagcttccttttctgttggtttggttttcttcgcggatggattgagttacatgttttaacagtgtaatgggaggatctgaaaggttggacccgggaggggtagctgccgatgtgtcttgagattgttaggttttttttggaccaaggaggaccgtccagtgggtagtgaggatagagaaaaagtgtttgtcttaaatacgccaatgtagttttccttctttacaatgtattaaactcgatcgatgatttc

SEQ ID NO: 907 - DNA, 2273 bp, Homo sapiens
ctgcgaagcccacgtcgacccctgtcactccgccccctgcgcccgtggccgctgtcacacgcaccccgacggccgcttcgagtgccgctgcccgcctggcttcgggggcccgcgctgcaggttgcctgtcccatccaaggagtgcagcctgaatgtcacctgcctcgatggcagcccatgtgagggtggctctcccgctgccaactgcagctgcctggagggtcttgctggccagaggtgtcaggtccccactctcccctgtgaagccaacccctgcttgaatgggggcacctgccgggcagctggaggggtgtctgaatgtatctgcaatgccagattctccggccagttctgtgaagtggcgaagggcctgcccctgccgctgccattcccactgctggaggtggccgtacctgcagcctgtgcctgcctcctcctcctcctcctgggcctcctttcagggatcctggcagcccgaaagcgccgccagtctgagggcacctacagcccaagccagcaggaggtggctggggcccggctggagatggacagtgtcctcaaggtgccaccggaggagagactcatctaggccagcctggctgctggcaccagcacctggaggtcctgaatggtttctacctggagacccaaggaagctgcttccagggctcgggacattgctacggaagtgtccccttggctggcagcctctgcctctgcctctgccccatcctggatggaggacgaggggagcaactcagggaaacagaggcctagagaggctgcggacttctccatcccaccctcggggttccgccttggcaggtgtacggctgtgcgtgggagggcacacgtgggttcacagtgtgttcaggagtgtgtgtatctggaggagtgtgtgtgtgagtgtgtacctgggcctgtgttagtctgcagatgctagtgtgagtgtgtcctgacatggctccagggcgtgtctgccgtgtttactgtgtgtctatgactgtgatgggtgtagctgatcccaggaggtggcggctgcgccatggggtcaaccattacagtcctagggcaggggcggcccaaggctgcatgttctccaggaggccaggccggggttgcccaggcacctccttccccgcctctgggggctgctcctgctgtggaggcagctgggaagtcagggaaggccactagcagaggctgagtgggcttctggctcctagaacaaatgtcccttcaggcaggtctgtctgccagaggccagagccagtcatgcgagggaaccacagacccacccgccccctcagccggagcagcccgagggagcagaggaggggctgcctggagcttcccaccctgctgtggtcatttgtcaaagggggaaggcacccactgcctacctcacagggctgttgtgaggatcagagaggacgacagtggggaaagaatctggaagtcttcaactgccgtctgatgggaaggaccgtctgggtgtccttctgggatgaggatgacagagcaacccttctcctgccctgaacccccccagctcacctgaccacctctggttctccagctccggtccttcctagcagcctggtgagctcactccttcccctgatgactggctgcctctacacagactcggcgagaggacttgaaggaagccctctgggttgtctgctgagtacaggggctcagtgaacactggcgctgcctctgagtcggggctgggcctgcagaggccgactcagaggagactctgctgcttgctcccagccccttccccggcgatgcccatcacactgtgacctcccatccctgaagggcacctgcctgagggcctggcctccttccagcttcatggacctggagatgtgccctttcatccttcctgcttcccaggccagtagatccgtttacacttttgggtcgacagtcagcttttccttttggttttggcgggtcccagaggcatgggtgtccagtccaatgtggggagccacgtgacaacgtgggggactgggacatgggactgggaagtcagcagacgctgggatagagagggccctgaacaccaggctcaggggcttgcttggtccttatcctgtaggaggtgggaccacctttccctgaactttctctacaacccttgggagcgtggggaggaggcggctggttccagggtcagtttactaagttagagatttggaaaacctgtgtcagctgtaactcctaggatattttatgtggaacctaacatgcagatg

SEQ ID NO: 908 - DNA, 2387 bp, Homo sapiens
atctctatgcaaataaactagaaaatctagaagaaatggataaattcctggacacatacgtcctcccaagactaaaccaggaagaagtcgaatccctaaatagaccaataacaagttgtgaaatacaggcagtaattaatagcctaccaaccaaaaaaagcccaggaccagatggattcacagctgaattctaccagaggtacaaagaggagctggtaccattccttctgaaactattccaagcaatagaaaaagagggactcctccctaactcattttatgaggccagcatcatcctgataccaaaacctggcagagacacaagaaaagaaaatttcacaccaagatccctggtgaacattgatgggaaaatcctcaataaaatactggcaaactgaatccagcagcacatacaaaagcttatccaccatgatcaagtcggcttcatccttgcgatgcaacgttcgtttaacatatgcaaatcaataaacacaatccatcacgtaaacagaaccatgacaaaaagcacttgattatctcaataggtgcagaaaagaccttcaataaaattcaacaccccttcatgctaaaaacactcaatgaactaggtattgattgaatgtatctcaaaataataagagctatttatgacaaacccacagccaatatcatactgaatgggcaaaagctggaagcattccctttgaaagccagcacaaggcaaggatgtcctctctcaccactcctattcaacatagtattagaagttctgaccagggtattcaggcaagagaaagaaataaagtgtattcaaataggaaaagaggaagtcaaattatctctgtttgcagatgacgtgatcatatatttagaaaactccatcatctcagcccaaaaattccttaagctgataagcaacttcagcaaagtctcaggatacaaaatcaatgtgcaaaaatcacaagcattcctatacaccaataataggcaaacagagagccaaatcatgagtgaactcccattcacaattgctaaaaagagaataaaatacctaggaatacaacttacaagggatgtgaaggacctcttcaaggagaactacaaaccactgttcaaggaaataagagaggatacaaacaaatcgaaaaacatcccatactcatggataggaagaatcaatattgtgaaaatggcgatactgcccaaagtaatttatagattcaatgctattcccatcaagctatcattgactttcttcacataattagaaaaaactactttgaatttcatatggaaccaaaaaagagcccatacagccaagacaattttaagcaaaaagaacaaatctagaggcatcacgctacctgacttcaaattatactacaaggcaacagtaaccaaaacagctgtatagaccaatggaacagaacagaggcctcagaaataacaccacacatccacaaccacctgatctttgacaaacctgacaaaaataagcaatggggaaaggattccctatttaataaatggtgttgggaaaactggctagccacatgccaaaaactgaaactggaccccttccttacaattcacacaaaaattaactcaagatggattaaagatttaaatgcaagacctaaaaccataaaatccctagaagaaaacctaggcaatactatttaggacacaggcatgggcaaatacttcatgactaaaaaacaccaaaagcaattggcaacagaagccaaaattgacaaatgggatctgattaaactaaagagcttctgcacagcaaaataaactatcatcagagtgaacaggcaacctacagaatgggagagaatttttgcaatctacccatctgacaaacggctaatatctagaatctacaggaagtttaaacaaatttataagaaaaaaacaacctcatcaaaaagtgggtgaaggatatgaacagacatttttcaaaagaagatatttatgcagccaacaaacatatgaaaaaacgctcatcatcactggtcatcagagaaatgcaaatcaaaaccacaatgagataccatctcacaccagttagaatggcgatcattaaaaaggcaggaaacaggtcgggcgcagtggctcacgtctgtaatcccagcactttgggaggcggaggcgggcagaccacgaggtcaggagattgagaccatcctggctaacatggtgaaaccccgtctctactaaaaaatacaaaaaattagccaggcttggtggcgggtgcctgtagtcccagctactcgggaggctgaggcaggagaatggtgtgaacccaggaggtggagcttgcagtgagccaagatcacgccattgcactccagcctgggtgacagagtgagactccgcct

SEQ ID NO: 909 - DNA, 2589 bp, Homo sapiens
agcaactcagaataccacccggaagcaagccgctggccctgcagactctccaccttagaacagctgtgtctgtgacaaggacctcgctgtgtcccttactgccttgggggctaggagtggctggggtgtgtgctgagggcccccacagagcctccgcttcccctgcagtcctcctgcccctgctcgagtcttgcagtgtgcggcccgacgccagcgtttccagtcaccgcttctttggacccaatgctgaaataaggtaaagagtggctggtggtgcccatctgtgggtgcctgtgggttcggagcctgggagccattttcactcatcctgagaggccctgagggacctgcttccagcagcaggaggggctgtggtggcggcctcggggactgtcatttgacatgggacggctctggagccctcatctgtgtggaaaagtccaggtgggacagctgagcagcctccagcttaaaaacgaggctcatataaagagggtgccaggcgtggcggcacatgcctgtaatctcagctttttgggaggccggcttgtgcctgggaggtcaaaggtacagtgagctgtgtttgtgctgctgcactccagcctgggtgatggtgagaccccgtctcaaaaaacaaaataaacaaagagggagcaaacacaggagaaagtgcacgccttggggtcatcccctggccctccagggctcgccctgtgtgcacgcagatggacccgccctgggtgcattttcacatttctgtgacgtcagtcctgcttcctaaagaacataacctgcccaacaggctcacggcacatacctgtgtgccccagccccacgccctcaggccagcagcccaggggcctcctttcactccaggccacagggcactccctggaccccccgtctgcccatccatggggctctgccagcctcgaggcaggctgtggtctgaagaggggttctgctcagagcccttgctctcccccagccagccccctgccctgagccagctggtgaacctgtaccttgggaggtcacactttctctggaaagagcccgccgccatgagctggctggaggagaacgtccacgaggttctgcaagcagtggacgccggggacccagccgtggaagcctgtgagaaccggcggaaggtgctctaccagcgtgcacccaggaatatccaccgccatgtgatcctctctgagatcaaggaagccgtcgctgccctgcccccggtaagggagaaaggctgaaatgggagctctgtgtaagccggtcacatgcacgtcccttctgctccgggcggtccacatgcaggcgtgcgtggtgcgggctccctcagcagcccgggttcggatgcttgttgttttgagagagaaatcctttggggctcagagcacaagctgagtcgtcaccgtggtgagctgctccatccgtggtcttgtgagcgcgtggtgcggctgctgggggattctctgtagtcgtggggtgtagtcctgctctgacgcctcctgtgctggaggtgccgtttctgtctcaaaacctaaggagtttgtactgttgttaagggataagatagaacgagtgagaaaaccagcaagtcagagggtcgcaggaccgtggaccgtccactggggacagcttagtgcctcctggtttaacttcagctgctctgcgggcccttatgaccggcatggctggctttgtctggggctgtgagcttctgactctcctcagtagagtggcagcacgtggcactgtgcaacccgagggcagctcagggtccctgtagcctgcatttgctgaagtgggagcttctgacacgtggtgaagatgttggcaggcttgagcggcacgtgacccccttccttccccaccacacactctggtgtgcagggcagacgccgtgcaggttcatctcgactcccgtgagtgtcctggtggcagaaggactgtcccaccctcacccaaagctcgttggtacaaaaagcacagccgtttctgtcagactctgtggctatctctcagcagatgcatccagtccatgctggagtcgacagaaggactctgctgggagaggtagaggccccctggcagcatctgtagcatcttcgttttatgtccctttctgaaggacgtgaccacgcagtctgtgatggggtttgatcctctgcctccttcggacacaatctactcctacgtcaggccagagaggctaagtcctatcagccatggaaacaccattgctctcttcttccggtcactgttgccaaactataccatggagggggagaggcccgaggaaggagtggctgggggtctgaaccgcaaccagggcctgaacaggctgatgctggctgtgcgcgacatgatggccaacttccacctcaacgacctggaggcgccgcacgaggacgacgctgagggggagggggagtgggactgagcgtccgcagaggtgaccgaaaagccgtatgatgatgttcccgatttctctgttggtcggagtcggccagttgcctgaagtagggaagctgagtgtgtcgctccctggtccactgtttctcctataaatgtaaatgggtc

SEQ ID NO: 910 - DNA, 2096 bp, Homo sapiens
aatgctaggcggagccaccgtcttttgcagaacaattgtgcaggttccaaagcctcggaaaaccggagaggcgcatcttgccggctacggttgaaacccgttcactgggtgattctgaagctagaagggcagccgaatggccttccccccgtcctgcccctcgtccactgtaagctcaggggggagcgggacccagggaggtgaagtgcacagactcggcagaggcggcgggcagaaccgcgggggtgagagggcgcggtggctgtggggcgggagccgctgctgaaaggaggcctgggttgttgggagggtgactgtccgtggaatctttggcggagggtggtttggaagaatggcgaggggagagcagaggagaaggtggtgaccctgatcgtcggccaggggagagtaggctgtgctgtccctcctctccccttatgtggcgggggacatacagtggtcaggaagggggttctccctggaggaggctagtccaccacacttcggctccgctgacccctgcgatttctccacatgcggggccctcgtccgcggtggtgtttgcgctatccggcggctgggttcgcgcactcactctcctgacatgccttggctcaccgccgatgtggatatcgccgccagggacccttcccgccctcctacgaatcttgagtgcgcttccttggtgttctcaccgaagcttacgaacagacagatgtgagctctctgtcttttacacgctgaatttggctatagcaaaaaggccttgaccaagagcttgggtctccttcggacctgcacacgactccccaactcccgcctgcaacggcggctcttggatcccgggcaggcagcgtccacccagcgtggaaccgtggcagccgcagcccccgcaggttggagggcagacactagcaggagaaaggccacaaggcctgcgtggtgggaaagcatgggagacgtcgctttcctaccgggcgagaaggtctccctacagtctttggagacaagatggagggaggcaccccttccaggaacaaggcggctgctcctgaggcctggctccgcacggaggctcctgggtcccgcgcgccctctccctacccgctgtagccagagctgcttcacatatctcaaccggcctcctcctcctccccagccgtccttgggacagcaaggcccccagcccgtgggaaagacctagcctcctctccagcgcttggagagggagttggatgcacgtctcttaaccccaggaggacagagaccctgaggcaggaggggaccccttcccttgctgcttctcttggcacagccggtccagggggctggctcagggcccaggactcctcgctcctcctggagggcctgggtcgcgtggcccaggagctggccacatgggcatctcccgcactgctcctcagggaacgggaggcattatcctgcagggcccactcttacccatgaaagacactcgggaaatgctcctgcggaagctggagctctgcgcgtttgaccacttagtctgtccgcccatccttccttcggagggtcttggggagagaagaaatgctccttcggagggtcttggggagagaagaaatgctcgaggacgatgcgctttgcagcgtctctaccaacatcagaagaaagcagggcgcgtcttcctggaagaaggcggccggaggcctgcggtcgcagggaggcttgcggggcaggaacgccctatctccgccgtgctatccagcggcttgcagcatcccacctggcggactcctcttcctctctcttctactgtggctcttctatcctggtgtcccttgaatgcctatcttccttttgtgcctccaaacctctcacgcccgccccaagttactcatttccttagttgttctgaactttaaataaggtaatgcatgtaagattgcataaatgctcaataattgtcatctgttattattttcatcagtaacatcatctgaatcatcagtattgtctatttttaacagctgcatttttcattgtccgaatatagtcacatacatttgaacattttataattattgaataataaattcgttctgctattttacaat

SEQ ID NO: 911 - DNA, 3178 bp, Homo sapiens
aatacactcaaaaagcagaaagcctgcaggatgcttcttgggcttttgttgcggacgaataggctcggctattcttgttgctgaagaatagcctctgctggtgtggaggagggaagctgcccccggattagacagcaggatgacaaggaaaaaggcagatgcgccctctcctggtatctccgaaggattctgcttcgctgtctggacctcctgctgcctggccaagcctgactctcaaccctgcccctgaggctaaccccaagagcagggcagagaagcaagcaagtcagcgactgccccagacccaattccgggccctcgagttggtgtggtgtaggaggggcagatgaggctagaggctgctttataaggagcagaaaagacggtgtcacagctgtaccctgggatcggcagaaaagggtccccccggggcctgtaaggggtgcctgcgtaacaggtgacttgaatttcaagtgattatcatataaatggaggattagaaaagagacaccaactctggaaccagttcaatggaattcttcaagagactgtaacttagtgcttacaaagacttggaatgatctacactgcatggtgtacctgttagaggaggtgacatcaaagctttaggtactgagagaggatacttcctactgtggaagggaagaaaagaaaaaagcaaagctacttcttggaagagcagtggagagaaaaatattgtttctttttcttgggaaattggcagaggcatgctgaagaaatcagctacagctgttctccacacctggataaatttttaataagaacttaacacacccgccctccagaaagggtggtctgaggtgtcgatggtgttgtctctcccagggctcttctgggcagccttctctgtgacctggagagcgaagagtctatttccatcacatttcagctgccaaactcccctttaaacgatggatgaaaattataacctcttgcctcacggagtcaatttccaagatgccatcttcccagacactcaagagaacagaaggatgttttctagccttttccagttttcaaactgttcgcaagggcagcagctggcgactttctccagtgactgggaaatccaggaagacagtaggctcatgtgctcctcggtgcagaaggccttgtttgaggaggaggaccacgtcaagaaactgcagcagaaagtggccaccctggagaagcgcaaccggcagctccgggagcgagtgaagaaggtcaagaggtccttgcggcaggcgcgtaagaagggccgccacctggagctggcgaaccagaaactcagtgagaagctggcggcgggcgcgctgccgcacatcaacgcccgggggcccgtgcgccccccctacctgcgggggtaacgggcctgggggctgccaggtgtgcagggccaatcctggcggtaattgagaatgagtgaggtttcgtacatgcagctatttcaagggttgtaagagtttttgtttttaatcacgcatttggtagagtctaaatggataaaatgcaaggcttgctttccccttgggtgctggcctcaatgtcagaccccacgcgctgccccttcctggcctgaccccaggcgcagtgcctggcagtccagaggcagtgggatccctgagtgctgaatgctcgcctgcagagcagcccagaaagagccctgactggggagagaacattttagaatctctagtgtaaaagacatcaacgtgcttagcctttatttcagaaaaaaatcagggtggttcccagctccccagtccaggacaaccattagtcctgatgagtgagctgacgctggtgctggaacctgctggcacctcactggccacatctttggaaggggatggtggccttgcatccaagatgcctgaaaatcagcacgtgcagggcctccctatccagccagcattttccttccagctgaggcaggtgaagacttcataagctcatcacaggggagggaattaggagcagggcagcaggtaattaaacaagataaattatacctgatttccaacgccagctacaaagagttgaagatgatacctatgggtcgcgttaacacagggggcaactgccttgatcggcctgccatgggtcatcagactgcttcctaaattgagagaaactgagcaatctctcagccactgctatagtctaacttcttgtttgctgagtaattgtttctaatgtctctgaactcaaagtgaggtgctccaagacgctgtgaacttctgcaaagacacctccttacctactggggtcacgtgacctgacctcactcccagccaggctcccaaagggctcattccagccattccaatctcttcttctttatgcaaacacttttcccccacaacaagccttgtttgttccgataggaatacgtgtacgtcagtgcacttgtccttacgtcagttccttacaccaccaaagcacttcacctttctggaaataaaacttttaagacactactataagtaaaagtgagagtattcactagacttattgctcaggcacatttgagtgggtcccagctgtgtgattaagaagtcaactgggtggccttttctgggttatcttctgatcatggcctttcaacccaacaagggcccttccctgctcttccaccagtaaaggctcctggcctcttatcaggatctgccccccagagaccccccagacactgcagggcctggtgatgctgtcctctgtaccggaaatggcaggcactgtcagatttccactcttctgcctttaggaaggctgggtgcttcttgctctgacagccagtctggggagatgactcttacgttgcttgagtcttggtggcaggctgctgtccacgggggagaagtctctgctctggactggacagaagagagacttttaccctggggcactcacacggccaagcttctgccaccacttcattagctgtattctccatagtatggtgaaatagcaggtgcgtcttctagtttattcctcctggggacatttcctcaaagcagttttgcgcccccgcaagggaatggtcagcctaagggtaatgtacagcccgtgcttggagaaccatggaagctacacccctacaggtgcatactgttctgcttttccaataaatacgagcggcgatttcaaccac

SEQ ID NO: 912 - DNA, 2277 bp, Homo sapiens
atgggaccttcctgtgtcgctgccaccagggctataagctgcatcgggatggcttctcctgcagtggtgagagctccatccctgctgtgtactcctctgtggacccccaggccctagctatgccgtgcctcctgccacacagttctccatttgaggcctccgcctcctgtcactgtgcacccagctgcctcctgggtactcgaccccggctggctgtggagcactcccaggctagtgggggaggcacaaggagaggcagctacgtccttactgaagcctactggtgagactgaggatgtgggtgccacctgtcccacatatcaggctcacctgcatttacctgcatttgaattttgcactaggacaagtcactcctctctgagcctgtttcttcttctataaaatgggttgtcttgaggattaggtgagagtgtgatagatgggctccagcaagtctcaagctgcagtgctttaaagtgaatgaactgccacttaatgagaacctgccctcgtagtgtattccctgacacacttggcctccttcctctcaagaatcctaggaggtatgattttctccttcctctacaaaatgaggacattcatatctccctccacgtttgttgggaggattacataaaaataatcacaaagtcctgggtaaatggtgactttcatgattcagctaagagaggttaagtgacccgcccaagctcatacagccaggatgagatggggccagggctggatcccagacttcttacaccctgtaaactggcatgtaccccctatgttatgctttgctgcgggatgaggcctcactgctacctggcagcatgaggggaacaagagaaaggaaatgttctgcctgtgaagctcacagttagttggaggtgaccactgggtgctcaggttgactgtgggttgcaggaattgggcgttacagcacaagccagacccataagactcatctagtctaacacactcattttactgattgggaaaatgagattcccctagatcagctggtgggattcacacccaagcctctagattcccagtaacttatttagtgtttcttccagttctgggcagagagaagtctgtgagctgcggcagcctgggcaaactttctttgaaccctccatctcccggctgaacttgtggcttgtctcatccccctctgtcttcctacattcagtctaacatggggctgggccttcttgggaaatgtttgtgggactgaatggtgaggaatgcccttgacccggggtccccatccccatgcttcctcagatattgatgagtgtagctactccagctacctctgtcagtaccgctgcgtcaacgagccaggccgtttctcctgccactgcccacagggttaccagctgctggccacacgcctctgccaagacattgatgagtgtgagtctggtgcgcaccagtgctccgaggcccaaacctgtgtcaacttccatgggggctaccgctgcgtggacaccaaccgctgcgtggagccctacatccaggtctctgagaaccgctgtctctgcccggcctccaaccctctatgtcgagagcagccttcatccattgtgcaccgctacatgaccatcacctcggagcggagcgtgcccgctgacgtgttccagatccaggcgacctccgtctaccccggtgcctacaatgcctttcagatccgtgctggaaactcgcagggggacttttacattaggcaaatcaacaacgtcagcgccatgctggtcctcgcccggccggtgacgggcccccgggagtacgtgctggacctggagatggtcaccatgaattccctcatgagctaccgggccagctctgtactgaggctcaccgtctttgtaggggcctacaccttctgaggagcaggagggagccaccctccctgcagctaccctagctgaggagcctgttgtgaggggcagaatgagaaaggcaataaagggagaaagaaagtcctggtggctgaggcccaggggcccccattgacaggagctgggagctctgcaccacgagcttcagtcaccccgagaggagaggaggtaacgaggagggcggactccaggccccggcccagagatttggacttggctggcttgcaggggtcctaagaaactccactctggacagcgccaggaggccctgggttccattcctaactctgcctcaaactgtacatttggataagccctagtagttccctgggcctgtttttctataaaacgaggcaactggactgtt

SEQ ID NO: 913 - DNA, 2967 bp, Homo sapiens
tgttcatgaagcatgtcggccaccagcgtggacacccagagaacaaaaggacaagataataaagtacaaaatggttcgttacatcagaaggatacagttcatgacaatgactttgagccctaccttactggacagtcaaatcagagtaacagttacccctcaatgagcgacccctacctgtccagctattacccgccgtccattggatttccttactccctcaatgaggctccgtggtctactgcaggggaccctccgattccatacctcaccacctacggacagctcagtaacggagaccatcattttatgcacgatgctgtttttgggcagcctgggggcctggggaacaacatctatcagcacaggttcaattttttccctgaaaaccctgcgttctcagcatgggggacaagtgggtctcaaggtcagcagacccagagctccgcgtatgggagcagctacacctaccccccgagctccctgggtggcacggtggttgatgggcagccaggctttcacagcgacaccctcagcaaggcccccgggatgaacagcctggagcagggcatggttggcctgaagattggggacgtcagctcctccgccgtcaagacggtgggctctgtcgtcagcagcgtggcactgactggtgtcctttctggcaacggtgggacaaatgtgaacatgccagtttcaaagccgacctcgtgggctgccattgccagcaagcctgcaaaaccacagcctaaaatgaaaacaaagagcgggcctgtcatggggggtgggctgccccctccacccataaagcataacatggacattggcacctgggataacaaggggcctgtgccgaaggccccagtcccccagcaggcaccctctccacaggctgccccacagccccagcaggtggctcagcctctcccagcacagcccccagctttggctcaaccgcagtatcagagccctcagcagccaccccagacccgctgggttgccccacgcaacagaaacgcggcgtttgggcagagcggaggggctggcagcgatagcaactctcctggaaacgtccagcctaattctgcccccagcgtcgaatcccaccccgtccttgaaaaactgaaggctgctcacagctacaacccgaaagagtttgagtggaatctgaaaagcgggcgtgtgttcatcatcaagagctactctgaggacgacatccaccgctccattaagtactccatctggtgtagcacagagcacggcaacaagcgcctggacagcgccttccgctgcatgagcagcaaggggcccgtctacctgctcttcagcgtcaatgggagtgggcatttttgtggggtggccgagatgaagtcccccgtggactacggcaccagtgccggggtctggtctcaggacaagtggaaggggaagtttgatgtccagtggatttttgttaaggatgtacccaataaccagctccggcacatcaggctggagaataacgacaacaaaccggtcacaaactcccgggacacccaggaggtgcccttagaaaaagccaagcaagtgctgaaaattatcagttcctacaagcacacaacctccatcttcaacgactttgctcactacgagaagcgccaggaggaggaggaggtggtgcgcaaggaacggcagagtcgaaacaaacaatgagggcgaaccagtttcttacatgttctaacgtttgactttgaaaacagtttaaaacacgtgtgcttggtcagctccagtgtgtcgtcccgtgcgggggttgagtgttgcatctttgcctttcttgtcgttgatttttgcccagatggatctgcatttatttgtactttttctatgtattataatcctgtagaagtcactaataaaggagtattttttttgtcagcttatcaatcagactgatctaatgtgaaatgtaagtatccttaaaaacaaagcatctattttggcagaaattgtgttcttaaattcagtcatttgatattctgtgagacttcatatttctcatccctttattgctttttagcaaacataagaaaccatgagtcattttgtcatttagagtattctgataaaatctcttgaaaatactgaaatcaaaaggttaatgattttttgttcattctgatttgtcattttattatctgttatcggtctaaagtgctaatttacccatttgatttttctgctagacagataacttttaatttttcaaatttggcagacacttttttttttttttgaaaatctttccttccagatctgttgcccactgaacagccacccgtccctcactgtcctggtgtccgattgggctggatggtgttggggcatgatgtgtggaggaactggaaggtgctttaggtctggttcagggtcgggcattctttgttgtttgcacatctttttaaattttacaccttttcttaagaattctaatgccgtcttaagtttttataccaataatgctgagctttaagtgtaggatctggtagtacagacagtgtgatggatgatgctgctggttgtaaatttcatcgtgtgtgtctaattttttttcctgttgaatgggtaaagacaaaacaaaactttttttagaagatgaatttgctgtcatgttttgtggaatgagggaccgttgagctcactaccacctggagtttgagttgaagcatgaaaatggtgcccatgcctgacgctccagcgcctggatctgcacgtgcccttgtagaggatccttaccgtcctagagagcagacgctttctgaaaactacttgctccaaaagaccctctgagttaacgtttcagctgtatcattagacttgtatttagagcgtgtcacttcctctgaactgttactgcctgaatggagtcctggacgacattgggtttttcctctaggagaatacaagccttaataaacaatactatttagc

SEQ ID NO: 914 - DNA, 2836 bp, Homo sapiens
agcagatatgtgtccgcacccgccaggccttcagcttccctcagacaggcgggaaaaccctaggctgcccttctccgagcggagggccgccccacacacagcaggcgcttaaacgggtacgcggggccctggacggctctccgcggagctccccaggctctggcgcagttccccggcttggggacctgagcaccgcctctgcctgccccagctgctcacctcccctttcccacagagcagggccagccgttcctgccagaagccagggcatgacccctggggtgcgcgtctccacagacccggagcaagtgacatttgaggacgaggtagtggacttcagccaggaggagtgggggcagctgaagcctgcccagaggaccctgtaccgtgatgtaatgctggacaccttcaggcttctggtctctgtggggtcttgctctgtcacccaggctggagtgcagtggctcaatctcagctcactgcaaccttgacctcccagtttcaagccatcctcccacctcagcctcccaagtagctgggactgcgggtgtgcaccaccgtgcccagcttcagcctcacaagtgctgagattacaggtgtaagcctctgcatctggcccagttagccatacagtggaaaaactgcactctaaccaggtgagcaaagagaacatcactgacagggggaatgtggacaccgtgcaccctggatgggatgggggaaggcgcacacatgcaggccacagattagaagtgaagttgacatcacgccaagtacgaaaaggctaaacagctgacaaaatttccacttgagcaaccctggggagcgcaaacaggaggaatcggggcaagggtgacttgaagaaagcactggcagatcacgcactttaaggcaactctacactgcacaatgtcaaataacctagcatggggcggcactaaatggctgcaggaaagccgagtcttcttccacatccggcggctcccctcggatgcgagcgctggcccagggtgtgtttacagaggtgagggcttcccgtggacccttctcgttgggagcgcttagcctcaggagcggattcagggcacaggcagaggacgtccacaaacaccacaggaagccgccacccaggggcgtggaaaggcccaatgcctcgtctgggattcacggccggcaaagcggcccctccggaacgggacagcacagcggctcacctctgcgcctctgggggtgcggggggagcctcgccctccacgctctctgggggaccgcccgccctagcccccgcctgggcttcgcgggtggacggttgggggccccgggcgccccccagcgcgtagcttttctccttctcgtgggtcttctggtgctcggctagggccaggctgaagtggaaggtcttccagcagccctgacaggcgtagcgcttccggccgccatggctgctgtggtgctccatcaggtgcgagagccacgcgaaggcctccccgcactcgccgcaggcatagggcttcccgcgggacaagcccggctcgtcagccccagggccctgcccggcctccagccctgcgctgtcgccggagctagagacgccctcgaggctctgctcgtccccatcctcggggtgcggcctcttggttcccagtttcgccgtgcccctgtccggggcaggctgctggatgacggactgcctctgcgatccggtggcagagtcggactccgcgtcctgggggtcctgcgggtccggggccttcccaggctgctcttcctcctcctcagtggtgcccgacgggggatcggcaagggcgtccccagggggcgcctccgtaggcagctcaggcagcacccccgcgggggcggcctcctcgcaggcgcacccagcgctctcctgccgcctcccgccttctggaacaaggtcagagccctagcgtgagcgccccgcccagggccagggagaggaggacccagccgagcctcagctgccggaacagcgcacagggctccgggctctggatccccgcggggctcacggctgtttggaagcagcgctgtccctcccaggcagccctgcagcgcatgccccacgcctgctgctgcagatgtgggacctggaggcctccaacaacggaggccaccgacaggacaggaaggacagccccactgagcccgggttctggaaaccgcgcctttggaggtctccacctggccactagcttggccacaagatgcacgatgcaaggagagcctgctcagagcgcaccctcctggagggaggggcccggctgccagcgaagagagtggggtcaatagctaaggccaaaccccccagcgacaagccccctggcgacaggcacccagggccctccagcccaagtccgcctctaggtgttcttgttggtgtgctggcacagagcctccaatggggcagaacggccacccccgggaccagtcatacacagatcctggcaactaacaccactgccgtttccaccgaccaagtcttggggtggtctgtcatgcagcaagagaccatggacgtaactggattcctgcctcactcagacacggtggtgggagaatggtgaagcagtcaatgctgaggtctttgctggggctgatggcgctgggaggggccccctcagcctctgaagaaaaagcaaaccccacccggccctaacaccaattcaacccaacctcacctgggaggctgcttccttgtggatctctttccaccaaccggagttcctcagtgtccagcctggaggcagcgtcaggctgggaaagctgataccctgagtggggttaaaaaccaaagaaataaaaggcatcaacacag

SEQ ID NO: 915 - DNA, 3159 bp, Homo sapiens
aggaaaagctcgaaaatcagcgtaacgctgttggagatgagagggcacagcacaattttgagagccaaacaaaggcggggcacagagctgttgcctcgagatgtgtggcctcagaaggtcttgtcgaggcgagtgatgaaagggaggaggttcccgaggatactggagccggaagacgcggcgagggtccgggttagcaaaccgggcagagtcagaggcccaggacgccgggccctgggggcgctgtcgcagggcggcggcggaggccggggtggtgggcgccccggggtggggggaggcgggagtgctctcccaggtgggcttggaggggccccggcccagacacccagggccagccggcgcacccgcatgatgttctgaaagcgtccccgcagcctggtcggtggctgggggaagctgggcgtggttagcctggcagcctggctttgcggactcacctccgggcctcgtcctccagtgccttccctccccaactgaggggcttggctgcacccgcacgcggttttccaggaacagcgatcccggagtggactctcccgcatccagggggacgtcagcactctcggcttccccatggggacacactcactgaggtcacgcgacccaaaaccaaatgacccaccaccacgacagccgcatcgtttttagtggtttgtccgggaggttttagagtgagagaatgaagggggtgaggcctgagggagggaggcgcatggaagccgccgcatctgactgtcccagggtgtgcccaggcccagagatgatgtccagacccctgaagggagtgaagcggaggccctgctggaggcaaaggattcaaggagattcaaaacccgtgtcactgctgccatcttcctagaatccctttaaatcctcatggatttgctgacattgggagcatcctgaaagagtccccatgctagggtggctgcagtaacaggtacaatgagaaatgatggttctccccactccagaaaaaatcaaatcagattgtgaatttattccctgacattaacacatggcattacaggagcatgtacatcacatggtcaatttattggcatgaggattatgtcatcggggaataaatgggaaattctcaaggtggcccaggcctgtaggcttccagtgagaaaactggagaccacactcacccgtcccactgccgtttctttggggctgcctgtgatactgggttattccccttgccgagttccactgtgcttaccctgttggaatatgatggtggacttgccagaggagatgaccatgattttcaggaacagcagcccctccttcctggttgaggcagccagcaggcactcctatccatgagccacagctcagctaaggcaatccagtccagctgcatgccctctctctgcttctggggaggtaggaaggaccaggggcattcatgcttgtttctagggggccctaactggatctctggatcaagacctactcaggggagaaagactactctgggttccatgttaggactgacgggtgcatcttaactgagatgcagacagtggacaattcgaactctgacctgagagcaagccccagccttggtgctcataaatgctccgcttggtccttcacatttgtgttccacacaggggaagccaagttgtgagcagtgcaccttcacaagcaaagcctcgactgaaatcttctctaacaattggctggtcactcctgagcgtaatctaccccttcagaacactggggatgaatttagagacatcgaagcctcctgatgagaaatacgtgtccactcaccgggagaactgaaataccaggagatttctacacaaatctcacagagtccttctggcgtcctaggggtttgctcacatataagggactttctggtaggaagagagtctctttacattctttattatatgatcctggtggctttgtagagagatggtacagctgacagatcatgtcctgtggggccagggagttgtgtgtgtgtgaatgctctgtgaacttgggcaaactacttagcctctctgagccttagctgcatcagctttgaaaaacaggatgataaaatggagtcaccttatttgacttttataaatacacttacacaattacacaagttgtggggatgggaagagagagttggggaaagagaaatgagagagagagagagagagaatgaatgataaacaatttaaacaacagtggggtgtagaccaacgcccagcctggcaagggtgagcccagagagccttccctcctggctattggcagcctccgcatggaagcctgtcgttgacttcttaatgatgagagatgttctgggggcactccaggattcttggacatgggatcgtcttcacagctgtgtctattgaaagctgaagtttcagtctcccctgccccctgccccctggagtggcttcccaggggaaattcaagggcacctgtgactgcatggctgctttcctttcctttactcaatgccgtcctttggtgacagccgtgtctcatgccaggatacatgaggtgctctatagtagtatgttttccctcctgggaggtaattttatttaaatgtgaagtcaaaaggatcactaaatagaaccatgaggcaaccactctgggcacctgcctggtgatatccacaagagctgaccacaggtgccccctgtgcccagcaagtccttggctgggcagtcacacaacaggcatggggatgtgtggccaccaagccctccagggcagtgctatttgtaatagtcccaaatgggagagatggcaaacgcccgccaatggggcagcatggataaatggatgctgcacagcaacggcgatgagtgagccccagcacccgtgagctcaccagtgtaatattgggtggaagaagccaggaggaagggcattcacattctgtgattccagctacactatgtttaaatatgggcagagctaggctgtggtgctggaagccaggacagtgggatccttgcatgggggtgatggtgctggtaggttctggtaatttcctcttcttgatctgggtgtaaacattttgtgaaaattcaatgagctgtacatttatgactggtacatttatgactttgtatgaatattatactttcataaaactacttt

SEQ ID NO: 916 - DNA, 2225 bp, Homo sapiens
accaaagaaaaaagacacctgtgcctggcaggtcgatacgctactaatttgcccgaggtacgaacgaaacagaagatgctgatttctggataaaacgttctgcagtgccaggctgcagtgtgttctactgaatgcatgtaccataatttacttaattatctgggctgattctgaatttctattatgaacaaagccacaggttccttggatatcacccagagtattgaagacgacccacttctggatgcccagcttctcccacaccactcattacaagctcactttagaccccgattccatcctcttcctacagtcatcatagtgaatcttctgtggtttattcatctcgtgtttgttgttttagcatttttaacaggtgtgctttgttcttatcctaatccaaatgaggacaagtgcccaggaaattacacaaacccattgaaagttcagacggttataatccttgggaaagttattttgtggattctccatttactccttgaatgctacatccagtatcaccacagcaaaatcagaaaccgaggctataacttgatctaccgatcaacaaggcatctcaagagacttgcgttgatgatacagtcctctggcaacacagtgcttctcctcatactgtgcatgcagcactccttcccagagcctggcagattgtatcttgacctcattctggccatcttggcactggaactcatctgttccctgatatgtctcctcatttgcacagtgaaaatccggagatttaataaagctaaaccagagcctgatatacttgaagaagaaaaaatctatgcttaccccagcaatattacctcggagactggattcagaactatttcaagcctagaagaaattgttgaaaagcaaggagacaccattgaatacctgaagcgacacaatgcgctgctgagtaagcgattgttggctctcacttcctcagacctgggctgtcagccaagtagaacgtgagaggctcacggtcatgacagcaattgcagaggaacccagagtaattgagactgactgaccacctgacaagctgccacggggaactgcagcttttgctgaatagcattttacagtgtttgttggaaacctgaatttggttctgacttctgtggctgtttaaaatatagggcttgtgggtcacttgaaaagtacctgtagaagcccggataacttgaggggaatgtctgtttgtacttttggaaattatttaactgcttggtttatcctaggatcagaggctaaacaactccatagtcaacacttttccacctgacattagaaccctgtaatgatttcattatggataggggaagtctaacaagacaatcgattttaaacagggttttaatcaaataagttcttcccacttttaagctgatgaaagaagtcattatttcttgtgaatattttttcctggagagccttatcatgtattttatatgcttatgtggtgttggatgacatcatggaccatatagcttttatagagaatttttctcaccataggactgaggtctcaccaggtgatctactatgcaaattcctacagttttctattcttaagaaataagggccgggcacggcggatcatgaggtcaggaaattgagaccatcctggctaacacggtgaaaccctgtctctactaaaaatacaaaaaaaattagccgagcatggtggcgggcacctgtagtcccagccacctgggaggctgaggcaggagaatggtgtggacccaggaggcagagcttgcagtgagccgagatcacgccactgcactccagcctgggcgacagagcgagactccgtctcaaaaaaacaaaaaagaaaaagaaaagaaataagatatgatgattgattacttggaccagtgttagaccgacctgtgttagacgaacctgtgttgcctattatattggcagcaccttccattagcaatagctgaaaaattcagagaagaatttagaactttcactttatttttgccattcttcaagaagttgctgtatatttcagtctggttataccttcaattgatcaataacttcaattataggaaaggcatcttctataattttaaattactgtaaaaaaaagataccttttaaagccttggattatacttaaaaattgtaatggaagaaatgcatattaagttatatgcagatattaaacatatctgattctgaagataaaactg

SEQ ID NO: 917 - DNA, 2303 bp, Homo sapiens
gtttgcgtgcatgcatgtgtgtgcgtgcgcgtgtttgtgtgtgcatgtgtgtgcgtgtctacgtgtgtgtgcacgcatgtgtgtgcgtgtatgtgtgcgtgtgtgcatgtttgtgagtgcatgtttgtgcgtgtgtgcgtatttgtgtgcgtgtgtgtgcgtgtgtgtatgtgcgtgtatgcatgtgcatgtttgtgtgtgcgtgcatatgtgtatgtgtgtgcgcgtgcgtgtgcgtgcatgtgtgcgcatgcgtgtgtacctacccacacctagggggatgcatggctctgtgccttggagagggaaacaggaaatacgttgctccacagtcctgtcatcctggtcaggactactcgcgtggtttgcggacagagtgcaaaatgaaaatgcgaggccccttgttcaggtgatgaagcatttctagacagtgagaggagagcattaagccaagctcaggtcccttctgagtgcatagcctcttgtggctgccaggcagcacacccaggaggccggccctgaccacactgttctctgctggttcccgaagccgatgggctctgtcttaggtcttcttactttgaaaggtctcccggcaggctgtggcaagctgcgcggatacacttttctaaacgtctgcatttatttcctaaaagcacaaatggcctggactagctagtgggtgtggaaccgagcccctagttcacagctgtaccccaaggctggagagggggttgccggtggtggcaggagctctgggctcccagttcaggatgggccacagggcgtcaagcagctgtgagcctttaccattgagctcactgcttggaaataaaacccttcctctgggccttgggcatccaccgggagcttttctcccctttcctgggaggacagcaagccttttccaaccttctgccttcaaagagaagcagggtcatagaagtgctcagtgtcccttccccagtggctggacactcgctcctccagccttcaccccctggagagaaggggagtctgcggagccagtgcctccctgcccagctgggccacacgatctggtctgcgggtgtctgggaggaacctgcttcggagaggctgcgacctcccagctagactctccccttaggatcccatgtatggggatggtaggagagaaaagatccctctgtgtaagtagcctcaagttctagaagaccatggccccgggaggcagctgaccatgaagctgggcttcctgttgttgctttcttccacgagcttttacttttcctgggctggacgctccaaaatgtttgcagttccatttgctttttgcaagtaggtccccatctccatatacattgagcaataatcctcactatgtttcctgattctgtctgggattatatttgctaagtaaaaatgttgacagaaattgcaaactcatctcacctggatttgattgagtcaccttgaatgacataacaaattatggctttgttttcatgcgtcatgcaatcttccggactacgggaagttctgcaagtgttctccaggggcatttcattaatagcgtgtcagcattagttttaatgaatgaacatttgaggtacattctataaatcaatatccttaaaatgtcatctgctaaacattcactgtgacagaaagtagatattttagcaagatctatgttaatgctacttaattttagacatgcatttaaagcctacatggccaatagcccaagtatctttgaactgtgaaatcaacctcagatctcatctgctgtagccccgcaagccggagtctgtgccctccatgacccttcttatcccttggtggccctgcatagataggggagttggcccctgcccaccccgtgttgtattgccttagctccatcagctttgtaccctcacacgtataggtggtgaacttatgtgtaaatacatgtgtacagatgagaaactgcaacaaaaatgtcctgtggatgataaccagctcagtttccggttttctacattctgtgctgtttccagctaagaaaaaggcgaactcccactatataaagggaaaaggttgtattcatttcatgttcctcatgaaatctctgctgtatgtttatggaatggccatgactaaatgtatatatggtatgtaagaggccatgctgttaaatgttgcataaactaacacagattctgtagtcaaaaatatttaacttgttattgtaaaatgtgatttgtcattgagagattatttttctgtatgtatatgagagtattttaggaatctaatttaagtgcataaaactatag

SEQ ID NO: 918 - DNA, 2033 bp, Homo sapiens
cttaataccagtcattcgccatcggcgtcctcaagaagttcccacaaatcctcgcacacagccatgtcagaacccacctccactcccaccaagctgatggcagaggccagcaccccggctttgccaagatcagccaccctgccccaagagttacctgtccccgggctcagccaggcagccaccatgccggcccctctgccttccccatcgtcctgcgacctcacacagcagctcctgcctcagaccgttctgcagagcacgcccgctcccatggcacagttttcggcacagtccagcatgttccagaccatcaaagaccagctagagcagcggacgcggatcctgcaggccaatatccggtggcaacaggaagagctccacaagatccaggagcagctctgcctggtccaggactccaacgtccaggtacgcccagagccagactgtgtttcaaaatccagacgcacaccccgccaacagcagcagcgccccgatgcccgtcctgctgatggggcaggcggtgctccaccccagcttccctgcctcccaaccgtcgcccctgcagcccgcacaggcccggcagcagccaccgcagcactacctgcaggtacaggcaccaacctctttgcacagtgagcagcaggactcgctacttctctccacctactcacaacagccagggaccctgggctacccccaaccacccccagcacagccccagcccctacgtcctccccgaagggtcagcagtctgtctgagtcgtcaggcctccagcagccgccccgataatgccccggcactgaagtcgggacacaatcagctttaaccaatggatgaggggggtggccacaggagatggggagaggagtctgaactaaacccctggcttttgtgcacactgcatacgtttcagaactcctggatggtaaccatctctggagtgcagcgcttgctgcagtggaaatgatcaggaatactgaccgtgtttctcttgcctccgaggttcttgggcacactctatagccatactggacaggaaccaggtgccccgtgtaggcatcgtcggtcggtttgccgtcagagatggcgcatctcgctgcatcccccgagagtacaccggttgctctagccacctgcggcccgcccatctgcgctagctggccttcacgctcttgatcgtctttcctttgtattggagaaggactgggtcagagatctgttggagggagagaataaagagattatttttcattatttttaaatggttgtttttgttttaatttgcacagctacacagaggaaataacttaggtactttctgtttttttaaaaaaaataataaggtctcatggcttcattcagagaccacagtaacaacagcagcccaccaatcagagaagctggttgttattaaccaagctacagattcacactttctggcctaaaccctaatgggatgaggcttttcaccccaggccatgctggtggtgattttttagcccctaaataaaacactggactatttcctgtttacttcattgattgcaactacaaaggtggactcaaagcaaagcacaatcatgccagccaacattccagaattctgctgagaactccaagtctgtgaggggggaggttttacaagccagacaggcctgggggactgcagtccccaaggagaccctgccacatgctggccctttgagtgagaatgctgcatctttctacatatcttcatgagaatactgagaattggattttccttttcaaaatgcactttgctttttttgtatgttttgttatgttgagatgtttctaaagaaaagattttatgtaattataagatgaagcgtagtgaattgtacagctgttgtaataatgacctatttctatataaaataaaattgtatggcttatgtgtaaattattttgtatctgagataccagttccttttcccaaatataaaagtataaaagttttcttgtgtttttctgtgagtgaaaattttgtaataaattaacaaatttgtac

SEQ ID NO: 919 - DNA, 2520 bp, Homo sapiens
ccttgaacacattgcatcatgattacatgaaagagctgctgaaatggtcatgtgttcagagactactacatctgtaggcttaatagtaaacgtttggttggttggttggtcggctggttggtttgctgcttagcatcaggacacccaccccttgtgtgggaaatatacaagtgtgtgagtctatgggttgaaatccaaaaagcctgatgctttttctcattcctggcaaccaagggatatgaccaaattgggtcaattgaatgcccttgcccctaactgtgaacagagagtagtgttacaaacaaggaataaaagattagaatcaatgccagtgtctttccattgccccatcgtgtcagggtccaagtgtccagtagctgtggtcccttaaccagcctgtacctttggccgtggcaccagctacctactttccctatgtccccaagttatctggtaaccattcaggaatttttttttcctacttaggtatacaaaaaacagtgtcagtttttgcttgacagattaaatcatccttcagagatgcaggaaaactattagcagccaagggatgctgccaaggccggtgtctgggctctgcagttttctaacttgtgatattgggtcaccccactaagctccaggagagcagcgactgcatgtggcttaatcattatgggatggccagctcccaattccatgccctaggcaaagagacattcagtgaatattgatttgacttcgacttgattgaacaaaatggtaacactgaactctaggtttcctcagtgtctgttacagatttcttgatcctgactgcttttaatttttttttttttagcaagaaataactaacgaatgatgacactaagctttaaattcaagtaaataggaggcttttttttttttcgcataagcagaaatgaggaaatcaagaggaagagattagatttctgttgtgataaatcgaatctgttaaatgccatgactttttaattgtcttaatcacaagttaaaccggttgtgttgctgcttagatggctatatatttgtttaaaagtacagcagtccctcctactggactttgatcctacaaaaacaactgttatctaactcaccctcagactgtcactggaacacctgcatgaagaatgttctttcattttttaaaaacgattttgcatatatgatttatttcagctttcaaaatgattagaaaactttttattgttctacttttgttgcttgtgactatagaagaagcaaggatgtcatcgctcagttttctgaatatagagaagactgaaatactatttttcacaaagactgaagaaaccatccttgtaagttcaagctacgaaaataaacggcctaattccagccacctctttgtgaaaatagaagatcctaaaatactacaaatggtgaatgtggccaagaagatctcatcagatgctacaaactttaccataaatctggtgactgatgaagaaggagaaacaaatgtgactattcaactctgggattctgaaggtaggcaagaaagactcattgaagaaatcaagaatgtgaaagtcaaagtgctcaaacaaaaagacagtctactccaggcaccaatgcatattgatagaaacatcctaatgcttattttaccactaatactattgaataagtgtgcatttggttgtaagattgaattacagctgtttcaaacagtatggaagagacctttgccagtaattcttggggcagttacacagttttttctgatgccattttgcgggtttcttttgtctcagattgtggcattgcctgaggcgcaagcttttggagttgtaatgacctgcacgtgcccaggagggggtgggggctatctctttgctctgcttctagatggagatttcacattggccattttgatgacttgcacatcaacattattggctctgatcatgatgcctgtcaattcttatatatacagtaggatattagggttgtcaggtacattccatattcctgtttctaaaattgtgtcaacactccttttcatacttgtgccagtatcaattggaatagtcatcaagcatagaatacctgaaaaagcaagcttcttagagagaataattagacctctgagttttattttaatgttcgtaggaatttatttgactttcacagtgggattagtgttcttaaaaacagataatctagaggtgattctgttgggtctcttagttcctgctttgggtttgctgtttgggtactcctttgctaaagtttgtacgctgcctcttcctgtttgtaaaactgttgctattgaaagtgggatgttaaatagtttcttagctcttgccgttattcagctgtcttttccacagtccaaggccaatttagcttctgtggctccttttacagtagccatgtgttctggatgtgaaatgttactgatcattctagtttacaaggctaagaaaagatgtatctttttcttacaagataaaaggaaaagaaatttcctaatct

SEQ ID NO: 920 - DNA, 2506 bp, Homo sapiens
tggctggacgaggacgagccgccgccctcgccgctcacacgctaccggcccctgcacaacgctgcgtcgcacgagggcctggccgccgcctcctgctctccgccgcgctccgcgccctcctccgacagctcccccagcttcgtgcgccgccacccgcgcgcagagccgcacagcgaagatgacagccgtgacgccagtcctcctgagcccgccagccccaccatcggcctcgataagaagactcgccgaaagttcctggacctgggggtcaccctgcgccgagcatccacgggcaagagccggaaggagaaaggcagcaaccgactgtccatgggcagcagggagtcagtggaggggtccggcaggtcagggggctccccgttcctgcctttttcctggttcacggacagcggcaagggctcagcatcctcgggtagcaccacctcccccacctgctcccctaaacacgagggcttcagccctaagaagtcagcttcccaggaatccactctgagtgatgactccacgccccccagcagcagccccaagatccccagtgggccctggcaggaggccaaatgttcttacccctaccacacgctgtctcagtcttcagatgagttcctggatgaacccctcccccctgtccaccactggaccagccagcaggtgggccagtggctgcagagcctcaacctggaacagtatgctgctgagtttgctgcacggcaggtagacgggccgcagctgctgcagctggacggaagcaaactaaagagcctggggctcagcaactctcatgaccgggcactggtgaagcgcaagttgaaggagatggcagcagctgccgagaaggagcgcaaggcccaggagaaggctgcgcggcagcgggagaagctccggcgccgagagcaggaggccaagaagagctaggggagggtgcacaggcgctggcacccggcaggggcagccactggctccgcgggcacaggcctcaccagggaggctggacctgggcgctgcacttgggctagcctggtcccatgctctcaggggggacatgctctctcttaccctgtcacttggtctagacccagagaccccagaaagggagaccccagggagagggcctagtaataaatcctattttgaggacttgtttggcacagagttcctgggggaggagcagatgaaggggagagggcagagaggccagggctgaggcaagtctgggagcctgggtcaggctgtcccattgccctcaggccatcatggggctggggtggaggggagctaggaggcctgcctgcctgcttgcctgccagaggccctgaggccgggccccagggctcagagctgggctgggcatttcagcaggagcccatgtgggagcggctcctctccactcttccagggggctgtgtggtgggagagctctgtcctgctcccccaagaggccagtgggcgctgcagcaagtcgcactcagggtagactcccagccaaactcctcaacaggagcgcagagaaagcagcctggggcgagtgcagtctttgccaggactcaagaggggaggatgaacatccccttctccctctcccctcctctgtcctgtgggtcccagggggcgagatgacaccacacaggtctgcctctcagggcccattcaagacctggtctttgacccattctccaagccaggactcccttcacttcctgctgcttcctcagagggcacctaagtcctctttgggagctgagcaaacaggaactgatagggacagaggacaccacttccaccagccaaggcctaggagctgctgacctggtcagccctcaccccagccaggcagagaggcaaaacctgggggtccccggcagctacgagattggaaaggttcatcagccctcccccatctgccccaggcattgtcagggaatcagtgggctcagaactggcaggcggtgcaagctctgcttccctgggccacactgagggctggggccagctccctggatgggggtggagtttaccagcagcctggggacagcatgtgtcctttttaggaaatgtccttggaggaagtgttcatgtgtggcgctggtcagcagctagtcccgcttccaggacactggtcagagttaccgatgaggcctgggggctcctgcttggaaacccctccagctcctcccatctgcccagacagagcgacagatggcaccaatgcatgctggctccctcattcctgcccaggggctgtggcttacggccagcaccctgtacctgggactcagcccttatcccccctctgctatctgtgctgggagaggggcttcggagggaaacagatatgaggacactggcaccatctgggcctggtggcagggccatgggaggttggaaggcacccacatccttaaagccatcagtagctatagtgggtgcccacctgcatgtgaaggggaggcagttctcaatttatttcaataaatccttatgatgtgcc

SEQ ID NO: 921 - DNA, 3109 bp, Homo sapiens
agctcagccatgtgctgtgctgggcgcccacggacccacccacaggcctctcctacttctccagcatgtacccgccgcaccctctcacggcgcagtacggggtgaaagtcctgcggtccttccctccggacgccatcctcttctacatcccccagattgtgcaggccctcagatgggctatgtgcgggagtatattctgtgggcagcgtctaaatcccagcttctggcacaccagttcatctggaacatgaagactaacatttatctagatgaagagggccaccagaaagaccctgacatcggcgacctcctggatcagttggtagaggagatcacaggctccttgtccggcccagcgaaggacttttaccagcgggagtttgatttctttaacaagatcaccaacgtgtcggctatcatcaagccctaccctaaaggcgacgagagaaagaaggcttgtctgtcggccctgtctgaagtgaaggtgcagccgggctgctacctgcccagcaaccctgaggccattgtgctggacatcgactacaagtctgggaccccgatgcagagtgctgcaaaagccccatatctggccaagttcaaggtgaagcgatgtggagttagtgaacttgaaaaagaaggtctgcggtgccgctcagactccgaggatgagtgcagcacgcaggaggccgacggccagaagatctcctggcaggcagccatcttcaaggtgggagacgactgccggcaggacatgctggccctgcagatcatcgacctcttcaagaacatcttccagctggtcggcctggacctctttgtttttccctaccgcgtggtggccactgcccctgggtgcggggtgatcgagtgcatccccgactgcacctcccgggaccagctgggccgccagacagacttcggcatgtacgactacttcacacgccagtacggggatgagtccactctggccttccagcagcatggccgcctacagcctcctgctgttcctgctgcagatcaaggacagacacaacggcaacattatgctggacaagaagggtcatatcatccacatcggtcagccagccacagcgccaccctcctctcccttcacccctggcacccaggggtggatagggatccccaccccacagagaggagaatgcccaggaccaccctgccaggagtgtcagggtccagctctgaggtccgaactgtcggccaccaagctgttctgctgtagagggtgcctggccccggccccagggagctagggcgagagccgccattgctctgagtcagaagctggagctgggcggagtggggctggtccaggttcagtgccccagcttggctccttcctccacttcctcccttctctttctctgcctgctgccccaccacccaccccatcactgtctccaagaaaacacaacctgcctgttgggggtggagggggtgctcctgttgcagtccttttccactcctcaaaacagaccacttgtccttgcccgccctggctcctacccagtcacaggcagctctttggggttttgcagactttggcttcatgtttgaaagctcgccgggcggcaatctcggctgggaacccgacatcaagctgacggatgagatggtgatgatcatggggggcaagatggaggccacacccttcaagtggttcatggagatgtgtgtccgaggctacctggctgtgcggtgagcctgggtgagggccagggtggaggcggagggggtgtgtggaacgttctgagatcccctttaggatgaagggaatccggttccagagagtgaggtaggtgctagcagccacctgctgacctacacctgtcctttggtcacctctgtctgcccacctgtgccagtaaattcttgctctggacatctaattccaaccaccttccccacgatcctgcccacgccttcagccatgggctctccctttctgggcatcccatccaccctgtcaccaaagcctgagcacctgccaccccacaggctacgtgccaaagatgggctttgtcccagtttcatatacaggtcacttggccaaggccacagtccaacctgggttcatccccactgccctgcagagaaaggcaggtcagcgtgtctgcatcccacccaagtgcagaagccatggccggcagccttatgtgggggacagggcaggacactcagcctgtccagagtgcgtgtgggcagcccttgcctgggcggtatgggttaccaagtgcagcagatcgaaagttgcctcggggatgtgcaagatgtggcaggcgaggtgggtggcaggagcccacacctgaggctgttggcatcagccagtccacaggactacaggcagggccaccacctaggctggcctcagcccaccgctccctcctatctctccccaggccctacatggacgcggtcgtctccctggtcactctcatgttggacacgggcctgccctgttttcgcggccagacaatcaagctcttgaagtacatttccagggcgtggctctcagctgaagtccgtccccatggaagaccctcctcccactgggccagggagccagcacggccctgcccatggcagccctgacacagcctctcccccaggcacaggtttagccccaacatgactgagcgcgaggctgcaaatttcatcatgaaggtcatccagagctgcttcctcagcaacaggagccggacctacgacatgatccagtactatcagaatgacatcccctactgaggaggggaccttcgagggcctctgccccatgtgccctcaaagctgtcccacaatcatggagccctgcgacctccctgccctgccgccacatgcagtggaggagaggcctgtggcccaaagaacctggtagcgcctcctggggcagcacgtgggtggcgcagccttggtaacgccatggactgcagcgacaatcaatggatggtgctgtctatgcacaggtgtgagtcctctgtttgcactggacatattccctacctgtcttatttcataggtacatgaagtattgtgtataaaaaaagagataagattcaaccaacatcaacaaaataaaaacccaaaatag

SEQ ID NO: 922 - DNA, 1613 bp, Homo sapiens
tgtgtgaccctggactgtcccacagcagaaggcagaacaaacacttatgttatgctttaatcataagtggaatggtcacaattaataagatattttatatatggcaaagttttatgaaatgcttttttactattagagacctgtttcttctgttattacagaacacagtgtttatcaactgcggacataattcttttattatacagttgcatgtaaagggagcttctcatttaattcagcggatgtgggtatttttagggcattgtaattgatggttttaataattgctgaataatttttgattaagagaaaaatgtaatacaattactggtctgagttacagaacagaagttaatgaaaaaggctatttgagcatgtgtacttatagattcatttgggtggctgagaaaagatgctgcttttgaaataaaattggtgctgtgtagacacttgtaaccaaaattatttttataacagaattaaaagaaggagagaagaggccatggacctttgagtttacatgttatacctaattgattgtctgcagcttatctgtattttaatattgactttgtccagattcagtgagaacatagtattgacattatgaggcaaaatgctgtcatagccagtattactgatatgttgctacagacacaatgtatagaacataccttttctaaaataggaattatttccagttatgaaaaaggaaaagagtaataaagaaaaccaaatcaaaaccaagggatcctttctacatgtgggtgaacggctgctaaagccacagtagaaaccaatttttgaatttgaattgttgaaatatcctagattgctttaatggaaaaaatccagagtcacatatcttttttattatcaagtttttgcagccttttgccagcattgccataaatacgtaagaaagcagcagatagtataagcccctagttattaagacttctcagttaatattaaggccaaaatataacttgagctaggtataacagggctgaatgctacagtgttgtttttaaagattttgcttatttttaaagacaggaaaattcagttctaaccagatgttccagctatgttactcaaccagcagtggtaggagcagagagcacttgcactaagagctgatcaccatttgagatacgcggcttaacgcacatgtgagtgtagcttgctacatgaaaatgctaggctctagggcatgtaaaacatgaatacagaatactagattgttctaagtaatgtcatttcggtttgtgaatttgatttttcccttcatttcatgtcatattgaaaatgcaaacaaactgctctcaagaacacccagaagctatctgtgttaccagatgtgttgtgaacactctactatttttcataggtgcttccttgaaatatatgtccattgtagtggtggagagggactggactctctcaggctctttacttgccagttgtctcccgcagttaatggaaatatatatacatatatatatatattttatttagaatataatttaaacatgaaggtctattctttgcactttttattaatatatatatagataatctttaaaaaaattaaaattcaagtccatttt

SEQ ID NO: 923 - DNA, 2755 bp, Homo sapiens
gtgttgctcctcccctggcagccgtgaggggggttagatctcagccggagccggagctgggcctagctgtcccacgggccaccactacctcctttggttcgggagaaagctacgaccaagtacgcccagctcgggccttagaacttctgaacgggcagtgcgggtaggccctgcttagcccttcccggaggacacctgaccaaaagaggaagatagtcttgggacccttgcatggtgtttcaaagggtggtgaagaactaaggtagaagaatacatgttcacttccagtgaacaagagcatgttcccaaactcaattttgggtcacccacccttcactccaaatcatcaacaacataataacttctttaccctgtcacctactgtttattcacaccagcagcttatagatgcacaattcaactttcagaatgcagacttgtctagagctgtgtcattacagcagctgacatatggaaatgtcagtccaatacagacctcagcttccccattatttcgaggaaggaagagattaagcgatgaaaaaaaccttcctcttgacggtaaacggcaacgtttccattcaccccaccaagagccaactgtagttaaccagatagtgcctttatcaggtgaacgaagatactcaatgccaccattgtttcatacacattatgtaccagatatagtcagatgtgttccaccttttcgagaaattgcatttttagaacctagagaaatcacactgcctgaggccaaagataagttgagtcagcagatactggagttatttgaaacatgtcagcagcaaataagtgatttaaagaagaaagaactctgtcgaacacagctgcagagagaaattcagctgttatttccacaaagcagactttttttggttgggtcctctttaaatggatttggtacccggagcagtgatggtgatttatgcctagttgttaaggaagaaccatgtttttttcaggtaaatcagaagactgaagcacggcatatactcaccttagtccataaacacttctgtactagactttcgggctacattgagagacctcagctgattcgagcaaaagtgccaattgtgaagttcagggataaagtcagttgtgtggagtttgacttgaatgtaaacaatattgttggaataagaaacacattccttctcagaacttatgcataccttgaaaatcgagttcgtccgttagtgctggtgattaagaagtgggcaagtcaccatcagataaatgatgccagtcgtggtactttaagcagctatagtcttgtattgatggttttgcactatttacaaaccctacctgaacccatccttccatccctccaaaaaatttacccagagtcttttagtcctgctatacagctgcaccttgtacatcaagctccatgtaatgttcctccttacctctcaaagaatgaatcaaaccttggggacctcttactgggctttcttaaatattatgctacagaatttgactggaatagtcaaatgatttcagttcgtgaagccaaagccattccaaggcctgatggtattgaatggagaaataaatacatctgtgtagaagaaccttttgatggaacaaatacagccagagcagtgcacgaaaagcagaaatttgatatgatcaaggatcaatttttaaagtcatggcacagattgaaaaacaagagagatttgaacagtatactacctgtaagagctgctgtcctgaaaagataactggcctctatttcttaataaattcttccaagaaataaagaacaatagtttcatcataatacattatgtttacctccatcatagttgcttttttcatagttcttgttttcatgttttatttttaaaaagacatataaagattgcatattttattatgacatttcctaataaacccctttgatttaaaaatgtatttttaaaaatgtttacattgatgatgagtaatattgcatgtgttttcaggtgatcagataaaatatattttgggaaattaacaaataaaaagtttttgatataacttcaattaattgtaccacatgctaatcctgaagagatgtgtagaattttggaaagggtctaattcatacatgcttaaagtataacctacgttagatagtttgttgtcaaagtctgttctagtaaagtgaagattcaagtcagttgttcatttacttgaagcaaaacgaaatctttcatttcagtcaaatcactgcagtcatgaaatactgaacaattgccttaagtctttgcttgactcactgggatagactgaggctttgggtgtgtctgtattagcatttcattagtacttcacatgcttttgatgtactcttgagattgctttaaattttgtattgaaacaacaatacattttgcactgtagtaatgggagcactaactcttacaacagttagtgaatcgttttaaagaatcagttcagtgtagacattttgaaaagattgtttcctgtgctttacgatagcttagtgcaatgtgcacttctgttttacttgccattttcctgctctgttttctctgtgacatgaagcaacagaaactgagatcaaagttaagattatatcctgtttgtagtatcagatatttttctgtgtacaattataggattgtaatctaaactggaatttttaggcagtaagtcaccacaaaatgttttagataagacacaataaaattattataaataaaagcttaatgtttgt

SEQ ID NO: 924 - DNA, 2421 bp, Homo sapiens
agctggccaagacggaagactaatgttattgtacataggctgttaccctgccagcccttcctcacagatttgctttctctctctgtccctcttcccctgcgacctcttccccttttacccctttcatctcttccttctctttcgctttcttcttctgtcttcggactctgctgactgtttgctcaggtggacagtgacaccatttggaatgagctacactcgtccggtgctgcacgcatggctgttggctgtgtcatcgagctggcttccaaagtggcctcaggagagctgaagaatgggtttgctgttgtgaggccccctggccatcacgctgaagaatccacagccatggggttctgcttttttaattcagttgcaattaccgccaaatacttgagagaccaactaaatataagcaagatattgattgtagatctggatgttcaccatggaaacggtacccagcaggccttttatgctgaccccagcatcctgtacatttcactccatcgctatgatgaagggaactttttccctggcagtggagccccaaatgaggttggaacaggccttggagaagggtacaatataaatattgcctggacaggtggccttgatcctcccatgggagatgttgagtaccttgaagcattcaggaccatcgtgaagcctgtggccaaagagtttgatccagacatggtcttagtatctgctggatttgatgcattggaaggccacacccctcctctaggagggtacaaagtgacggcaaaatgttttggtcatttgacgaagcaattgatgacattggctgatggacgtgtggtgttggctctagaaggaggacatgatctcacagccatctgtgatgcatcagaagcctgtgtaaatgcccttctaggaaatgagctggagccacttgcagaagatattctccaccaaagcccgaatatgaatgctgttatttctttacagaagatcattgaaattcaaagcaagtattggaagtcagtaaggatggtggctgtgccaaggggctgtgctctggctggtgctcagttgcaagaggagacagagaccgtttctgccctggcctccctaacagtggatgtggaacagccctttgctcaggaagacagcagaactgctggtgagcctatggaagaggagccagccttgtgaagtgccaagtccccctctgatatttcctgtgtgtgacatcattgtgtatccccccaccccagtaccctcagacatgtcttgtctgctgcctgggtggcacagattcaatggaacataaacactgggcacaaaattctgaacagcagcttcacttgttctttggatggacttgaaagggcattaaagattccttaaacgtaaccgctgtgattctagagttacagtaaaccacgactggaagaaactgcttccagcatgcttttaatatgctgggtgacccactcctagacaccaagtttgaactagaaacattcagtacagcactagatattgttaatttcagaagctatgacagccagtgaaattttgggcaaaacctgagacatagtcattcctgacattctgatcagcggtttttttggggtaatttgtttttcaaacagtcttaacttgtttacaagatttgcttttagctatgaacggatcgtaattccacccagaatgtaatgtttcttgtttgtttgttttgttttgttagggtttttttctcaactttaacacacagttcaactgttcctagtaaaagttcaagatggaggaactagcatgaggcttttttcagtatctcgaagtccaaatgccaaaggaacctcacacactgtttgtaatggtgcaatattttatatcacttttttttaaacatccccaacatctttgtgtcctcacacacaggcaatttgcaatgttgcaattgtgttggagaatgaagtccccccacctcccagccacacacacatcctttgttctcatgacagtaggtctgagcaaatgttccactaagcattttcagtgtctttgaaaagcacgtaacttttcaaaggtggtcttaatttgttgcatatctatcaaggacttattcactcacctttccttttctgccctctatcaattgatttcttcttacctttcatcattcattccttcctttagaaaaactgaagattacccataatctcctcttattacttgagggccttgactatttagtttatttcgtttactttacaggttaacacagttgttttgtctgattgcattttattaactgtgaagccgttgaaatgaatatcacttaagcaacgttgctaaatttctatgtgtttgaaatgtgttaatgaaggcactgcttatttgtagtcaccttgaactgacttaacctagaagccgtgccttcttgtg

SEQ ID NO: 925 - DNA, 2449 bp, Homo sapiens
gagaactgcgtcccgctcgtcagaaacgcctgttccttcgtcgtctcccagcctagcccctgccccttcagcggagcgcctgcggagacacgggccgacgcgctcttgggaatgcgatcctaggcttgggacttctggggaagtggcggcttttagcccctgcgggagccgagccgggccgggggaggagggatggtgctgtttctgggatgagtgcgagttgggggccgagggaacacggatgtggggtgcagaacgctgtagtggggacctccaggccggcttttgcttgcaccggagggaagaagaaactacactgcggggacgagcgtaagagtgggcacgagcgacaaaaggtcgtgaagcgggtgggaaaccgagcactggaatcatggagccgaaggactctgggcgagcagaactggaaccttcggattatttacactcttattcaggtcttggaggtccttacctatgaggtgggcagctgggagcccggggctgagatctgtttctggctcctcctctggcagcttctgaaaccctggaaggggcaaagagtccacgattgggggcagggcagccacccatgcaggctacccttgagagaacagggcgcagggatggggagcctggattcctagaggaagaggtatctggggacgcagcagggagctgggagcccctgagggtctgaagcggggaaggagagacagtctgctcttacccagtccttgctgggcctgtgccccggggtcggccgtctccgttacctggttgggtggggtcacagtgcccagagttcagattcagctcatgtcacccctacccctctgaaagtggacccaagctgcaggcctggggtttctcctaccagcaccatccccaacacacacctccttagaagggagaacaagcaaggcataggtacttgggcggagaaacagatgtacctcgggaagaggagaggagacacaaggggcttatgtcgggacacaagcacaacatcacaggaacatggaaagagagtcagcaaagagacaagacatccccaccagggacagccgagccagctgagccagagggggcaaaagaccacaggcacaaccagagggagccaagcatccgcaagatacaactctccaccagggcctgttgcagccactcaccagtcctccctgatcctggggcactaaggccagcacagccaggacagtgataggcaccgccagcaacaaggtcaccagagaagtggctcctgccacagctagcaggagggaacccctcccctggagcctcccacccctgccctccagccccagtgcccccattgagactgaaccagagccagagcagggggctttcatacctcagggacgggcccaccccctccctgtagacctgcacacctggctgggactttccgcacacccctgctcccctcacccagcttcctgtttacccagagctggggtggggcagctggatgcctgggttctctgaactggggaagaagttgaggttagggagacaggctctcagggtggaaccaaaggggtctttagacatcttctggctcagcagagagagaaactgaggcccagggagggaaggtagcttgcaggaagccagtcagcagagctgaaatgagaacacagatctccaggtttccaatgtggtttgcattcttctataccctcaaggtaggtgctggaggaagagctgatcccgtctctgaggtcaagggccggactaggacaaggactggaatcttgagggatggatgtctgggttccctgagaagaactgattcccatactgggctgacctcctcccgttcccttgctcatctccagccccctgtgctgagtgagaaagggagaggtaagccttagcctcaccactgactactgactcactaaggagggatggaaatggagctttacctcccttgctacaaaaagtaaagacagatggacgaggcatactcccaccctcagagagcttccaagtctacaatgagccctatccattagtaggtgcttactaaatgtttatacataaatgaataaaaggacaaataaatgcaggaataaccaaaacaaagcagcaaggaccacatgaatggtagatgtaggcagcatgagtggttaagagtcaagggagtagccggggtagtggcttacacctgtaatcccaacactttgggaggctgaggcaggtggatcacttgaggtcaggagttcgagaccagcctggccaacatggtgaaaccctgtctctactaaagatacaaaaagttagccgggcgtggtggcacgcgcctgtaattccagctacacaggaggctgaggcaggagaatcacttaaacctgggaggcagaggttgcagtgagccaagattgcaccattgcactccagcctgggcaacaggctgagactctctctc

SEQ ID NO: 926 - DNA, 2274 bp, Homo sapiens
aacccatggccgggaaaagaagctcctgctccccgctccactcccggcgtcttcacacttggggaagggagaggcaggaagtgcaaggaccgcgcaagacccggccccccgagccgccaggggccgcgccagcagcccagatgcggtgggcgggagctgggggggcggcggggtcccgcgaagacctgcgacctggcgccctcgccggctgtgtcccggccagcccgctttccaggcgagcctcgctaaggagtgtgagaaaccaaatcctcagtgggtaaaccgcgctccgtccagcccactcggacgagagctctcccgggagccaggcgcgttgctgcacccgaggtggggaaaccggagcccgaagagcggaaggggcttattccaggcgacaggcagtgtcagtaactgaatcaggggccgaggaagtttcccaagaagcgcggcttcgctcccggcccggcccgaccccgactactgtcccctaatacccagggagcggaagacgcgaccaactccaggcacagcggagccggcgcggggtccacaaagcaaaaaagaatgatccccttcccccatcctcaagtgactgatgctcttggaagatactccaactatatcctgagtagcactgtggagagccccagtctgagaagcatgaactttgagaagcaaggtgagcgagtgctgtgctttcatgggcctcttctttatgaagcaaagtgtgtaaaggttgccataaaggacaaacaagtgaaatacttcatacactacagtggttggaataaaaattgggatgaatgggttccggagagcagagtactcaaatacgtggacaccaatttgcagaaacagcgagaacttcaaaaagccaatcaggagcagtatgcagaggggaagatgagaggggctgccccaggaaagaagacatctggtctgcaacagaaaaatgttgaagtgaaaacgaaaaagaacaaacagaaaacacctggaaatggagatggtggcagtaccagtgagacccctcagcctcctcggaagaaaagggcccgggtagatcctactgttgaaaatgaggaaacattcatgaacagagttgaagttaaagtaaagattcctgaagagctaaaaccgtggcttgttgatgactgggacttaattaccaggcaaaaacagctcttttatcttcctgccaagaagaatgtggattccattcttgaggattatgcaaattacaagaaatctcgtggaaacacagataataaggagtatgcggttaatgaagttgtggcagggataaaagaatacttcaacgtaatgttgggtacccagctactctataaatttgagagaccacagtatgctgaaattcttgcagatcatcccgatgcacccatgtcccaggtgtatggagcgccacatctcctgagattatttgtacgaattggagcaatgttggcttatacacctctggatgagaagagccttgctttattactcaattatcttcacgatttcctaaagtacctggcaaagaattctgcaactttgttcagtgccagcgattatgaagtggctcctcctgagtaccatcggaaagctgtgtgagaggcactctcactcacttatgtttggatctccgtaaacacatttttgttcttagtctatctcttgtacaaacgatgtgctttgaagatgttagtgtataacaattgatgtttgttttctgtttgattttaaacagagaaaaaataaaagggggtaatagctccttttttcttctttctttttttttttcatttcaaaattgctgccagtgttttcaatgatggacaacagagggatatgctgtagagtgttttattgcctagttgacaaagctgcttttgaatgctggtggttctattcctttgacactacgcacttttataatacatgttaatgctatatgacaaaatgctctggttcctagtgccaaaggttcaattcagtgtatataactgaacacactcatccatttgtgcttttgtttttttttatggtgcttaaagtaaagagcccatcctttgcaagtcatccatgttgttacttaggcattttatcttggctcaaattgttgaagaatggtggcttgtttcatggtttttgtatttgtgtctaatgcacgttttaacatgatagacgcaatgcattgtgtagctagttttctggaaaagtcaatcttttaggaattgtttttcagatcttcaataaattttttctttaaatttc

SEQ ID NO: 927 - DNA, 1758 bp, Homo sapiens
gtcttggatcaaacagcctaaatgggaagaaggacatttttgctgcatcaaggaagccgttaaactcctgctaagctaactagctcttttttatgggtccatgcacacgaccgaactcctctttcactgaccagagattatttctgacaacccaggatatcccgaaagcttggaggcatatggctggaaaatgaaacgacccaggacatcgtttctggctgcatcattattttgtgtcgcgtagtaccagatgggcagtcagtgagcggcgcagggatgtgaacggacggttttataatgtgaaaattttcccttggtaaagctaaaacagatttaatttccctctcttttctttcactacttccccctctttattccccctctgtctgcaatatcagtgaactcaactttgcagtgaggtggccaaaaagagagagaatgaggagatcttgatcatcttagtgtcagaggagtcgcagcggactgggaactgcagctgcgaccccccgcgtcctgtgcggatttcagggctgataccgcataggcggttatggaaaggacggtacaccggagcggcggaggatagagaccctggcccccggagaggtctgctgatttcgcagcagccttcgaagccgtggctgcctttcatctgctgcgttttattactattatcgccgttccggaaaagtcatggaagacagcccgctgccagacctcagagacatcgagctgaagctggggcgcaaagtacccgagagtctagtgcgctctctccgtggggaggagccggttcccagggaaaggggcagggacccctgcggggggagcggtggtggtggcggcggcggcggcggcggcggcggctgcagtagcggcagcagctactgcagcttccctccctccttgtcgtcctcctcttcgtcctccccaacctctggctccccacgaggtagccactctagcgccctggagaggctagaaaccaagcttcacctcctcaggcaagagatggttaacctcagagccacagacgtcaggctcatgcgccagttgcttgtaatcaatgagagcatcgagtccatcaagtggatgatcgaagaaaaagccaccattaccagcagaggcagcagcctcagtggcagcctgtgcagtttgttggagagtcagagcacctccttacgtggcagctacaacagcctacacgatggcagtgatgggctggatggcatttccgtgggaagttatctggacacgttggcggatgatgtcccaggccatcagaccccttcagacttggaccaattcagtgacagctccctcatagaggactcacaggcactacacaagcgtcctaaattggattctgaatactactgctttggctagtgacagttttttgcatgggactggtgtgcaatgaacttgtatttatccttcttctccgctgctatatttttggtgtgatttttattttaataagatgacctttttaaaagaagctgattttgaaactgcttaatggtattgctgttgctcctaatacttctcatctgagctgatttatttttctctgttacatctctattttttatttattacaatgattttctcccttcttttacagtagcacaaacaaagtagggggaaaagaataagcaataattatgtttttgcttttgttttcagagcaatgggtcagggattacaagaaaaactttgctaaattttacaataaaccaaagtctgataacagtt

SEQ ID NO: 928 - DNA, 2278 bp, Homo sapiens
agtgctagcgctcctctccagcatgctgcggcggggcagccaggcgctccggcgcttctccactggccgggtttatttcaaaaacaagctgaagttggcactaattggccagagcctctttggacaagaagtctatagccacctccgcaaagagggccaccgagtagtaggggtgttcacagttccagacaaggatggaaaagctgaccctctggctttggctgcagagaaagatgggacccctgtgttcaagcttcctaaatggagggtcaagggcaagaccatcaaagaagtggcagaagcctacagatccgtgggtgcagagctaaatgtgctccctttctgcactcagttcattcccatggatataattgatagtccaaagcacggctctatcatttatcacccatccatcctgcccaggcacagaggagcctctgctatcaattggactctaattatgggagataagaaagctgggttttctgttttctgggctgatgatggcttggatacaggacccatccttcttcagagatcatgtgatgttgaacccaatgatacagtggatgcactttataatcggtttctttttcctgaaggaatcaaggccatggtagaagctgtccaactcatagctgatggaaaagctcctcgtataccccagccagaagaaggggcaacatatgaaggtatccagaaaaaggaaaatgctgagatttcttgggaccagtctgccgaagttttacataactggattcgaggtcatgataaagtccctggagcttggacagagataaatggacagatggtcactttctatggctcgacattactgaatagctctgtgcctcctggagaaccactggaaattaaaggtgccaagaagcctggtctcgttaccaaaaatggacttgttctttttggtaacgatggaaaagcactgacggtgagaaatctgcagtttgaagatggaaaaatgatccctgcctctcagtacttttcaacgggtgagacgtcagtggtagaactgacagctgaagaggtgaaagtggcagagaccatcaaggtcatctgggctggaattttaagcaatgtccccattattgaagactcaacagacttctttaaatctggagcaagctcaatggatgttgccaggctggttgaagagatcagacagaaatgtggtgggcttcagttgcagaatgaagatgtctatatggccaccaagtttgaaggctttatccaaaaggtcgtgaggaaactgagaggagaagatcaagaggtggagctggttgtagattatatttcaaaggaggtcaatgaaatcatggtaaaaatgccataccagtgtttcataaatggacagttcacagatgcagacgatggaaagacttacgacactatcaacccaacagatggatctacaatatgcaaagtatcctacgcttctttggcggatgttgataaagcagtagcagcagcaaaagatgcttttgaaaacggtgaatggggaagaatgaatgcaagagaaagaggaagattgatgtatagacttgcagacctactggaagagaaccaagaagagctggcaactattgaagcccttgattcaggggctgtctataccttggccctgaagacacacattggaatgtctgtgcaaacattcagatattttgctggctggtgcgacaaaattcagggttctactattccaatcaaccaggcccgtccaaatcgcaatctgaccttcaccaagaaagagccactcggtgtctgtgccattattattccctggaactacccgctgatgatgctggcatggaagagtgctgcgtgtttggcagcaggcaataccttagtgctcaagccagcacaggtcacacccttgactgctttgaagtttgcagaactgtctgtgaaagcaggctttccaaagggggtcatcaacatcattccaggctcaggtggcatagcaggacaacgtctgtctgaacatcctgacatccgcaaacttggtttcactggttccactcctattggcaaacagatcatgaagagctgtgctgttagcaacttgaagaaagtttcccttgagcttggtggcaagtctccacttataatatttaatgactgtgaacttgacaaggctgtgcgaatgggcatgggagcagtatttttcaacaaaggagagaactgtattgctgctgggcggttgttcgtggaagaatccatccacgacgaatttgtgacaagagtggtagaagaaatt

SEQ ID NO: 929 - DNA, 2519 bp, Homo sapiens
ctttttaagctcctccccttttcttaccatatttactccttaggagtgagaggttagaagttctttgccccagctagagatatcatagcagatttctacttacaccacttccctgtttctctcagtaattgtttccttccccagagaagagttaatactgtttgtaattcctaaagcccctaaaatgaaaatgtacacacttattcttgttcttctacgtaaactatcaggaggaaataaaatcatgccacataacgatttaatttttatgtttttagagacagggtctagcttggttgtccaggccgacatgcagtggtgtgatcatagctcactgtaaccttaaacctgtcggctcaagtgattctcccacctcagcctcctgaatagctcggactacaggcacacaccaccatgtccagctattttttttcgtagagatgaggtcttgccatgttgcccaggttggtctccaactcctgggctcaagtgatcttcccagcttggcttcccaatgtgctgggattacctgcatgagccagcatagctggccactcataacctttcagtcaacaacagatgtcatacatagtattggtctcacaatattaaaatactgtatttttactttttttctatgtttagatacacaaatatttaccattgtgttacagttgcctacagtatttggtacagtaacatgctgtaagggtttgtagcctaggagcaatagactgtatagatcatctagcctacgtgtgtagtaggctgtaccatctaggtttgtgtaagtacactgtgatgatcccatgacagaatcacctaatggctcatttctcagaacatatccccatccttaagtgattgatgactatatttttattttgtacaaagatgtacttctgaaaacctaagtttaagtcaacttttgtgagttgtataatttcaaatatcttagctaggtgtgttagagaaattctgtgataattttgtagaacaaaggctctgtaattttctaattttattaattatataaatctagagatcttaagttgggtttgcttaaagtgaagcatactttttgttgcctgttttgcatttaggtattaaacttagttgtacagtctgtttaatttaggttactaaatttattccccttattatagcactcttaacttccattgttccaaaggaaaatttaatgctgaggaactttgccttgatgagaatgtggttttttaaaatacccaggtataggccaggtgtggtggcttatgcctataatcccagtactgtgggaggccaaggcaggaggatcacttgacgctaggagtttgagaccagcctgggcaacgtagcaagaccccattactacagaaaaaataaaaaccaattagccaggcatggtgggcatgtgcttgtagtcccagctattggggagcaagagcctgaggcaggaggatggcttgagtccaggggttcgaggctgcagtgagctatgattatgccactccagcctgagcaacagagcaagaccttgtctaaaaataaaattaaattaaaaaatccagttagagaggataagcgtattttacgaatagagcaaagcaaagtctagaattggcttccctgcgcaagaataccatattactgtttggaaaagagaagttgctacctctagaccaacagtcaagggcccttcagccctggcggggaaaacatacactattcgtttaaaaaatgaaaataagctgtttagcattgccagtattcttcctaaataataatcctatcaagacaccctagaatagaaaatgtcctgtttccatgttctttgtaatgtctacctttttttaacactataaatcttagatggcaagaataacaatattaagaattaaaatttgttacgatgtttataaaaatctcaggatatgttgttttttaaaatatcttatttttataagctctcacatccagtatgcagttatttattccaaatactttccctccttacctccccccacctcccttgctgcttagatggtggtctgtcggagaatcaatgttctttttgtctacccatctcccttcagtcttaataaaaggtcttaaacagttacatgagaaccaaaaaaacaacccaacgcttttggagaataaatcaggatctggagttccaaacagtaataccaattccagtgtgcagcatgttcagataagagttgcccgcttggaagataatacagccatctcttctagccccatggcagcattgcagattccagtccagatcacccatgtttcttcagcagactctcctgctaccgttgactcagaaacaataacactaaacagtggaacactacagacatttgagattcttccctctttccatctacagcccactggcactccaggcacctacctacttcaaacaagctcaagccaaggccttcccctaactctgactgctagtcccacagaaccctctaaatccccttgtaaatttaactgtt

SEQ ID NO: 930 - DNA, 2973 bp, Homo sapiens
atttcagaaccaggttctccttcgaggaacagagaaaatgaaaccagcagacagaatttgtcagaatgtaaggtatggagaaaccctctaaatcttttcagaggagcagaatataggagatacacttgggtgactggtaaagagccacttacatactatgacatgaacctgtcagctcaggaccatcagacctttttcacctgtgacacagattttttacgtccttcagacacagttatgcagaaggcttggagggaaagaaatcctccagctcgaatcaaagcagcctatcaagctttagaattaaacaatgactgtgccactgcatatgttctactggctgaggaagaagcaacaactattgtagatgctgaaaggttatttaaacaggcactcaaggcaggagaaacaatttataggcagtcacagcagtgccagcaccaaagtcctcagcatgaagctcaactgaggagagataccaatgtactggtatatattaaaagaagattggcaatgtgtgcaagaaaattaggaagaataagagaagcagtaaaaataatgagagatttgatgaaagaatttcctcctcttaccatgttgaacatccatgaaaatctcttagaatcacttttagaattacaggcctatccagatgttcaggcagtcctagcaaaatatgatgatataagccttccaaagtcagcagcaatctgttacacagcagcactgttgaagacaaggactgtttcagaaaaattctctccagaaacagcctccagaagaggattaagcacagcagaaattaatgccgtggaagcaattcatagagctgtggaatttaatcctcatgttccaaaatatttattagagatgaaaagtttaattttacctccagaacacattctgaaacggggtgatagtgaagcaattgcctatgctttctttcatcttcagcactggaaacaaatagaaggtgctcttaatctgttacagtgtacatgggaaggcacctttcatcatgtttctgtttacccaaaaaaggagcttcctttgttcatccatttcacagcaggattttgctcttctacagcaatgatagccattctcactcaccagtttcctgaaatcatgggtatttttgctaaagctgtgctgggactctggtgcccccaaccctgggcatcctcaggctttgaggagaatacacaggatttgaagtcagaagacctaggtttgagttctggctgagccacgcactgttcatgtgaccttggacaaatcaccaaatttttctgaacagcatctgtaaagtgacagtaacccctacctcacagggttgttgtgaggattacatatatgctaaagcattttgcatatgaaaaagcttcttatgaatattgttattcctaggcaaaccccccttggaagctgtcaaaaaggacaactgtagatgaaattgtcttccttttttcttcattcagcttagcctttctgtttggccagggctacttacaggggctgttggggttgaagtcaagtcaccgcattttggctcctttggtcaaagagaaagaactctaatgtccagctgctccatcgatatactcatagaatggaagtgagcaaaggaaaattttaagccaggatagttaaccgttagggggccagtgggagaatgcttgccttgcatttgcacatccagaatgactaaaacatcttaagtaaatgaggaatagccaccgagatgctcagagataatataagccatgagtgggaagtgggaaaatgagtttgtcaacgccctctcttttctatccctttacctttgaggtcagggacagggcatattactgacaccccactggctattgccctatacctgccaatcacccaaagaaaataatagcttctgagaaagctcaattcactgtagcaactgtgatatatttaccctaataaagccaccacttggtcttttccagtgcttctctcttatggagatcatccctggaatccaaagctctccagttttctaacccagttaagagttaaaaacaaccacaggtcatgagcagtaggcttggcagttacaccccatgcagtcataggagactgctccatcattctcagcacatagggtgcacatctcactatctctggcatgaaccagccttgcgaacttatacagtctcagccactctgctttgatggtaattcttcaccactgatctctcctcaccatgcccttcctgcatccttcccccaaccacccaccagaggagttctggtccccaaaccaaagagttgcctgcaggttggtaatgtgactttgtagatattccttgattaaagccagaccctattggtatcctttttgaagtactggatcgaaatctaattgcttttttttttaattgttggggagaggaggatgagcagaactcctatgcagcctgagagaagttctctatgtgtctgtatatgtacacctctgtgtgtgtgtgtgtaacctcatggttgtgctcaggctgacagggagggcaaagagtgaaaaggaagcatctctttcttgttatccaacattgcttcaaagatgcccaacccccgtagtagcaggcagttcccaagtggagggtcggggcagaggcctccaccaaggccatcaataaccaggtgtgagctacaggtctctgtgtaatgtgaagctctcccgtatttcatttctgcacccagggggcggctctgcaggattgcttacggagaactctgtgtctggcacctctctccacaaggcccaggcgcccaggttcccaccgacctgcccaggaatgcatcacattgttctctggtgctgtaatttggctgcaggagctaggctgaatgcctcccagggatgagaaacatactctccctggcgtcctcccttcgccccagctagcttgagcttctgccctatgaccactgagtgcattt

SEQ ID NO: 931 - DNA, 2944 bp, Homo sapiens
tgttggcctactggctcagttccctccgccctcctcgggcaccagcggtggcggagcgaacgggaccggcccggcttcagagcgcgaggtggagggtggaacgcgggcgcctgaaggagttgttgtctcggcagcgcccgcggagacgtgaagaggtggttgtgggaagagaagtttgcagaactgaaatggaggtcagagcttcattacagaaggttagtggatcatctgattctgtggctacaatgaacagtgaagaatttgttttggttcctcagtatgcagatgataattctacaaaacatgaagaaaaacctcaactgaagatagtttctaatggtgatgaacaattggaaaaagccatggaagagattttgagagattccgagaaaaggccaagcagtcttcttgttgattgtcaaagttccagtgagatttcagaccattcgtttggagatattccagccagccaaacaaataagccatctcttcagttaattttggatccgtctaacacagaaatttctacacccagaccatcttctccaggtggactacctgaagaagatagtgttttatttaataaactgacctacttaggatgtatgaaggtttcttccccacgtaatgaagtagaggctttacgggcaatggcaaccatgaaatcttccagtcaatacccctttcctgttaccctgtatgtaccaaatgttccagaaggttctgtgagaattatagaccaatccagcaatgtggagatagcatcttttccaatctataaggtgttattctgtgcacgtggacatgacggaacaacagagagcaattgctttgcatttacagagagttcccatggttcggaagaatttcagatacatgttttctcctgtgaaattaaagaggcagtaagcagaattttgtacagtttctgtacagcattcaaacgttcttccagacaagtgtctgatgttaaagactcagttattcctacccccgacagtgatgtgtttaccttcagtgtctccttggaggtaaaagaagacgatggaaaaggaaactttagccctgtgcctaaggatagagataaattttatttcaaattaaagcaaggaatagagaggaaggttgtgattacagtgcagcaactttctaacaaagaattagctattgaaagatgttttggaatgttattaagcccaggtcgaaacgtgaagaacagtgacatgcatttactggatatggaatccatgggaaagagctatgatgggagagcttatgtcatcactggcatgtggaaccccaatgcaccagtatttctggcacttaacgaggaaaccccaaaagataagcaagtatacatgactgtggcagtggatatggtagtcacagaggtggtggagcctgttcgctttctcctggagacagtagtccgtgtgtaccctgcaaatgagcgattttggtatttcagcagaaagactttcacagagactttcttcatgagattgaaacagtctgagggaaaaggccataccaatgctggagatgcaatatatgaggtggtgagtctacagcgagagtctgacaaggaggaaccagtcactcctactagtggagggggtccaatgtcaccccaggatgatgaagcagaagaggagagtgataatgaactctcaagtggaacaggtgatgtgtctaaggattgtcctgagaagatcctgtattcttggggagagttgctaggaaaatggcacagtaaccttggtgcacgaccgaaagggctgtctactctggtgaagagtggtgtccctgaagcattgagggcagaggtatggcagttattggcaggctgccatgacaaccaggcaatgctggatagataccgaattcttatcacaaaggactcagcccaggagagtgttattactcgagatattcatcgtacatttcccgcacatgattactttaaagatactggaggagatggtcaagaatcgctctataagatctgcaaggcctactctgtgtatgatgaagacattgggtactgtcaagggcagtcttttcttgctgctgtattactgctgcatatgccagaggaacaagcattctgtgttttggtgaaaatcatgtacgactatggtttgagagacctctacagaaacaacttcgaagatcttcattgcaaattctaccagttggagagactaatgcaggaacagctaccggacctgcatagccatttttctgatctgaacctggaagctcatatgtatgcatcccagtggtttctcactctttttactgccaagttcccactctgcatggtgttccacatcattgacttactgctttgtgagggtttgaacataatctttcatgtagctttggctctcctaaagacctcaaaggaagaccttctgcaggctgattttgaaggtgctttaaagttctttagagttcagcttccaaagagatacagggcagaggaaaatgcaagaagactgatggagcaggcttgcaatattaaagtaccaaccaagaagctgaagaaatatgagaaagaatatcagacaatgcgagagagtcagctgcaacaggaagacccaatggatagatacaagtttgtatatttgtaggtaactccagctgttgcatttatactgggaatcttcataagaagctgagagaaagagaggggaaaaagaaagtggctttctactttcaaaaatgaaacaaaaaggaaaaatggcaaagtactgttttagctgtgcatgtcatatccacaaagacttttagcaggtgaactgttccaagactgacacaaggatgtttcaaacttgcctctgtctgtagaaaatgttaaaaataccaactcacttggaaggaaaaataaaaatcacaaaggtatattgaaaaaaaaaaaaaaaaaaggccacatgtgctc

SEQ ID NO: 932 - DNA, 2358 bp, Homo sapiens
tcagcggtgcggaagcggaagtgaagggtgcgcttggcggcggcggcgggagctgcggagtcgggaatcaaaacaaagggcctggggggggcggggggaaggcggcggggccggaatgtgagcggaggtggagccggcggcagagggtggaagaatgaaagaaaagaaagatgaaaggatgttgaatcactttgcatggctgtatgatggaaagaaacggaactgagaactcctgcagtagaacacgtggatggcttcaacaagataatgatgctaagccatggctttggaaattctctaattgcttttctcgtcctgagcagacgctgccacatagtccccaaacgaaagagtacatggagaacaagaaagttgctgtggaactaaaggatgtaccatcaccccttcatgctggctctaagctttttccagcagtcccacttcctgatattcgttctcttcagcagcctaaaatacagctttcttctgtccccaaagtaagctgctgtgctcattgccctaatgaaccctccacttcgccaatgcgttttggtggtggtggtggcggtagcggaggtaccagtagcttgattcacccgggcgcactgttagactcgcaaagcaccaggacaatcacgtgtcaggtagggtcagggtttgctttccagtctgcatcttcactccagaatgcctcagctaggaacaatttggcaggcattgcaagtgactttcccagcatgtgtctagagagtaacctgtcttcctgcaaacacctgccctgttgtggaaaactccacttccagtcatgtcatggtaatgtgcacaagctgcatcagtttccgagtctgcagggctgcacctccgctggctatttcccctgttctgatttcacaagcggggctccagggcatttggaagagcacatttcacagtcggagctaacgcctcacttgtgcaccaactctttgcaccttaatgtggtacctccggtttgtttaaagggctcactttactgcgaagactgtctaaacaagccagcaagaaatagcataatcgatgcggctaaagtctggccaaatataccacctccaaatactcaacctgcacctcttgctgtccctctgtgtaatggctgtggaaccaaaggaacagggaaggagaccacgttgttattggcgaccagtctaggcaaagctgcttcaaaatttgggtcaccagaagttgcagtagctggacaggtgctagaaaacttaccccccattggagttttttgggatattgaaaactgctccgttccctctggccggtcagcaactgctgttgtgcaaagaatccgtgagaagttttttaaaggccacagagaagcagaattcatctgtgtatgtgacatcagtaaagaaaacaaggaagttattcaagagctgaataattgccaggtaaccgttgcccacatcaatgctactgcaaagaatgccgctgatgataaactgcggcagagtctccgcagatttgcaaatacacacactgctccagccacagtggttcttgtgtcaactgatgtcaattttgcattggaacttagtgacctgagacacaggcatggtttccacattattttggtccataaaaaccaggcctcagaagcactgctgcatcatgctaacgagctgatcagatttgaagagttcatttccgacttgccccccaggttaccactaaaaatgccacagtgccacactctgctctatgtttataacctaccagcaaataaggatggcaagagcgtcagcaacaggctcagacgcctgtccgataattgtggtgggaaagtgctgagtatcacaggctgcagtgcaattctccgcttcataaaccaagatagtgcagagcgcgctcagaagcgaatggaaaacgaagatgtctttggtaataggatcattgtgtcatttactccaaaaaatagagaactctgtgaaacaaagagttcaaatgcaattgctgataaagtgaagtctcccaaaaaacttaagaatccaaaattgtgcctcatcaaagatgcaagtgaacaatcttccagtgccaaagccacgcctggaaaagggtcacaggcaaattctggatctgctacaaaaaatacaaatgttaaaagtttacaggagctgtgccgcatggagtcaaaaactggtcatagaaacagtgagcaccagcaaggtcacctgaggctggtcgtacccactcacggtaactcaagtgctgcagtgtcgacgccgaaaaactcgggggtggcagaacccgtttacaaaaccagtcagaaaaaggagaacctcagtgcccgaagtgttaccagttctcctgtag

SEQ ID NO: 933 - DNA, 2005 bp, Homo sapiens
caatttttctatgacccaatgtaaggcttctgctgcttgttctacataattaaggccctgctaggtgtcatctttgatgggtggtcctggctttcacaagctaattttaagaccctacctcccatcatgtgcttacttagttaatgaataaagcaagcataccattaagtggaattaaatcagacttgttttcagttaaaatagcgggatttctgggtaattccatattggaaactagctggtttctttcataagagaaatgtctctggtggatcttggttcataggagagaatcatatatttcaaccaccaacagtcagtgagaatttgtgttcatttccttccagtttcttatcactgctaattttccttcactggctgtcggcctgtgaaaactccatgggtgttcagttaatagtgttggctcaaatttggatccaaattaagaaatccaagtagccttcacgtttggcctctccattcatggtaacgccctcttcctcaatgcctaatcaaggagtttctgcagtgcacagctctgccaggttaggatccaggagacagatgcccagatggcagagaaggcaggtgtttgtgtgggtgatacagcctctccctgcgtgactgtaagaggaggccacagcagccccgggcacaagcccatacttggatgacatacttgcatgggacatacccagagcctgtgagcagggtctgctcacaccacacccttgcccttcaagagagccatgcaagaggacctttgagtctttgtgacaaaggtttggtggggttaagaaggttgcggtgtcactttaagtttgaatttctttgcttttcttggcttatgctattcttaatcttaaacaggaattttctgtttgcagcgaacttgtgcaggaaagagaacatttttacagaaagagatattcttggcaaacatgtactatgtttccttcatgttattgaagagtgtttcaatacagcatttttgtttgcttgttttccttatggctcactttccccttctgtttgcttttatggtgaattacagtccaagtctgccacagaaacaattaatgaatgatagttggtgcatgcatgcacacacacccacatgcaaaaaccttttatttggagatgcttttatactttatgaccacttgaagtctctccaattgttacatactgagagtgtaaaacattgagataataacttatacaaatagtcacaaaatggagaattgaatattggctcctgagttactctctcctattacccaaaagcccatgatacacagcctgttgtaaatatagtttcttttcaccttgaaaacattgccataaaactgaaaacactttctaaagttgtaaatttctattagcatattactgatgatttttaaaggagactttccattaaaaagaaatgataattttcttaattgcaagattaaacatggaaggtaaaagccatatgaaaatgataatactcataaaataagagtacctctggtcattagaaaactggaaagaaaaagattacagaattactagattaataggttgtggtcatctctgaaaattatgcttagtagaagatattagtgagtatttctataagtcagttaatattcaccaatattttggtaactccataaagcaaggcttagaataaaatcctgatatgactaaagaaatgcgctcagctgggcgcagtggttcacgccttaatcccaacactttgggaggccaaggcgggtggatcacctgaggttaggagttcaggaccagcctcaccaacatggtgataccccatccctactaaaaatacaaaaaaaaaaaaaaaaaaaaaaaaaagccaggcgtggtggcaggcacctgtaatcccagctactagggaggctgaggcaggagaattgcttgaacccaggtggcggaggttgctgtgaaccgagatcgcaccattgcactccagcctgggcgacaagagcaaaactccatc

SEQ ID NO: 934 - DNA, 2284 bp, Homo sapiens
aaccacatcgcccgaccgtgctctttatttttcggtggagcagctctgctttctcaggtctctacttacttatataagatggcatcaagaagaaggacctgaccactggcccctgactacatggtctttggaacccgtggcattggaagatgtcagagacatggcacatggatgtgatcttcaaaaactgttacagcctcatctcattggattggtctacacatcaaggtgctggaagtgtcgcatgcccagagatgatgtggaagctctatacccctttcccttctgcccaccttgccctgtgcatctcttcctgaatggcttctcctgaattgtatcctttataataaactggtaaataggaaagagataatatcttctacttaatcctggatactatatctgaagtcagagcatccactccaaagcagagaatttctgaaaaacaaaataatgtcatcatatgatgttagaattttttttcaaatgatggttcctaatacttcacattagaagaactcgaatttgatgaccagtttgagaaacaccagtatatcaagattacaagaaaaagcgagtcaaaaggatgatcatgaatataacaacttcgaggaaacatttaaccaaagaccaaagctttttaaacaactgagagtttttataagaaaaagacctcatacagtagtccccacttattcatgggggatacatttcaagacccacagagaaggcctgaaatcactgatgtaccaaaccctaaccaggttcttaggatgagctactaaatgacaaatgggtgggtagtacatagagtgtagatacaccagacaaagaaatgattcacagcccaggcaggacagagcagatcacacaagatttcatcacagtactcagaaaaccacaccatttaaaagttatgaattgtttatttctggaattttccatataatatttttgaccacagtttcccatggataactgaaaccatgggaagtggaactgtggataaggcaggactactgtaactatgacatcaatggtaggaacctgaagcataattctgctgtagtggattttttcaaaagaaactcatgaatgaaaaataatttattagatataagaaaggatgcatttgtatctcaaactttacttattctggaaataaatgaaaagccaacacctattacataccgacaaaaatgaaaaaataaataaatataaagccatagttcagtactgatggaatctgagaaaatttatatgaccgcgaacccatatctctgtactgaatgtgggaaaggctacacttgtcttgcatccctgacccagcatcagaaaacacatattggagaaaaaccttatgaatgtaaaatatgtggtaagtcctttacccggaacagtaatcttgttcaacatcaaagaatacatactggagagaaaccttatgaatgtaatgaatgtgggaaagcttttagtcagagcactaatcttattcagcatcaaagagtccatactggggagaaaccttatgagtgtaatgaatgtgaaaaaacctttagtcataggtcatcccttagaaatcatgagagaatccatactggagaaaaaccctatccttgtaatgaatgtgggaaagctttcagccatatctctgcccttactcaacatcatagaattcatactggaaagaaaccatatgaatgtactgaatgtggaaaaaccttcagccgcagcacacacctaattgaacatcagggaattcattctgaggaaaaatcctaccagtgtaagcaatgtcggaaagttttttgccacagtacatcactaatccgacatcagagaacccacacaggagagaaaccatatgaatgtaatgaatgtgggaaagctttcagccataccccagccttcattcaacatcaaagaattcatactggagaaaaaccctatgagtgtaatgcatgtggaaaggccttcaatcggagtgcacatcttactgaacaccagagaactcatactggagagaagccctatgtttgtaaagaatgtggaaaaaccttcagtcgaagtacacaccttactgaacatctaaaaattcattcttgtgtgaaaccctatcaatgtaatgaatgtcagaaactgttttgctatagaacatcactaattcgacatcagaggacgcatacaggagagaaaccctaccagtgtaatgaatgtgggaaatccttcagcttaagctcagctctaactaaacataagcgaatacatacaagggagagaccct

SEQ ID NO: 935 - DNA, 2235 bp, Homo sapiens
gtaccaaggctggagggcctgggccctggtcaggccagcacaagggcaaagggagaccactctggtggaaaagcccaagaggtgctaagcggtctctggggaatgggaccccgcggtggagggcaagatcccaaaccaaggctgggctacagggtagaggtgccagggacgcgaccgcactgcagcacacccacctgcttctcaatcactgtgcagggagggtagtggcactcatagtaggtgcaagagttctcctcctcttccactacatccccgttggcattataataccgggtcacatttaggacaggaaactgttcttctatagggtctgtaggcagctgctgaattgcaagccaatacaagctttgctcccttaaagaaagaagcagacacttgagtgcactctggccaaacggggccagcacacagcagacgatgcaatgactccatagagtgccatcctgcccaggacacccagcccgagtttgagtctcctttggcccatccctgctgcatgtgcttttcaccacctgacagtaaatattgtgtctcatcttcccactaacccgtaagcatggcctcatctatcaccctctccccagcacctgggactgacaggcacacagtaggcaggagacagggcccaggtcaggcccctgtgcaaagcgaggcggcccctctccttgcccttgacctgcagaggtgcccattactgccccgtcggtccacttccccttccataccgggagctgccctacgtccgtctaaaaactcctcctgcttgagtaggccagatgcctacaacgggagagttctaccaagaacggagcctcaaaggcatgtgcactggctgctcagaggcaagcgtgggcagccccagccctgctgcatcacggagtaaagaagctgcataaaccaccccaccaaccccgttctccgaagccagaccctgaggagacttggttaaaacggggaaggatcaggacatgggaagatgttggtgaggtcccaccagacagaggcaagtttcagacactgctggcttctgaagacagaacaggaaaacacccctttgccaagaggccccttttgtgggggctgagctgacacagtgccaggaaagcaaagcaatagcccaggcctgacaaagacagggtgaccccaccacaaagagccggaccacagggaggccacagactgggatccagacggacgcacagcacccagccagtcaacaaagacagggtgaccccaccacaaagagctggatcacaggaggccacagaccaggatccagacggacacacagcacccagccagacaggatgtcaggcccacactggccagctctgacttctgctcggggcctggggtgctgacccagcacaagaggcccaacacctgctgggttctaaaaccccatgttggcaaaccaaagatggctgagcctgatcagtcctgagccaccccaggcccacctcctgtagcagggggttgtgtaaggcagcagccccagcgcaactcgtcctgctgtgccctcagagaatgggcatcctgccgtgcccacagagaatgggctgaccaggagcatcagcccaacaccccctttccaaacggctgttcttaacggcagttatctcctctcctgattataaagggtgctgagaggattcaaggtaacattcagtcacaggctggccggaccctgagtcttgttgagaaccggctgaaatgacccgcaccatggcagggacagaaggcattgccaggtggagtggtgagcagcgggcgaacttgcggagttgggaagggcccatcccagcatcaacactgagcatgtatcaatgtgggacaacgcaggaggagatgctacagatgctgctctgcctgccaagcacgccttccccttccccttcccttttcatgtagaaaagtgattctaagcaagctaactacagttcatcccagggcttccccagacaccactagaacagggtgcctgcttcagtccgcaagtgctaggtagtgcccatgccgcctcccagagaggagccgggagtgggggcgcagagctggaggcagcagcatccctggctctccacatttcagtcaggataccaaaatgtaccctatttttgtttcagccaaattgacctttgtttctgtttcttgcaacccaaagttccaactaacataatccccgaaagaataaaaaccccattcaacaatcgt

SEQ ID NO: 936 - DNA, 2091 bp, Homo sapiens
tatccaccgacagtgatgagcatcttgaagtcttattaaattcccagagccccctaggaaagatgagtgatgtcacccttctaaaaattgggagcgaagagcctcactttgatgggataatggatggattctctgggaaggctgcagaagacctcttcaatgcacatgagatcttgccaggccccctctctccaatgcagacacagttttcaccctcttctgtggacagcaatgggctgcagttaagcttcactgaatctccctgggaaaccatggagtggctggacctcactccgccaaattccacaccaggctttagcgccctcaccaccagcagccccagcatcttcaacatcgatttcctggatgtcactgatctcaatttgaattcttccatggaccttcacttgcagcagtggtagaatgcccaatgcaccagtgctatggaagaccaatggagttccatgggggaaagcacacagccatacatactttactgtccaaaaacagaagaagaagaagagaattaaaaagaagcaatgatttctgtgccaatgaacaagaacaaaagtcatttttagaaatacatatactgtaatatttaccaacagtcagtaactgttaatgatttcaacaatgcattaaaagaatgtgctttctcagattaaggatgccaaaaaagatatttcactgccttttcaaagaccagtatattttctagcccataatttttctcaggcattgttggggcataagctcacactgtaagcttttctcatgaattcactagacataacgtggaaggaaaacgtagtcttttgggagtacagggaagccagcccctcaaagcttatggaagacatacctcaatggaagctgttgcccaatgtctccattactatctttcaaaagagaagccagacccagcttcagatcaaaagttcttgagacagaggaacaaaaccaatcgatttccagggaagctaatcaactctctcttccctctaccacaaaactgccctgctggagtggttctgaacctgtacccaggactcgatgtggtcactaataacaattaacctgaactgagtccacagaactccactcggaactttcttcttttttaactagtggcccaatcattcccaccatctctgtgctgataagtacgtgtcctagatgagaaccctgaagaatgcagaccttcttcccccgaaggagatgccacaagctctccaacacagccccctttagttccaaagactagagatgaccacattggtagaagtatatctcgaggcacaggaagggagccccaccagggataattcagacaggactagagaataacatcatttcacataccctgggataaacaccctgggttcctatagaaggactattacttatgggagtccaacttctccttttgttttattattatcagtttatctttctcccactccacttttccttcaaggtaccaatcctttcctgttcctcgtttggccatctttctttttctgcctccacattgggaggggaggacttctcagttctaacaagctgccatactcctaagaaagccatttttgaaaaatttaacaatccaggttcttctggagaactcattctccacacgcacagtttgctgcaaaaggaagttgcaagaatttcttgaggaagaaactggtgacttggtccatcagtcacgaagttctttctattctcgtttagttttcaagaaattattggtttgtgttgctctggggaaattggaaatcattacattgtaaagacaaatatggatgatatttacaggagagaatttcagatctgggtttttgaaagaaaacagaattgcgcattgaaaacgatggaaggaaaaagacaatggtctaatgtgcattcctcattacctctcgtggctttggctgggagttggaaaaagctaaaatttcagaacagtctctgtaaggctctctgtggctccagttcaccattttatattgttgcatgctgtagaaaggagctattgctgttgttttgtttttttatttaaatcactaaggcactgtttttatcttttgt

SEQ ID NO: 937 - DNA, 3241 bp, Homo sapiens
ttccccttcaagttgtagttgccactgacactttggtctgtcctttccctacacctccccatctttcttcctgcatcttcagtttatttacagagacacatggccagggcttttttggggtgtgcaggttgtattttttctttcttttttttttgttggagcttacatatccagtagggattatatttttttctaagaaagacgagattgtgttaagctgttctactgctttctttccccactagcagtatgtccaggagatctttccagatcaggaaacacagattgacctttttaatctttttaatgaccacagagcattctattgtagggaccagcatttccgtatcgactgggttgatggtttttcagaagtactttattcattccagagggagaacagagaggaaataatggcaggaagtcacagcagcccagaaacagccccttccaaagggcaggctgtgaccccacggcaactttgcaggcacctcccttgatttcctgtgggttcctcaggtagcccatcaggcaagagctgccccaggacgggtttaacagcaggaagatctgggtagctcagatgggctctggatcacgctgctgggctggaatcttagctcccgcaaccataggggtagcccctgagccagtcccttcacctctctgaacttcagtcttctttcttatctgtgaaacagggatgatgggagtcagtgcctcctggttttttggaaggattcagttagataaggtgtgattcctcgtcccccagggtggaccgcattgccagaaatgacatgaggccaccttgcttctcaggccgtgcctcatccttgactcctctcctcctctcacagtcacagccagtccagtggcaagggctgccgactgtgccttcccaacatggctgtcctgggccacttcctggttatcctcacctccaccctcattcgagctggttaaaagcttacatcagagtccatccctctgctgttcagaccttctggtggcttctcttctggctcagagtaaaagccaaagtcctggctgggcgcggtggctcatgcctgtaatcccagcactttgggaggccaaggcaggtggatcacttgaggtcaggagttcgagaccagcctggccaacatggtgaaaccccccatctctactaaaaatacaaaaattagctgggcgtggtggcacacacctgtaatcccatctactcaggaggctgaggtaggaggattgcttgaacccagaaggcagaggttgcagtgactcacctgaaatcttgccactgcactccagcctgggtgacagagcaaggctctgtctcaaaaaaaataaataaataaaagccaagtccttagctctgcctcccaggtcctcccatgcggacctggctggctcgctgccctcaccttctgccttgttctctggccacaccagcctccctgttgttcatcagcaccgccaaacgcactcctgcctcagggcctttgtacctgctttccctgctgcccagaccatctccctgatgacctgaggtctctcctcatgcatggcctcatcagagaggcctctcctgaccatcctgtcaaaatagccctgtcttgtctctggcaaaacaaagccactgaagaatgagagaggctattttctcccctggccacctccctagaggagctgctcccctgaggggcccagcggggacccttgtgccctggatgccgactcctggtgagtgctggctctccctgtctgtgtctgctgcaggtgagaagccctacaaatgctcagtgtgcgagtctgcgttcaaccgcaaggacaaactgaagagacacatgttgatccacgagcccttcaagaaatacaaatgccctttctcgacgcacacaggctgcagtaaggagttcaaccggccggacaagctgaaggcccacatcctctcccactctggcatgaagctccacaaatgcgccctgtgcagcaagtccttcagccgccgtgcccacctcgccgagcatcagcgcgcccacacgggcaactacaagttccgctgtgctggctgcgccaagggcttttcccgccacaaatacctcaaagatcaccgctgtcgtctcggcccccaaaaggacaaggacctgcaaacccggcggcccccccagaggagggcagccccccgcagttgcggcagtggtgggcgcaaggtgctgacccccttgcctgacccgctggggctggaggagctgaaggacacaggggctgggctggtgcccgaggctgtccccggcaagccgcccttcgcagagccggacgcggtgctgtccatcgttgtgggtggtgcggtgggcgcggaaactgagctggtggtacctggacacgctgaggggctgggctccaacctggctctggcggagctgcaggctggggccgagggcccatgcgccatgctcgctgtgcccgtctacatccaggcctccgagtgacggacctgaggtgtctgtttcctgggcaggcctgatgctcctgtttgggtccagggcccctgggggcagaccggtgatccttaccagtggaagcgagccatcgagccattggcagaaatcctgctgaatgtcattcagaaacctcagcccatggtcgccctcctgtgcccctctcctgccggaaagccctgcaacattctagggttgggggcagggccatccacggtttctgggcagagccatggtggcaggagagagatggctgaagcctgagcagcccagagtcccgctggtctaggctggtggtcggggcccctgggagaggagacagggcattcctccccactctgtctccaggctgcctctgggtagcctctagtctgctgttcttcaggaggcctgccataaactcttcggagtttacgtgttgcaccttttcacagacggttccccacagcatcctcagacagctctgtgatgtagcttttaggaggcactcaggtgtcacggctagactgcagctatgagacagatctggcttcaaatccaagagttgccatgcacttgctgtgtgaccttgggcaagtcacttcacttctctgagccccgtgttcctcatctgtacaatggggcttacgatactactacctcatagggttgtcctggggatccagtatgatgaagtgcgccaggggcttggcatggtgcccggcacgcagaaagtgctcaataaatgtttttgtcataacgtg

SEQ ID NO: 938 - DNA, 3044 bp, Homo sapiens
agaacccggctcctgcaccggctgcggcacgccttggccggcgacggccccggggaggcggcggccagtccagaggccgagcagtttccggagagctcagagctggaggacgacgacgccgagggcctgtcctcccgactcagcggcaccctcagcttcaccagcgccgaggacgacggggacgacgaggacgaggacgacgaggaggctggccctgaccagctgcccctcggggatgggacgtcaggagaagacgcagaacggagccccccacctgatgggcagtggggcagtcagctcctggcgcggcagctgcaggatttctggaagaagtcccggaacaccttggcaccccagcggctgctcttcgaagtgaccagcgctaacgttgtcaaggacccgccctccaactctacaccctcgccgtgatcggcccaggaccgccagattgccagccagcccagatctctcgccgttactcggactttgagcggctgcaccgaaacctgcagcggcaattccggggcccaatggctgccatctccttcccccgtaagcggctgcgccggaattttactgcagagaccattgcccgccgtagccgggcctttgagcagtttttgggtcacctgcaggcagtgcctgagctgcgccatgccccggacctgcaggacttcttcgtgctgccggagctgcggcgggcacagagcctcacctgtactggcctctatcgtgaggctctggcactctgggccaatgcctggcagctgcaagcccagctgggcaccccctctggcccagaccgccccctgctgaccctggctgggctggccgtgtgccaccaggagctggaagaccctggagaggcccgggcatgctgtgagaaggccctgcagctgcttggggacaagagcctccaccctttgctggcaccctttctggaggcccatgtccggctctcctggcgcctgggcctggacaaacgtcaatcagaggctcggctccaagccctgcaggaggcaggccttacccccacaccaccccccagtctcaaagaattgctcatcaaggaggtgctggactaacccttgcctagatttaaggccactgtgaggagaggggttgccccagaaggcaggggaaggacctgatgagaacagaatagctgggaggctgcagagggtgctgggagcccctagaagttccaaaagagaatgtgaagcagatcaaggaaacttctgttgagctaggctcagggtgagctttggctggggttgcccttgtgtagtacagggaagtctgacacagcctctccagcctataaacagccggggggctgtggcacaggttggggcaatgttcccttgttggtggcccccaagctggcaaggcctcttggctgaaggccagggactctgcccctggagtcctggagttaagggatgaaggcaaggctgcaggtctggcccaggggaattaaaagccagccactccagtggtatcagtctctttattggatgtgagggccaaaagggactgtaactcctgtctcaggaatggggatagatgggaggttcttgaagccccaggcgaagctggtacctctggctacagcttgctctctgagacctggggcttcactcggatcacgccctcctgggcacaagtcacagctaggactccatcctgacgccacagccgcccatggaccagcccccgagagccacctgtgggtgaggtgaagggtgatgatggcctgcttcagaacagccaaatacactttttttttttcctgaaacagagtctcactaagttgccaggctggtctcaagcgcctgggttcaagggatcctcccgcctcagcctcctgagcagctgggattacaggcgcacatcaccatgcccaacctccaagtggacttcttgcaaagggtctggcccagggcagggctgccccacacaagggtgcactgagtgtcgtggctgctccaaatgccccttcatgagcttattatggaccgtcattgaggggtaactcctcccacaggaaccccagttgacagtttaaaagcactttcacacctctcctcgcttcctcaaaaagatcacagagggaggagctctgagaacagtctccttcaacagctcggccaagcagaactgctgtacctctgaccacttgtgttaggaaaactatcggctccctgtataataaatcaagccaggtcctccaagtggtaattcatgaaaaatatccccactaccaccaccaaggggaagaaaggactcagaagagaggacttgaggccatgaggtctggcctcttccctccccatctggagactctttctcccttgctggctttgggcccaagtttgatgtttatgaggatgattgctggtttcccttacacatagcagagctcactcagttctcacagtagccaaatgaagcagttatgtgttgtccagttttccagaccaggactgaaatccagagagggtcaggaatttggccccatgatgaagccaaatctgaacccatgtcctcacttcaaggttatcaatcttggattgtgatgctattggtacttgagaataccccttatctgagtataaagaatccttgagttttgtccttggtttatcaagcaaagcttttcttcatttgaaatgtactcccttggaaaggaggtcagggttctgaagctagacattgatgaacgagtcttgtttctctcccctgcaaggaaggtccaagcaggcccttagggaccactgaatgccccgatcccaatcaggttaatcagaatcacttagagaacttaaaaatacagtttcctggaccttatccaagacctactgagtgagaatcttgagggtggaatcagaatctattttgaaaaggcatccccaaatggcagtctgatggactgcgggtttggataccactgctgtaatgtaaccctctttgtttagatgaggaaactgaggttcagatggaagatatgatttgcctattgtaatacaaagaatctgaactgg

SEQ ID NO: 939 - DNA, 2357 bp, Homo sapiens
gaagaggacagtccgcaaggggcggaagacaagacaaaaatgactccagttcgctagacgcgcagaggggcggatagcgcgcggaccccgccttccccaaccgagtgtgggttccagtcgctggggaggacctggtggccccctgaccttggacgagccatattggacgccccggcgccgtcccgtcttccacgctgccaactccaccgctcccgccccgaactgcgggtaggtccaggccgccaggccccgcctcgccggccccagccctgattgacactggagttggtacatacgggtctgcagcggaggcgagcaggagggtgagcgctattttaaacatggctttctctttcccttagcccgcgagtacagccgcatgggaataatcccaacatttgcctgatttattttcttccctctccttacgcttgtacttgtttttctcctctcgctgttttcccttcacactaattcgcaacctggcagtttgcaaagaggaaactccctttcggaatggaaagccgcttttgcttcttgttgttgggggtggaaaacattccagcgagaatgagttcaaaaagaagggaaaccgcgtcactggagagaaagtaacattaagagatcgatgaggacggagtgggtaggggggacagagagagaggaacgtctgcaacaggcatctaaaaacaagcgtggaggagcaaagattcccaatccccgggttactaccgcgcgcgttctgcgcgagccattgcaatgccagcatttactgtaagcagaatttgaaggcttttgaaatctttttttggtaagacttacctttctcttcggcataatgactatgtcggtgaagcaaaaagtaaagcaacggactggaactgctggcgccgccgctggatgctgcctctgccgctgcagctgctcacgcgcagggcacgacgtagcccggcctcttcgacctgcacctccgcggctccctctgggggccctctgctcgcctccctgctgctccaatgaggagccccgccagccggccgcgaggccccattggctgaggcaacgttctaaattccacgagggcacgcccacctccgcgcgcggtacgcgctgttgtagtttccacttcaccgaaaaaaatctgcctggcgactgagcatgcccagttcaactagtagcctccaggccacacaatcctgaagtttcattgtttcgctgctctctctttgagattgtaagaataagaacagtgtgtgtcttcataggaaggaaaaagagtaagaatgaatacgtaaactttataatgtaaatatatacacagcaggtaccttattcatttcctacccataaaggcttttaatgaatgttacatggtgggaatctgtaaagcgtgggaaggtactctgtactggaagagcgtggcaacttctaaaggcctcagtttccccccctagatatatagtgacaacagtccctaaaatcacttagctctaattttctgaaatctgtgattataaatcactcactaattcagctaacttcaaactagatgtgaagacgaataggacatgtttgttacggaaattaggaaaagaaagaacaaggcaaaaactgattattttatatttgagacatatatttgaatgacacccgtcatgttacactttatgcgtaatatttctcaaagttctgcaaggcataaaatgagcattgcaaaaatatttctgaattcattttatgagaccagatttactctgataccaaaaccagtgaaagacttcaaaagagagttacagaccaatatcactcataaacatagacacaaaagtcgtgaacaaaattttagtaaatgaaactcaacaacatttaaagggacaatacatcatgacctgtggggcttatcttgggaatgcaaagctgcttttttaatatctgagaatcaatcaatgtaattggcaggattaatagaataaagggggaaaaacaatcctttcagcagatgcaggaaaagcgctagtgaatgggtaagcaaattgtgatgagcacatgcagtggaatactattcagcaataaaaaacaataaaaaattttcctacatggatgaatatcaaaaacaaagtgctgtacgaaagaagtcaaatacaaaagaccacactgaatgattgcattcatatgaaattatagaaaaagcaaaattgggcaaagttagtttcagaatcatcttagcaggcaaagctcacatcataggaaaatgtgttgaagccttacattacaaatatggccaaatccactttggtaacacagaggctgcaaatatgtattaaaaatatcatgtattaaatatgtattaaaaaagc

SEQ ID NO: 940 - DNA, 2230 bp, Homo sapiens
tgggagcccactggcccatgatccgtttagttgtcttcaactggttggccaagagaatgtctgtggtgatgactatgatgaagcagttaagctgaaggaatctgttgttgaaaatcatgcagtgttaagttatgctgtggaggaagaacatgcatatttgggtccaactgtgaagccagatgataaggctaaaacactgtcttatgaaccattatcttcagcaactgtttccactgggagccttttaagttatgaaaacacagatttgagccttacagatccagagtcattttcagagcacatggatgatagcaagcaagaatctaccaccagtaaagaagaggaaacaaatattataagttccatagttccttcaacacaagatatttatcagcggcagaactcttcagacgttcataaatctctgttgcctgcagtggatgaaactacatgtggtcacacacactttcagcaaatgatagacaagtacattaatgaagcaaatttgatacctgaaaaaacagatttgcaagaattggaacacatttttcctaatttgcatcatcagctgtttaaacccttagaaccacatccagattttgacttatcatcatcatcctctgggatttctccagacaacagagacttttaccagagatcagattcttcatctgaaagccactgtgctactggattatccaaaagtacagtttatttcacagcactgaggaggaccagcatgcattcttctcttaacacaagtccgaatcaacaacctgacactaacttggctcatgttggagctcacagttttgctacagaaaatattattgggggatctgaacaatgttttgaacagcttcagccagaatattcttcacaggaggagagccagcatgctgatctaccaagtatttttagcattgaagcaagagattcttcccaaggcatgaaaaatcagaactatccctctgaagaacatactgaaatattacaaaacaagaaaaaaattgttcatttccagctttctataggaaacttaagttcagtctacagttcatctgatgaagctaatgtatttgatcagttaaatgtacagcatagcactccatgtggttctaactctagtgagtgctcaacaaaacaccaactagaaagcagaaaggaaagtatgggctttgaagaactatcaaaaagaggggttgttacaatgttacaaagtcaaggactcattgaagataataaaaatgaaacctgtagggttttagacataaatccacaggtagaggaaactgactctcgattatgtgtaagaacagtggagatgggaacttcaattcaggcaccatattccttaactactcaaaatgaaaaatattttgagaattcagctgaaacagacattccaaaaatcaccaaaaaactatctcaactaggagaatcagagctttttgcaagttctggatcattttcattacagagctctataccagtctgggaaacagaaactggccatggtataatggaagaaccagaacttactttaataagcaccactgataccagtattgctgaaatggattttgcaaatttaaccctagaagagaagagcgagaatgaagcaaaatgcttctttcaggtgagtgtgtttctgcctcttgtatcagcaacagaagcctcagattatccagctgtatcagaactttccatagaaaaaccaaggacagcatctacagaaacccctcgcaggcttacacctgtaccagggagcttacaagaagcatttataaagaggaaaaaatcatttatggagagatcccaccagaggcagaaagaaataaggaataaaattcatgtctctgaaaattctcaaatcaaaacagttaaagagaaaccatctataagttcatctgtgagtcgtctaaagggcgtgaataaagtcagagcatcttttcctgaagacagaaagactacacaggctctaaggcaccaaaggggtctaaggttatacaatcaactagctgaagtgaaacaacaaaaggaagaaaaaacaaaacaagaagcttatgcccaaaacagagcaagggcaaaagaattccataagaaaacactagagaaacttcgagccaaaaatacatgctgactttctagaaatagtgtaaaggttttttaattgtgtatatgtagcattagacaaaattatttaaagtcaataaattgttattcgagg

SEQ ID NO: 941 - DNA, 3505 bp, Homo sapiens
taaaatgtgtagagcaagcatatggtggttagtgttcttgtataaactttgacttgatctttattcatcggctttactgataactggttactaaattctactccttgaacacatactttttgagcggtcacaaaaatagggcacagtaggtcgggcgcagtggctcgcgcttgtaatcccagcactttgggagtccgaggcgggcagatcatgaggtcgggagttcaagaccagcctggccaacatgacgaaaccccatctctactaaaatacaaaaattggccgggtgtggtggcgggtgcccgtagtcccacctgctcgggaggttgaggcaggagaatcgcttgaacctgggaggcggaggttacagtgagccaagatcgtgccacggcactccagcctgggtgacagagcaagactgtcttggtgtggggggagatacagtaaaagcagaaagtatgaaggcagagtggcaaaaaaatctagatgatttaatcaaattaggctaaataaatggttcaattattgactttctataggttctcttgctgcaaatggccctaccaccttggttgataaagtttcaaatcccaaaactaatggggacagtcagcagccctcctcctctggccttgcttccagtaaagcttgtgtcggaaatgcctatcacaagcagttggccgccttgaactgctccgtgcgggattggatagtgaagcacgtgaatacaaaccccctctgtgatctgacacctatctttaaagactatgagaaatatttagcaaacattgaacagcaacacgggaacagtggcaggaattctgaaagtgaatctaacaaagtggcagctgaaacacagtctccttccctttttggctcaacaaaattacagcaagagtcaacgtttttgtttcatggcaacaaaactgaagatacacctgacaagaagatggaggtggcatctgaaaagaaaacggacccatcatcactaggagcgacaagtgcctcatttaatttcggcaagaaagttgatagctctgttttgggctcattaagctctgtccccctgactggattttctttctcccctggaaactccagtttatttggcaaagatactacccagagtaaaccagtctcttcaccatttcccactaaaccattggagggccaagcagaaggtgacagtggtgaatgcaaaggtggagatgaagaagagaatgatgagccacccaaagtagtagttaccgaagtaaaagaagaagatgctttttactccaaaaagtgtaaactgttttacaagaaagacaatgagtttaaagagaaaggcataggtactctgcatttaaaacctacagcaaatcagaagacacagcttttggtgcgggcagacaccaatttaggtgggtaccttttttcagttggcacaaaatcatcatcacatagtatataaagcgtttaccctgctgactcaaggttattaatatgtttttaaacagagcgcattcaggccaaattcatcctgtatttacttatttatagttttgagtcccaggataatagtgtgtaaggaaacataaatgtgttagaagctgtaaacaaaatgatttttcattttcctttgtgttagaaatgtgactaagaagctagagattagaccatttaatgaacacccaagggaaattaaccttttaaggaatcctttttatatagcaagtaatgactaactgattgctgtccatcctcagttttaacctgaaaagagtccactgcaaggatcctagtgcccggaggaggaggaagacggggcaggcctgcggtggagcgggcagtagtggtagagaacagggggctgtgttgcagaaactccagggaggcatttttctttcccgtgggcttgactagggagtaataacatggtcgtgtcacttttgcccagggagctgtgccggcctgtgacagaggtgtcctttgtccgtgtggcgcagtgaagacactgggttgtgccaccgtgttcttccttcagtgcaaagacggacagtgttgagagggctgacggttctgagcgaggctgctggctctgagagaaacgctgtgtgggtgcagagacccgggctggagggaggacggaaagccactcctcacagtgagggcaagtgctccccgaggcctcccagttctcagggaaccagtcctgattttgtgctgtcctgttggctccctgtcttagatgtattaagttatttcagcatttaatgtttagcatattacagactcctttggtggagctatagcttctataattttgatgggttttgtttgtttgaatgcaggcaacatattgctgaacgttctgattccacccaatatgccatgtacgcgaacagggaagaataacgttcttatcgtctgtgttccaaatccaccaattgacgagaagaatgccaccatgccagtcaccatgttgattcgggtaaaaaccagcgaggatgcagacgagttgcacaaaattttactggagaaaaaggatgcctgaacacgcaaagtcggctgcagaattattgccaagttgctgctgcttccaccgccccttaaagttagtcagtttttcttctcttctttgacattctaagaacttatagataacttaaaacttttgtgaggaagattaatgtggccaataaaacctttaaatgttaagtgtcaagaaactgcactctcccttcttaagaactgcctaaagtgtaaaatacatttgaatgcaatttttggaagattttttaatgttcgtttattaaactaaccctaagtgatttcttcaaggactgcaatcagcgtatcaatttgctttcccaaaggctcttccaacccgtgggttttggggtccaccgccaccaccagagaggcttttgaacaggtgcctggctgtgttcagaaggaagctggcctgtgtgcttctctccggtgggctcagccgacgtgtgagacttgttctgttaccaaatgaaccgggctgccacgctgtgacaggcgtttgtcctctgctttatttttactttgaagctcaaatgcgagtactaagtgttcacctcagcgttcgaatcattggcctgtaaccctgtgggctgcttcacgagaattcaggacctgcattttcattctaaaaagaaatgaacagcttgtgaaggagttttttggcttcatagtttctattcatgaggtagtgttacttctttatccccctaaagacaaaatgaagataaagggggattgccaggaatgggtttaaaagcacaaatgtggtagcttatcatctacaccatggagagtgaacccttacgaaatgaaagtcaaatgagaccatccgagaaaaagatgcgcataggcatttgtaccatgatcaaccccacgcacatgaaaactgtgaccaagtgacgtgcctgggagctttgacacacgagccgtgtgaattcactaggaaacatgtaataaagtcatggaagag

SEQ ID NO: 942 - DNA, 2887 bp, Homo sapiens
gacacagcagatccggtcgcaggcagcgtccagcatggactggtccaggcacctccgacccacccgacgctcctgccccggcccgctctccactcagatcacgctcgctccgcacccagccccgtaacctgccgggccgccactgcacccgccatacctgctctggtccgtcaagcgccatcttctctcttcagcagagaccgccggcatccgagccgtcttggcgcgcaagcgcggaagcggaggattgggacctgaagaccaggcagagaagaattccgggtcaatgggcggggtgtgcggcgagaccacactaagggaaccatgatgggaggggcggctactcgagttcaggggctttggaaggggatgaggaaggagtagaactcctcctcagtgttgcctcattgaaactctgtttatagttcttgtgatatgccttcctagtctcaactttcaacttacaaaacccaaggacagagtattgagaacaatctagggccacactcaaaatggcggaaaacctcgagccagggacgcaggggacgcaagcggaagcggaagtagttagctgcatacttgtgcggttccaagtgtggagaaagcggctctgggtctagattgagggatactccccctttccaccatgggcaagaagggcaaagttggcaagagccgacgagacaagttttatcacttggcgaaggagacgggttaccgttcccgatctgctttcaagctgatccagctcaatcgccgctttcagttcctgcagaaagcccgagccttgctggacctgtgtgctgcgccagggggatggctgcaggtagctgccaagtttatgcctgtatccagccttattgtgggagtggacctggttccaatcaagcctctccccaatgtggtgactctccagcaggacatcacaacagaacgttgtaggcaggccctgaggaaggagctgaagacctggaaggttgatgttgtgctcaatgatggggcccccaacgttggggctagctgggtccatgatgcttactcacaagcccatttgacactgatggctctacgtttggcttgtgactttttggcccgtggtggcagcttcatcacaaaggttttccgttctcgtgactatcagcctctgctatggatctttcagcagctgttccgccgtgtccaggccaccaagccccaagcctctcgccatgaatctgcagagatctttgtagtctgccaaggattcctggcccctgacaaggttgacagtaaattctttgaccccaaatttgcctttaaggaggttgaagttcaggctaagaccgttactgaattggttactaagaagaagccaaaggctgaaggctatgctgagggtgacctcactctctatcaccgtacctcagtcactgacttcctccgagctgccaaccctgttgacttcctctccaaggccagcgaaatcatggtagatgatgaagagttggcacagcatccagctaccactgaggacatacgggtgtgctgtcaggacatcagagtgttggggcgcaaggagctcaggtcgctactaaactggagaacaaaacttcggcgatatgtggccaagaagctgaaagaacaagcaaaggcactggacatcagcctcagctctggagaggaagatgaaggtgatgaggaggactcaacagctggaaccacaaagcagccctctaaggaggaggaggaagaggaggaggaggaacaactgaaccagaccttggcagaaatgaaggcccaggaggtggcggaattgaagaggaagaaaaagaagctgttgcgtgagcagagaaagcagcgggagcgtgtggagctgaagatggatctgcctggggtttccattgcagacgagggggagactggcatgttctccttgagcaccatccggggtcaccagttattagaggaagtaacacaaggggatatgagtgcagcagacacatttctgtccgatctgccaagggatgatatctatgtgtcagatgttgaggacgacggtgatgacacatctctggatagtgacctggatccagaggagctggcaggagtcaggggacatcagggtctaagggaccaaaagcgtatgcgacttactgaagtgcaagatgataaagaggaggaggaggaggagaatccactgctggtaccactggaggaaaaggcagtactgcaggaagaacaagccaacctgtggttctcaaagggcagctttgctgggatcgaggacgatgccgatgaggccctggagatcagtcaggcccagctgttatttgagaaccggcggaagggacggcagcagcagcagaagcagcagctgccacagacacccccttcctgtttgaagactgagataatgtctcccctgtaccaagatgaagcccctaagggaacagaggcttcttcggggacagaagctgccactggccttgaaggggaagaaaaggatggcatctcagacagtgatagcagtactagcagtgaggaagaagagagctgggaacccctccgtggtaagaagcgaagccgtgggcctaagtcagatgatgacgggtttgagatagtgcctattgaggacccagcgaaacatcggatactggaccccgaaggccttgctctaggtgctgttattgcctcttccaaaaaggccaagagagacctcatagataactccttcaaccggtacacatttaatgaggatgagggggagcttccggagtggtttgtgcaagaggaaaagcagcaccggatacgacagttgcctgttggtaagaaggaggtggagcattaccggaaacgctggcgggaaatcaatgcacgtcccatcaagaaggtggctgaggctaaggct

SEQ ID NO: 943 - DNA, 2074 bp, Homo sapiens
gcagtgcaggctgcaggcgccgcgccgaggaggctgccgctctggcttgccgccccccgccgccgctgcacaccggacccagccgccgtgccgcgggccatggacctgcccaggggcctggtggtggcctgggcgctcagcctgtggccagggttcacggacaccttcaacatggacaccaggaagccccgggtcatccctggctccaggaccgccttctttggctacacagtgcagcagcacgacatcagtggcaataagtggctggtcgtgggtgccccactggaaaccaatggctaccagaagacgggagacgtgtacaagtgtccagtgatccacgggaactgcaccaaactcaacctgggaagggtcaccctgtccaacgtgtccgagcggaaagacaacatgcgcctcggccttagtctcgccaccaaccccaaggacaacagcttcctggcctgcagccccctctggtctcatgagtgtgggagctcctactacaccacagggatgtgttcaagagtcaactccaacttcaggttctccaagaccatggccccagctctccaaaggtgccagacctacatggacatcgtcattgtcctggatggctccaacggcatctacccctgggtggaggttcagcacttcctcatcaacatcctgaaaaagttttacattggcccagggcagatccaggttggagttgtgcagtatggcgaagatgtggtgcatgagtttcacctcaacgactacaggtctgtaaaagatgtggtggaagctgccagccacattgagcagagaggaggaacagagacccggacggcatttggcattgaatttgcacgctcagaggctttccagaagggtggaaggaaaggagccaagaaggtgatgattgtcatcacagatggggagtcccacgacagcccagacctggagaaggtgatccagcaaagcgaaagagacaacgtaacaagatatgcggtggccgtcctgggctactacaaccgcagggggatcaatccagaaacttttctaaatgaaatcaaatacatcgccagtgaccctgatgacaagcacttcttcaatgtcactgatgaggctgccttgaaggacattgtcgatgccctgggggacagaatcttcagcctggaaggcaccaacaagaacgagacctcctttgggctggagatgtcacagacgggcttttcctcgcacgtggtggaggatggggttctgctgggagccgtcggtgcctatgactggaatggagctgtgctaaaggagacgagtgccgggaaggtcattcctctccgcgagtcctacctgaaagagttccccgaggagctcaagaaacccagggaggaagactgtaaatacgaacccaatctgcacactccaggcctctagttccagaaggatccaagacaaaacagatctgaattctgcccttttctctcacccatcccacccctccattggctcccaagtcacacccactcccttccccacagataggcccctggggctcctgaagaatgaacccaagagcaagggcttgatggtgacagctgcaagccagggatgaagaaagactctgagatgtggagactgatggccaggcaagtgggaccaggatactggacgctgtcctgagatgagaggtagccgggctctgcacccacgtgcattcacattgaccgcaactcacacattcccccaccagctgcagccccttgctctcagctgccaaccctcccgggtcacttttgttcccaggtacctcatgggaagcatgtggatgacacaatccctggggctgtgcattcccacgtcttcttgctgcagcctgcccctagacatggacgcactggcctggctgcagctgggcagcaggggtaggggtagggagcctcccctccctgtatcaccccctccctacacacacacacacacacacacacacactgcctcccatccttccctcatgcccgccagtgcacagggaagggcttggccagcgctgttgaggggtcccctctggaatgcactgaataaagcacgtgcaagg

SEQ ID NO: 944 - DNA, 2173 bp, Homo sapiens
agatgcgagcactgcggctgggcgctgaggatcagccgcttcctgcctggattccacagcttcgcgccgtgtactgtcgccccatccctgcgcgcccagcctgccaagcagcgcgcctacctgctgccagcgccgccagctccggccttcgctgccagccgtcgcccgacgaggcgcgaccgctgcaggcgctgctggacggccgcgggctctgcgtcaacgctagtgccgtcagccgcctgcgcgcctacctgctgccagcgccgtctccagcacgcaccgggtgtctgatcccaagttccaccccctccattcaaagataatcatcatcaagaaagggcatgctaaagacagccagcgctacaaagttgactacgagtctcagagcacagatacccagaacttctcctccgagtccaagcgggagacagaatatggtccctgccgtagagaaatggaagacacactgaatcacctgaagttcctcaatgtgctgagtcccaggggtgtacacattcccaactgtgacaagaagggattttataagaaaaagcagtgtcgcccttccaaaggcaggaagcggggcttctgctggtgtgtggataagtatgggcagcctctcccaggctacaccaccaaggggaaggaggacgtgcactgctacagcatgcagagcaagtagacgcctgccgcaaggttaatgtggagctcaaatatgccttattttgcacaaaagactgccaaggacatgaccagcagctggctacagcctcgatttatatttctgtttgtggtgaactgattttttttaaaccaaagtttagaaagaggtttttgaaatgcctatggtttctttgaatggtaaacttgagcatcttttcactttccagtagtcagcaaagagcagtttgaattttcttgtcgcttcctatcaaaatattcagagactcgagcacagcacccagacttcatgcgcccgtggaatgctcaccacatgttggtcgaagcggccgaccactgactttgtgacttaggcggctgtgttgcctatgtagagaacacgcttcgcccccactccccgtacagtgcgcacaggctttatcgagaataggaaaacctttaaaccccggtcatccggacatcccaacgcatgctcctggagctcacagccttctgtggtgtcatttctgaaacaagggcgtggatccctcaaccaagaagaatgtttatgtcttcaagtgacctgtactgcttggggactattggagaaaataaggtggagtcctacttgtttaaaaaatatgtatctaagaatgttctagggcactctgggaacctataaaggcaggtatttcgggccctcctcttcaggaatcttcctgaagacatggcccagtcgaaggcccaggatggcttttgctgcggccccgtggggtaggagggacagagagacagggagagtcagcctccacattcagaggcatcacaagtaatggcacaattcttcggatgactgcagaaaatagtgttttgtagttcaacaactcaagacgaagcttatttctgaggataagctctttaaaggcaaagctttattttcatctctcatcttttgtcctccttagcacaatgtaaaaaagaatagtaatatcagaacaggaaggaggaatggcttgctggggagcccatccaggacactgggagcacatagagattcacccatgtttgttgaacttagagtcattctcatgcttttctttataattcacacatatatgcagagaagatatgttcttgttaacattgtatacaacatagccccaaatatagtaagatctatactagataatcctagatgaaatgttagagatgctatatgatacaactgtggccatgactgaggaaaggagctcacgcccagagactgggctgctctcccggaggccaaacccaagaaggtctggcaaagtcaggctcagggagactctgccctgctgcagacctcggtgtggacacacgctgcatagagctctccttgaaaacagaggggtctcaagacattctgcctacctattagcttttctttatttttttaactttttggggggaaaagtatttttgagaagtttgtcttgcaatgtatttataaatagtaaataaagtttttaccatt

SEQ ID NO: 945 - DNA, 3739 bp, Homo sapiens
attccagactgagtatcttttgtgtgactgtaacatactgtggatgcatcgctgggtaaaggagaagaacatcacggtacgggataccaggtgtgtttatcctaagtcactgcaggcccaaccagtcacaggcgtgaagcaggagctgttgacatgcgaccctccgcttgaattgccgtctttctacatgactccatctcatcgccaagttgtgtttgaaggagacagccttcctttccagtgcatggcttcatatattgatcaggacatgcaagtgttgtggtatcaggatgggagaatagttgaaaccgatgaatcgcaaggtatttttgttgaaaagaacatgattcacaactgctccttgattgcaagtgccctaaccatttctaatattcaggctggatctactggaaattggggctgtcatgtccagaccaaacgtgggaataatacgaggactgtggatattgtggtattagagagttctgcacagtactgtccgccagagagggtggtaaacaacaaaggtgacttcagatggcccagaacattggcaggcattactgcatatctgcagtgtacgcggaacacccatggcagtgggatatatcccggaaacccacaggatgagagaaaagcttggcgcagatgtgatagaggtggcttttgggcagatgatgattattctcgctgtcagtatgcaaatgatgtcactagagttctttatatgtttaatcagatgcccctcaatcttaccaatgccgtggcaacagctcgacagttactggcttacactgtggaagcagccaacttttctgacaaaatggatgttatatttgtggcagaaatgattgaaaaatttggaagatttaccaaggaggaaaaatcaaaagagctaggtgacgtgatggttgacattgcaagtaacatcatgttggctgatgaacgtgtcctgtggctggcgcagagggaagctaaagcctgcagtaggattgtgcagtgtcttcagcgcattgctacctaccggctagccggtggagctcacgtttattcaacatattcacccaatattgctctggaagcttatgtcatcaagtctactggcttcacggggatgacctgtaccgtgttccagaaagtggcagcctctgatcgtacaggactttcggattatgggaggcgggatccagagggaaacctggataagcagctgagctttaagtgcaatgtttcaaatacattttcgagtctggcactaaagaatactattgtggaggcttctattcagcttcctccttcccttttctcaccaaagcaaaaaagagaactcagaccaactgatgactctctttacaagcttcaactcattgcattccgcaatggaaagctttttccagccactggaaattcaacaaatttggctgatgatggaaaacgacgtactgtggttacccctgtgattctcaccaaaatagatggtgtgaatgtagatacccaccacatccctgttaatgtgacactgcgtcgaattgcacatggagcagatgctgttgcagcccggtgggatttcgatttgctgaacggacaaggaggctggaagtcagatgggtgccatatactctattcagatgaaaatatcactacgattcagtgctactcccttagtaactatgcagttttaatggatttgacgggatctgaactatacacccaggcggccagcctcctgcatcctgtggtttatactaccgctatcattctcctcttatgtctcttagccgtcattgtcagttacatataccatcacagtttgattagaatcagcctcaagagctggcacatgcttgtgaacttgtgctttcatattttcctaacctgtgtggtctttgtgggaggaataacccagactaggaatgccagcatctgccaagcagttgggataattcttcactattccacccttgccacagtactatgggtaggagtgacagctcgaaatatctacaaacaagtcactaaaaaagctaaaagatgccaggatcctgatgaaccaccacctccaccaagaccaatgctcagattttacctgattggtggtggtatccccatcattgtttgcggcataactgcagcagcgaacattaagaattacggcagtcggccaaacgcaccctattgctggatggcatgggaaccctccttgggagccttctatgggccagccagcttcatcacttttgtaaactgcatgtactttctgagcatatttattcagttgaaaagacaccctgagcgcaaatatgagcttaaggagcccacggaggagcaacagagattggcagccaatgaaaatggcgaaataaatcatcaggattcaatgtctttgtctctgatttctacatcagccttggaaaatgagcacgcttttcattctcagctcttgggggccagccttactttgctcttatatgttgcactgtggatgtttggggctttggctgtttctttgtattaccctttggacttggtttttagcttcgtttttggagccacaagtttaagcttcagtgcgttcttcatggtccaccattgtgttaatagggaggatgttagacttgcgtggatcatgacttgctgcccaggacggagctcgtattcagtgcaagtcaacgtccagccccccaactctaatgggacgaatggagaggcacccaaatgccccaatagcagtgcggagtcttcatgcacaaacaaaagtgcttcaagcttcaaaaattcctcccagggctgcaaattaacaaacttgcaggcggctgcagctcagtgccatgccaattctttacctttgaactccacccctcagcttgataatagtctgacagaacattcaatggacaatgatattaaaatgcacgtggcgcctttagaagttcagtttcgaacaaatgtgcactcaagccgccaccataaaaacagaagtaaaggacaccgggcaagccgactcacagtcctgagagaatatgcctacgatgtcccaacgagcgtggaaggaagcgtgcagaacggcttacctaaaagccggctgggcaataacgaaggacactcgaggagccgaagagcttatttagcctacagagagagacagtacaacccaccccagcaagacagcagcgatgcttgtagcacacttcccaaaagtagcagaaattttgaaaagccagtttcaaccactagtaaaaaagatgcgttaaggaagccagctgtggttgaacttgaaaatcagcaaaaatcttatggcctcaacttggccattcagaatggaccaattaaaagcaatgggcaggagggacccttgctcggtaccgatagcactggcaatgttaggactggattatggaaacacgaaactactgtgtaacattgctgggcttcctaggcagaaattcatataaactgtgatactcacattccttgaagctatgagcatttaaaaactgtttacagccaccatagggattcaaaagaatttggaataaactttgaagttttggattttacttatttttatccccaaattgttgctattttttaggatctgaaacaaaatctttctaaaacattgttttagttgtcaaagcaccaacaggacattttgggatgtgaaatgtaatttcttggaatctgtaatttgtacttaatatttcaggcttgtatttaatataataaataggtgtttgtt

SEQ ID NO: 946 - DNA, 2295 bp, Homo sapiens
catattaataaggcatttattaacaaaccattcatgatgtgcaaatctgaaggctttaaactacggtgaactgttattttacagagagggtgtttttggtgctaattggagcattgttacagtcatttattcttttaagtttatttttaagcgtattattttttatcagtggtattaagtgcatttatagggttatgcagccagcaccactattttcaaatattttggttacctgaaaatgaaactctgtaaatacaaagagtcactcccccagcctcctacacccctcgttccactttctgtctgtgaattcgatgactgtaactgcctcctccaagtggactcacagtacttggccttttgtgactggctgatgtcaccgatcgtgatgtcctcaaggttcgtctgtgttgtcctgagtgtcagaattttattcctttttaaggctgatcaccccgttgtgtgtacagaccacatcctgtcttgtccattcatctggatggacacttgtgttttttattcttgggttgtttgtccacagtggagtggcctccttgggacacaccctgagctgggtcctagagcagccagtcgcctgtggacagtgctgtgggaggcaggctgaccttggggtgcaggggtgggtccaggagggaggtgggggactgcgtggaaggagcagctcaggtctgacctccgcagtctgacagtgcctttccagtcctgggaagctcatctggcttttagtttccattttggccagatatgtttgttacatagtctccctgcttggctggtaagttgtgtttgttacatagtctccctgcttggctggtcagatgtgtttgttacatacgtctccctacttgttctgcagcttctgtgtttagtatacatttgagcctccttttctccttttcctacagggaaagccaccagggtgggtggcgagcctgggatcaccagagctgtgatgtccaaaattcaggtggagtcctcaggggccaggcccagcactctgtcaagagctctgcaggcgtctggcacctgccgacctctgtgtggcttccggctgctgaccacgcttccctcccctccactcagtgtccccgctgagcacccccggggcaggcactgcccctgcccttattccacagtcgtcatagtctttgcgccaaacctttggggaaggcacgctgttttccccatttccagatgaggaggccactgtccagggccatgcagtggtcaggacagacctgagtgtggcgccccccgccccaccctccactcccttccttgtgttctccttgggagcagaagacaagctgttgggacctgacgcttttatttattctccaaattaagtgggaattagatcctctggggaaccctggagcttggtgagagtgacgctgccatggggttgggtccctgaggccttcctcggagcattgggtgccaggggctgcccaggcttcctgagtggcccacctgggtgggaggctgccaccgcggcctgatcatgccctctgtgcccacacaggtctctgagcggcccctgatgttcctgttggacactcctggcgtgctggctcctcggattgaaagtgtggagacaggcctgaagctggccctgtgtggaacggtgctggaccacctggtcggggaggagaccatggctgactacctgctgtacaccctcaacaaacaccagcgctttgggtacgtgcagcactacggcctgggcagtgcctgtgacaacgtagagcgcgtgctgaagagtgtggctgtgaagctggggaagacgcagaaggtgaaggtgctcacgggcacgggtaacgtgaacgttattcagcctaactatcctgcggcagcccgtgacttcctgcagactttccgccgtgggctgctgggttccgtgatgctggacctcgacgtcctgcggggccaccccccggctgagactttgccctgaacttgtccgggtagggagggccggaggcatgtggcctcccagacctcctgacctgggtggttgaggctcaagacagctcacccggtccagaagctccatgctggtcactagggtgctgtgctctctggcgccccacagcctggccagctccagggaccccagttgcagggcccaagcaggtgggagtggacaccaggcttcccagtggacgtccctgagcagctccgcatgcttggttctcccggagcttcctgctcaggcctcttgagaaatggatgctgtctcagaaggagttaaagctataacctgtaaccttt

SEQ ID NO: 947 - DNA, 2078 bp, Homo sapiens
tactacaaactcagaaacttttacagtaagcagtaccataaacacgcagctggtcccagtcaggagagagttgttgagcagccttttgctttcagcacctctacagaccttaccacggtagagagccagccttgtgctgtcagtcattctgaatgcatcctggagtctcccgagcacttaccttccaacttcctggcccagcctgtgaatgactctgccccacaccctgagtcagacgccacatgccaacaacctgtcaagcagatgaggctcaaaaaggccattcatctgaagaagctcaatttcctgaagtcacagaaatacgcagagcaagtatctgaacccaagtcagatgatggtttgacaaagaggttggaatctgctagtaaaaataccctagagaaagctagcagccaaagtgctgaagaaaaagaaagtgaagaagtcgtcagttgtgagaattttaattgcattagtgagacggagaggcctgaagacccggctgccctggaagaccagtcccagacacttcagtcccagagacaatacgcgtgtgaattatgcgggaaaccttttaaacacccaagcaacttggagcttcacaaacggtctcatacaggcaggtaacttgcagactcacttacgacggcattctggtgaaaaaccatacatctgcgagatctgtggaaagaggtttgcagcctctggcgacgtccagcgtcacattattattcactcaggagaaaaaccacacttgtgtgacatctgtggtcgagggtttagtaacttcagtaatttgaaggagcacaaaaagacacacacggctgataaagtcttcacctgtgatgagtgtggaaagtcttttaatatgcaaaggaagttagtaaagcacggaattcggcacacgggggagcggccttacagctgctctgcctgcgggaaatgttttgggggatcaggtgacctccgcaggcatgtccgcactcacactggggagaagccgtacacatgtgagatctgtaacaagtgctttacccgctctgcggtgctccggcggcacaagaagatgcactgcaaagctggtgacgagagcccagatgtgctggaggagctcagccaagccatcgagacctccgacctcgagaaatctcagagctcagactctttctcccaagacacgtctgtgacgctatgccagtgtcggttaaactccctgtccacccagtggaaaattctgtggcagaatttgatagccactctggcggctcctattgtaagttacggtccatgatccaacctcatggagttagtgaccaggagaagctgagtttggatcctggtaaacttgccaagccccagatgcagcagacacagcctcaggcctatgcttactcggatgtggacaccccagccggtggcgaaccactgcaggccgatggcatggccatgatccgttcctctctggctgctttggacaaccacggcggtgaccccctgggcagtcgagcatcttccaccacttataggaactcagagggtcagtttttctccagcatgactctctgggggctagcgatgaagacgctgcagaatgaaaacgagttagaccagtgatgtaccgcgcttctccacggtagaggcgtgttctcagtttagcaggctggtgttaaggctgtaggaggacccagtttccccatgacagtgccttctaactagccagagaataggtagcttccctcctgatgatggctcataatctgaagcatcttgagctgggggtgtgagggggagggcctgctggctcaccgtgaggcagccgcgggagggagcgctgacgtcacagaagcgaaggcttgatgctgtctcagcagcctcagctgtgggggggaagcgcgtgtgcatcgtgtcaactactgtacatgttggtcatgtgaaaggaattatatatgtatagtattacaagtatttttgcatttttacaagattgaaatttgtagcattttgtattatttacacagaatttatttgtatatgaaactcataccataatttaattcgaataaatgaaacttttctat

SEQ ID NO: 948 - DNA, 2098 bp, Homo sapiens
agaagcggcggcggcggcggcggcgggagccgaggaggaggttccggacgctgcttaggaaccggggactcaggagtgcccgcgccctgagcgctcagctccagaggcgggatgctcaccccttcctaattgcagctccgaatattcagatggggacagtgaagcacagatctcaggagtcctaagtattcatggctaccactaagttggatagaatggcctccgcccagactgcctggtgatccctgagcagctctctgcactgctccagaaatcaggaggatttttcagagcccagagagcagatttctccacgggccctaaggaaatctgaatctctggtgaggaaagtgacatggaggatgaaggaaacaagctctgccaagccccaccatggccaggccagaccagcccagtcatggctgagtacgggaccctcctgcaagacctgaccaacaacatcacccttgaagatctagaacagctcaagtcggcctgcaaggaagacatccccagcgaaaagagtgaggagatcactactggcagtgcctggtttagcttcctggagagccacaacaagctggacaaagacaacctctcctacattgagcacatctttgagatctcccgccgtcctgacctactcactatggtggttgactacagaacccgtgtgctgaagatctctgaggaggatgagctggacaccaagctaacccgtatccccagtgccaagaagtacaaagacattatccggcagccctctgaggaagagatcatcaaattggctcccccaccgaagaaggcctgagcaagggggaggaagaggaggaaggttggaccttcatcagaccactcccttcccccatcctccaggagagggggcaagggcaacccaccatctacccacttactaacctggtcctaacccccttactgtgcgcgtgtgtgtgcgtgtgcgcacgctctggctgtttgtctatatgtctagctcatctagttcctcttcttaaggggatgggggtcaggggctaggggagggggctgagtttccccactttaggaggaggtgggggctatttctatgcaaatagaaatcagcacattcctcctacttccctttcctccactccccccatatctttaaagtgtggaagcagaaaggacctgcattttcctacattgaggagctgacataggggtaaggtatgggagaggtaggtggatccagggaaaagcagtggggacggaaggcaaagagaccactcaacccccacctggaaggggcaaagaaaagccagagttccatgtttgtactcctgtgctggactgtttcctgagtaccagcaggtccctttttgtctctcatgggcctagcataggtatgagccagggatcctttcctggtccctaagatcaaaccccatggagcagccagcgttagatgcccccacccacctgtactctggagagaccgtgctgggaacatgtaccactgagcctgagatggggatgagggcagagagaggggagccccctcttccactcagttgttcctactcagactgttgcactctaaacctagggaggttgaagaatgagacccttaggttttaacacgaatcctgacaccaccatctatagggtcccaacttggttattgtaggcaaccttccctctctccttggtgaagaacatcccaagccagaaagaagttaactacagtgttttcctttgcaccgatccccaccccaattcaatcccggaagggacttacttaggaaacccttctttactagatatcctggccccctgggcttgtgaacacctcctagccacatcactacagtacagtgagtgaccccagcctcctgcctaccccaagatgcccctccccaccctgaccgtgctaactgtgtgtacatatatattctacatatatgtatattaaaactgcactgccatgtctgcccttttttgtggtgtctagcattaacttattgtctaggccagagcgggggtgggaggggaatgccacagtgaagggagtggcagaatcaaattgctacatagtccaaacaaaaaagaaggctttttc

SEQ ID NO: 949 - DNA, 2167 bp, Homo sapiens
caagacaaggatgcccactctcaccactcctcttcaacgtagtactggaagtcctagccagagcaatcagccaacagaaagaaagaaaggtcatccaaatcgataaagaggaagtcaaactgttgctttttgttgatgataggatcgtttacccagaaaactctaaagactcctccagaaggctcctagaactgataaaagaattcggcaatatttccagatacaaaatgtatgtacacaaatcagcagctcttctatacaccaacagcaaccaagctgagaatcacatcaagaactcaaccccctttacaatagctgaaaaaaaaaatttaggaatatacctaaatgaggtgaaagacgtctacaaggaaaactataaaacactgctgaaagaaataatagatgacacaaacaaatggaaacacatcccatgctcatggatgggtcgaatacatattgtgaaaatgacaatactgctaaaagcaatctacaaattcaacacaattcccatcaaaatatcaccatcattcttaacagaattagaaaaaacaattctaaaattcacatggaacaaaaaaaaaaaaagcccgcatagccaaagccagagtaagcaaaaagaacaaatctggaagcatcacattacctgatttcaaactatactataaggccatagtcaccaaaacagaatggcactggcataaaaataagcacacagaccaatggaacagaacagagaacccagaaataatccaaatgcttacagccaactgatcttcaacaaagcaaacaaaaacataaagtggagaaaggacacccttttcaacaaatggtgtggggtaattggctagccacatgtaggagaatgaaactggatcctcatctttcactttatacaaaaatcaacccaagattgattaaggacttaaatctaagacctgaaactataaaaattctagaagataacattagaaaaacccttctagacactggcttaggcaaggacttcatgaccaagagcaaatgcactaaaaacaaatataaattgctgggacttcattaaactgaagagcttttgcatggcaaaagaatagcagcgtaaacagcccacagagtgggaaaaaaatctccacaacctatacatctgacaaaggactaatatccagaatctacaatgaactcaaacaaatcaacaagaaaaaaaaaatcccatcaaaaagtggactaaggacaattctcaaaagaagacatacaaatggccaacaaatatatgaaaaaatgctcaacatcactaatgatcagggaaatgcaaatcaaaaccacaatgtgataccaccttactcctgcaagaatggccataatcaaaaaatagtagatgttgacatggatgtggtgatcagggaatacttctacactgctggtgggaatgtcaactagtacaatcactatggaaaacaatgtggagattccttaaagaactaaaagtagaactaccagcaattgatccagcaatcccactactggatatctacccagaggaaaagaagtgattttatgaaaaagatacttgcacatgcatgtttatagcagcacaattcgcaactgaaaaaaatgttgaagcaacccaaatgcccatcaaacaacgagtggataaagaaatcgtgatgtatatatatatgaatactgtatagccacaaaaaaggagtgaattaatggcattcgcagcaacctggatgagattgtagactattattctgtaacccaggtatggaaagccaaacattgcatgttctcactcataattgggagctaagctatgaggacgcaaaggcataagaataatataatggactttggagactgatagaatttggctgtgtccccacccaaatctcatcttgaattcccatatgttgtgggaaggacccagcgggaggtaactgaatcacggggcaggtctttcctgtactgttctcatgatagtatatctcatgagatttgatggttattatatgggggaagttttcctgcacaagctttcattctctgtttgcctgctgccatccacataagatgtgacttgctcttccttgccttccaccatgattgtgaagcttccccagccatgtaaaactgagttctccattaaacctctttcctttgtaaagcc

SEQ ID NO: 950 - DNA, 3048 bp, Homo sapiens
tttttctctcctgcagcacttaaccgaaaccagttttgcaatcaattcctgttcaaaggccaccctactcttcctatccgtctttctccagcccagacactcacagccccctgccagaccaggggacctcggagaggcaaggacagaggttcaggatcttcctctccctcgggacccaaggccacaaaggagagctccgtggagagaagaaaatcatttgactcctggggacacagatttgctgccacagaggctgatggacaaccaggcggagagagaaagtgaggctggtgttggtttgcaaagggatgaggatgacgctcctctgtgtgaagacgtggagctacaagacggagatctgtcccccgaagaaaaaatatttttgagagaatttcccagattgaaagaagatctgaaagggaacattgacaagctccgtgccctcgcagacgatattgacaaaacccacaagaaattcaccaaggctaacatggtggccacctctactgctgtcatctctggagtgatgagcctcctgggtttagcccttgccccagcaacaggaggaggaagcctgctgctctccaccgctggtcaaggtttggcaacagcagctggggtcaccagcatcgtgagtggtacgttggaacgctccaaaaataaagaagcccaagcacgggcggaagacatactgcccacctacgaccaagaggacagggaggatgaggaagagaaggcagactatgtcacagctgctggaaagattatctataatcttagaaacaccttgaagtatgccaagaaaaacgtccgtgcattttggaaactcagagccaacccacgcttggccaatgctaccaagcgtcttctgaccactggccaagtctcctcccggagccgcgtgcaggtgcaaaaggcctttgcgggaacaacactggcgatgaccaaaaatgctcgcgtgctgggaggtgtgatgtccgccttctcccttggctatgacttggccactctctcaaaggaatggaagcacctgaaggaaggagcaaggacaaagtttgcggaagagttgagagccaaggccttggagctggagaggaaactcacagaactcacccagctctacaagagcttgcagcagaaagtgaggtcaagggccagaggggtggggaaggatttaactgggacctgcgaaaccgaggcttactggaaggagttaagggagcatgtgtggatgtggctgtggctgtgtgtgtgtctgtgtgtctgtgtgtatgtacagtttacatgaatgttcctcaggacatggcatacaatggccttggaggtccaaataatatcaagtacatcttggagatgagggtgcctgtcctggacagacctcggcatgccttctgtttctccttcaatgctccttaaggcctatgtgctgggaaaagggtcttccctgtttgtttgtttgtttgtttgtttgtttgttttgagacagggtctctgttgcccaggctggagtgcagtggcgtaatctcggctcactgcaacctctgcctcctgagtgcaagcaagtctcctgcctcagcctcccaagtagctgggattacaggcacgcaccaccacgcccagctaattttggtatttttttgtagagacagggtttcaccattttggccaggctggtctcgaattcctgacctcaagtgatccacccaccttggcctcccaaaatgctgggattacaagcgtgagctaccctgcccagccgggtcttcccagttttaacaaagaggtcacagagccacaggcggagttaggaactaaattgtctcctcctcccaattcatatgttgaagtcctaaaccaaaatgtggctgtatttagagatggaccctttgggaggtaattagggttgactgaggccatagggtgaggtcctaacccgatggaattgacttctttataagaggaggaggaaatacaagagggcctccccacccctgctgcacacctacactgaaggaaggctatttgcagatgcagcaagaaggcagccatctgcaaggcagaagaagagagccctcaccaggaactgaataagtcagtcagtctgggacttccagcctctagaactgtgaaacaataaatttctgtggtgtaagcaactcaatctatagtagtttgttactattttgttatagcaaccaaagatgactaagccagacaggttatgtcactcgccaagtgtcttagtctgtttgtgctgctataacaaaataccttagactgggtaatttacaaacaacagagatgtatccagagatccacagttctggaggctgagaagtctaaaatcaaggcaccagcagattccacatctcgtgaaggctcactctctgcttcacagatggcactgtcttgctgtgttctcacatggcagaaggggcaaacaagcccccctgggcctcttttataaaggcactaactctatgcctaaaggcagggccctcatgactctatcacctaccaaaaggctccacttctttatactattggaggggtgaaggaacttcctttctagaccttgaaggtttaagaatttgaatctataaaacaagctgacaatagacagattaacaggagaaaaagcatatacattttttaatgtgggccagatggcagaagcttaaataacaccccaagctacaggaagtgaggcctctgatggggaggtagtgacacaggctgtgggagggggtagggggaggaagtctgtggtgagcaaagtttgccttattacactgataaagtgtaattacactaataaagctggatcacctgaggttaggagtttgagaacagcctggccaacatggcaaaaccctgtctctactataaatacaaaaattagccaggtgtagtggcagggcacttgtaatcctatctactcgggaggctgaggcaggagaatcgcttgaacccaggctgtaaaggttgcagtgagccaagatcatgccactgcactccagtctgggtgtcagaatgagaccccatctc

SEQ ID NO: 951 - DNA, 2040 bp, Homo sapiens
acccgcagtgcttatcgccatttgagtaggggttgatctggtcgatgctgattgctgaggtttgcctgaatccatcattgcagctgcatgttcaagaagtggccggagagttctgcatgttgattcaagaagctacataggcagcaaactaagctgcagtgatgttgcctatatttaaattttctcaaatggccaagctctgatggtctactttatttgagcaatagttgagacttataattgcctataaataaacaaacaaatgaactatttgtttttttttctcacaacatctggcctatattgtctgtcaggaagccatggctccaatgtaaagtacatagttcttacatacttcaactgcagctggtccctgacctcaccaggtttcagagatgttcttaaaggaagccagctgtggcaggtcacagattcatgggaaatggaaagaaccaaggagtatagctcttgcctcacctttctacccactgcagatatagttcaagccagagtaatggaagaacttaacttactagcctctcaggctgctcctatccctacctcccagtgtacagcccctccccatctctttagtcccctttccctcacttccccttttataatgtcacacaaatcagggacagtaggatcacattataacctactttgtcatagggattcgatttttcttatatcaaatcatgtttcctgaaacccagctggggcatatgcactcaatgtctaatacatacttattaatgtaccggatattggccttgcccctggatatcagcaatatattataaaaggttccagtagatgagacgattgagtctgaatacaattgcagtaaattgtgccaataaagatattgtactgttacggtcttagagttaaagccgcttgaatgcagcatgcacattcatgtaaacagacaatcagggtaggcctagaataaccacaaaaattctattggccttactgcagccacctatatgtaaaacaatggaggagatagtttgtggtccattattgtaccctgtttcatccattagcatcagaatctctctttcaggtcatttattaaatatgattgaaatgtttaaaagttcctgaacatgattcatgatgattaaaatatcatacaactgataaaagactttaagaactttatatatttcctgttgcctcaaaatgtaacagaaattattcttagagctttgattttagctatcctaattactgcaaataaatatttgttcttatagttttaaatcaaaaagaaaagtcttgttataaaaccttaagcttgaaatcatattaataaaatgtattgtacatagtggaaaattttcagtagctaatttaaaatttcagaaaatgctattaaagaattttgattcaagtatttaaactgtttagttatgcatgcttcttattaaccgaaaatgataataccatttagtttagtgatcagtatgagaagcaatacctaatcctatgttgctattgtattttttcctagttggtgtgcctgctcagaaaaacatatactgtatgtgtatacatacctgtgtatatataaaaggtcaatttatatatttttctataggaaaatggagtaacaagttccctatctcccatatttatttgtccatagtaaaatggccacattgatgataatttctagaactagtttctgagattgtcagccctttgtctaaaataatggcagtattaatgattgacttctgtcactgccatagttacctggattgtcagccttggtagcctttgtctaaagtcctaaagagttccaaaaaaaatgtgttgaaatttaattgctaaatagtggttggtgattctttacagtaggaattgtaataattttcttgcaaataagttatttactgctattgatattgaataatttgtcttttattcagatatatttcaaaaagcatgaatatatgattattcataaattgtatactttaccagtaagttttcagaggaaataaagacttttaaatccttttc

SEQ ID NO: 952 - DNA, 2829 bp, Homo sapiens
atgtggctaatggtgatggtgaggtagtagaacaggtaattgggcagcaaaccaatgaccaagatgagagcattcttgatggaataatcagggagctgcagagagaacaagacctgagactaattaatgaaggagatgttccacatttaccagttaatagagcatactctgttaatggtgctctgagaagtccaaacatggacatatcttcttccccaaacatcaggcttcgaagacatagtagtcaaattgaaggtgttagacaaatgcataacaatgctcctcggagccagatggccactgaaagagatctcatggcgtggagcagaagagtggtggtcaatgaactaaataatggggttagtagggtacaggaagaatgtcgaactgcaaaaggtgacatagaaatcagtctttatacagttgaaaagaagaaaaagccatcttacactactcaaaggaatgattatgagcctagctgtgggcgttctttacgcaggacacagcgcaaacgtcagcatacttaccaaacacggtccaacatagagcataattcacaggcatcatgtcaaaattcaggtgtacaggaagactcagacagttcttcagaggaagatgaaactgttggcacaagtgacgcttcggtagaggatcctgttgttgaatggcaaagtgaaagttcttccagtgactcatcaagtgaatattctgattggacagcagatgctggaataaatttacaacccccaaaaagacaaaccagacagacaacacgtaaaatatgcagcagctctgatgaggaaaatttgaagtccctagaagaaaggcagaagaaacctaagcagactagaaagaagaaaggaggactggtttctatagcaggtgagcctaatgaagaatggtttgcccctcagtggatcttggatactataccccgacgttccccatttgtcccacaaatgggagatgagcttatctattttaggcaaggacatgaagcttatgttcgggctgtaaggaaatcgaaaatatacagtgttaatttacaaaaacagccatggaacaaaatggatctcagggagcaagagtttgttaagattgtaggaatcaaatatgaggttggcccacccacactgtgctgcttgaagcttgcatttctggacccaatttcaggcaaaatgactggagaatctttttccattaagtatcatgacatgccggatgtcattgacttccttgtgctacatcagttttataatgaagccaaagaaaggaactggcagattggtgatagattccgcagtataatagatgacgcctggtggtttgggactgtggagagtcagcagccttttcaaccagagtatcctgatagttctttccagtgttacagtgttcactgggacaataatgagagagaaaagatgagcccatgggatatggagccaattccagaaggaactgcctttccagatgaagttggtgctggtgttcctgtctcccaggaagaattgactgctttgctatacaaaccccaggaaggagagtggggggctcattccagagacgaagaatgtgaacgggttattcagggcatcaaccaccttctttccctggattttgccagcccttttgctgttccagtggatctcagtgcctaccccttgtattgtactgtagttgcttatccaactgacctcaataccatcaggcggagacttgaaaatcgcttttacaggagaatatcagcattaatgtgggaggtacgctatattgaacataatgccaggactttcaatgagccagacagtcctatagttaaagcagctaaaattgtaactgatgtcttacttcgatttattggggatcagagctgtactgatatactggatacttataataaaattaaagcagaagaacgaaacagtactgatgcagaggaggatacagaaattgttgatttagattcagacggtcctggtacttcatctggaagaagggtcaaatgccgaggcagaagacagtctttaaagtgtaatcctgatgcttggaaaaaacaatgcaaggaactattgagcctcatttatgaacgtgaagactcggagccatttcgacagccagctgatcttctttcttacccaggtcatcaggagcaagagggagaatcctcagagtctgttgttccagaaagacaacaagattcatctctttctgaggattatcaagatgttatagatactcctgtggacttcagcactgtgaaagaaactttggaagcaggaaactatgatctatagcatgatgctgcgattatctgccttatttgaaagtcatatcaaaaatatcatctctgaatataagtcagcaatccagagtcagaagaggagaaggccacggtacagaaaacgtctaagaagcagcagcagttcattatctagtagtggagcacctagtccaaaagggaagcagaaacaaatgaagttgcagcctaaaaatgaccagaatacctcagtatctcatgccaggactagctctcctttctcatctcctgtttcagatgctgctgaagggctttcactatatctacttgatgatgagccagatgggccattttcttcatcgagcttcggtggatatagccgaagtggaaatagccatgacccagggaaagccaaatcatttcggaatagagttttgccagttaaacaagatcactcccttgatggaccccttacaaatggtgatggcagagagccccggacaggaatcaagagaaaactacttagtgcatcagaagaagatgaaaacatgggaggagaagataaagag

SEQ ID NO: 953 - DNA, 2273 bp, Homo sapiens
acacaccccacggtgcccgcgaacttccccggcagcggactgtagcccaggcagacgccgtcgagatgcagggcccaccgctcctgaccgccgcccacctcctctgcgtgtgcaccgccgcgctggccgtggctcccgggcctcggtttctggtgacagccccagggatcatcaggcccggaggaaatgtgactattggggtggagcttctggaacactgcccttcacaggtgactgtgaaggcggagctgctcaagacagcatcaaacctcactgtctctgtcctggaagcagaaggagtctttgaaaaaggctcttttaagacacttactcttccatcactacctctgaacagtgcagatgagatttatgagctacgtgtaaccggacgtacccaggatgagattttattctctaatagtacccgcttatcatttgagaccaagagaatatctgtcttcattcaaacagacaaggccttatacaagccaaagcaagaagtgaagtttcgcattgttacactcttctcagattttaagccttacaaaacctctttaaacattctcattaaggaccccaaatcaaatttgatccaacagtggttgtcacaacaaagtgatcttggagtcatttccaaaacttttcagctatcttcccatccaatacttggtgactggtctattcaagttcaagtgaatgaccagacatactatcaatcatttcaggtttcagaatatgtattaccaaaatttgaagtgactttgcagacaccattatattgttctatgaattctaagcatttaaatggtaccatcacggcaaagtatacatatgggaagccagtgaaaggagacgtaacgcttacatttttacctttatccttttggggaaagaagaaaaatattacaaaaacatttaagataaatggatctgcaaacttctcttttaatgatgaagagatgaaaaatgtaatggattcttcaaatggactttctgaatacctggatctatcttcccctggaccagtagaaattttaaccacagtgacagaatcagttacaggtatttcaagaaatgtaagcactaatgtgttcttcaagcaacatgattacatcattgagttttttgattatactactgtcttgaagccatctctcaacttcacagccactgtgaaggtaactcgtgctgatggcaaccaactgactcttgaagaaagaagaaataatgtagtcataacagtgacacagagaaactatactgagtactggagcggatctaacagtggaaatcagaaaatggaagctgttcagaaaataaattatactgtcccccaaagtggaacttttaagattgaattcccaatcctggaggattccagtgagctacagttgaaggcctatttccttggtagtaaaagtagcatggcagttcatagtctgtttaagtctcctagtaagacatacatccaactaaaaacaagagatgaaaatataaaggtgggatcgccttttgagttggtggttagtggcaacaaacgattgaaggagttaagctatatggtagtatccaggggacagttggtggctgtaggaaaacaaaattcaacaatgttctctttaacaccagaaaattcttggactccaaaagcctgtgtaattgtgtattatattgaagatgatggggaaattataagtgatgttctaaaaattcctgttcagcttgtttttaaaaataagataaagctatattggagtaaagtgaaagctgaaccatctgagaaagtctctcttaggatctctgtgacacagcctgactccatagttgggattgtagctgttgacaaaagtgtgaatctgatgaatgcctctaatgatattacaatggaaaatgtggtccatgagttggaactttataacacaggatattatttaggcatgttcatgaattcttttgcagtctttcaggaatgtggactctgggtattgacagatgcaaacctcacgaaggattatattgatggtgtttatgacaatctctttggtacacaggaagctttataaaatttcattcacgaatctcttattttgggaagctgttttgcatatgagaagaacactgttgaaataaggaactaaagctttatatattgatcaaggtgattctgaaagttttaatttttaatgttgtaatgttatgttattgttaattgtactttattatgtattcaatagaaaatcatgatttattaataaaagcttaaattctcatct

SEQ ID NO: 954 - DNA, 2842 bp, Homo sapiens
atctcacagttctgaagactggacagtcctgggtgcgggtgctggtagagtcagtgtctggtgagggcctgaggtgcctttccactgtgtccccacgtggtggaggggtgaggggtctccctcagggctcttttataaggacacggatcccattcatgagagctaatcaccccatggcctaatcacctcccaaaggccccacctcctcataccatcaccttgagggttaagatttcaacatatgaacttggggacacagactttcagagcatagcacccccaatttcattccatatccccccaggatcccccatggcaccagccacctcaccctgtgtcacagttgactgccacataacacttgccccagatctggcttactgtacatctcagcacccagctcaggcccgggcacagggcaggcctcagaggacgtgcgtagagctgagggcacaaaggagccaagcaagtgtccagagcccttctctccccccaggtactggaagttggaccctgctcaggtctatgctagcgggcccaacgcatgggacacggctgtgcacgacgcctctgaggagtacaagcaccgcatgcacaatctctgctgtgacaactgccactcgcacgtggcattggccctgaatctgatgcgctacaacaacagcaccaactggaatatggtgacgctctgcttcttctgcctgctctacgggaagtacgtcaggtgagctgccctcctgcctgcccacccacacactgcccagaggctgctctcccaaggatcctagaaagaccattcctagcgtccttcagtcagccaggacagttggaacagatgccagttggagccgtggtggttctagagtgacgagctgagggcctgatggagagggaggtggctgtgctgaagtccagctccacctgggccccaaatgcagctctggctcttgcctgctgtgagaccatgggcaactgccttggtctctcttagccacagctgtctctggtgaaatgcaggcaatgattccggctcctcagggaggcttctacggatccctgtgctccggtaaagtgagcagatagatcctctcataatgactgccccacaggtcccttcctaggcagagagattgagtgagtcgcccatggtcgccacagcatggacacagcagagcccagactcgtgagccagcataggttagtgctgatctggccgcctctccaagctttcctcttagccacgttcatcattaagaggttctgaaaagaagacttttagggatatttttaagtactgcatggcttttagaagtcccctgagaataactggtcacacagaggttgaacccagacccctggctcccagctgcttggctccagccacaacactgctgacccttgccagccccagagctcccagtagtccccattatgaagtccataggcagagggcacacgtggcttccatacccaaactgcaattcctggtcctcttgctggagaccctagaggtaggtggctatagatggagccagtgaggcctagaaatggggagcatgtttcctgttcccaaccagcgaggtgtcagtaaatcaccaggagcgcggagcagcccctgcccgggaccatagctggtgatcccccatagtgggcaaccatgcccagcctgcttccttgattggccaagtttggggtgagggggtggttgggttttccttagggatggcagccctattggggtctgtgggtgctcagggctgcgggccgcatgcctgctcaccaggccctgcccacctatgctcgctcctttctctctgtcagcgttggggccttcgtgaagacctggctgcccttcatccttctcctgggcatcatcctcaccgtcagcctggtctttaacctccggtgatggctgctcggtggccccacacccaccagggtcccgaggaaacagccgccatcccttttggttccagatttttttctcctcaccccaaaaggcagggttgggcctgctgttgtggaccgggggtcggggctggcaggatggaaggactgaggaccagcatgaagtgggggtttgttgtctccctgcctctcagaagcaccctgtcccctcctccccaggcctgtgactccggccctggaagcccctttgttcttctgttgaaaggctttggcttcccgctgtagagctgctcccgccaccacctgctggggtcctgcctcagcccagtgcccagtatggggagaggaggacatttgggctcacctgtcaaggtggccctgggaccagagctggtcccagcatggggtgcaccgggtacacttaacgtgtctctataagccaagttgcttcaggaccttcaccactggcctctagaatggtccagaggggctggctgggtccctttgtcagactcctgccggcagctgccctgggggacatgtgtgcccatctggcatcctccagcccgtgcagtccgctcttcactgttccacggcctcccagtgcctcccagcattggacccatctccccctgcagtttgaggccagaggggtgagtggacctgacaagtgccagagtaaccgtgtagacagagcagtgtagacagcactcagccccagccccaggtgtggacctcatgctggtgatggctcccctgggtggcctgccagcacagccagtgccatcagggagctgaaggggctgtcccccacctaactccagctcccccttcacgttgtcaccaaggccctgtgccgcccgcctcgcccccctgctctgtggattcctttgggaagggctccctgggcaggacaataaagagttttgactcc

SEQ ID NO: 955 - DNA, 2648 bp, Homo sapiens
actcggtgcgccttccgcggaccgggcgacccagtgcacggccgccgcgtcactctcggtcccgctgaccccgcgccgagccccggcggctctggccgcggccgcactcagcgccacgcgtcgaaagcgcaggccccgaggacccgccgcactgacagtatgagccgcacagcctacacggtgggagccctgcttctcctcttggggaccctgctgccggctgctgaagggaaaaagaaagggtcccaaggtgccatccccccgccagacaaggccctgcatgtgacggagcgcaaatacctgaagcgagactggtgcaaaacccagccgcttaagcagaccatccacgaggaaggctgcaacagtcgcaccatcatcaaccgcttctgttacggccagtgcaactctttctacatccccaggcacatccggaaggaggaaggttcctttcagtcctgctccttctgcaagcccaagaaattcactaccatgatggtcacactcaactgccctgaactacagccacctaccaagaagaagagagtcacacgtgtgaagcagtgtcgttgcatatccatcgatttggattaagccaaatccaggtgcacccagcatgtcctaggaatgcagacccaggaagtcccagacctaaaacaaccagattcttacttggcttaaacctagaggccagaagaacccccagctgcctcctggcaggagcctgcttgtgcgtagttcgtgtgcatgagtgtggatgggtgcctgtgggtgtttttagacaccagagaaaacacagtctctgctagagagcacttcctattttgtaaacctatctgctttaatggggatgtaccagaaacccacctcaccccggctcacatctaaaggggcggggccgtggtctggttctgactttgtgtttttgtgccctcctggggaccagaatctcctttcggaatgaatgttcatggaagaggctcctctgagggcaagagacctgttttagtgctgcattcgacatggaaaagtccttttaacctgtgcttgcatcctcctttcctcctcctcctcacaatccatctcttcttaagttgacagtgactatgtcagtctaacctcttgtttgccagggttcctaaattaattcacttaaccatgatgcaaatgtttttcattttgtgaagaccctccagactctgggagaggctggtgtgggcaaggacaagcaggatagtggagtgagaaagggagggtggagggtgaggccaaatcaggtccagcaaaagtcagtagggacattgcagaagcttgaaaggccaataccagaacacaggctgatgcttctgagaaagtcttttcctagtatttaacagaacccaagtgaacagaggagaaatgagattgccagaaagtgattaactttggccgttgcaatctgctcaaacctaacaccaaactgaaaacataaatactgaccactcctatgttcggacccaagcaagttagctaaaccaaaccaactcctctgctttgtccctcaggtggaaaagagaggtagtttagaactctctgcataggggtgggaattaatcaaaaacctcagaggctgaaattcctaatacctttcctttatcgtggttatagtcagctcatttccattccactatttcccataatgcttctgagagccactaacttgattgataaagatcctgcctctgctgagtgtacctgacagtagtctaagatgagagagtttagggactactctgttttagcaagagatattttgggggtctttttgttttaactattgtcaggagattgggctaaagagaagacgacgagagtaaggaaataaagggaattgcctctggctagagagtagttaggtgttaatacctggtagagatgtaagggatatgacctccctttctttatgtgctcactgaggatctgaggggaccctgttaggagagcatagcatcatgatgtattagctgttcatctgctactggttggatggacataactattgtaactattcagtatttactggtaggcactgtcctctgattaaacttggcctactggcaatggctacttaggattgatctaagggccaaagtgcagggtgggtgaactttattgtactttggatttggttaacctgttttcttcaagcctgaggttttatatacaaactccctgaatactctttttgccttgtatcttctcagcctcctagccaagtcctatgtaatatggaaaacaaacactgcagacttgagattcagttgccgatcaaggctctggcattcagagaacccttgcaactcgagaagctgtttttatttcgtttttgttttgatccagtgctctcccatctaacaactaaacaggagccatttcaaggcgggagatattttaaacacccaaaatgttgggtctgattttcaaacttttaaactcactactgatgattctcacgctaggcgaatttgtccaaacacatagtgtgtgtgttttgtatacactgtatgaccccaccccaaatctttgtattgtccacattctccaacaataaagcacagagtggatttaattaagcacacaaatgctaaggcagaattttgagggtgggagag

SEQ ID NO: 956 - DNA, 2811 bp, Homo sapiens
tattcacatcctcacatctgttataaagattcaatcatattatcgtgcttatgtttctaaaaaggaatttttgagcctaaaaaatgctacaataaaattgcagtcaactgttaagatgaaacaaacacgtaaacaatatttgcatttaagagcagctgcactatttatccagcaatgttaccgttccaaaaaaatagctgcacaaaagagagaagagtatatgcagatgcgggaatcttgtatcaaactgcaagcatttgttagaggataccttgtccgaaagcagatgaggttacaaagaaaagctgttatttcactacagtcttatttcagaatgagaaaggctcggcagtattatctgaaaatgtataaagcaattattgtcattcagaattactatcatgcatacaaagcacaggtcaatcagaggaagaacttcttgcaagtcaaaaaagcagctacttgcttgcaagcagcttacagaggttataaagtacgccagctaatcaaacaacaatctatagctgctcttaaaattcagtctgcttttagaggctataataaaagggtaaaatatcaatctgtgcttcaatctataataaagattcagagatggtacagggcgtacaagactcttcatgatacaagaacacattttttgaagacaaaggcagctgtgatttccctccagtctgcttatcgtggctggaaggttcggaaacagattagaagggaacatcaagctgccttgaagattcagtctgcttttagaatggccaaggcccagaaacagtttagattgtttaaaacagcagcattagtcatccagcaaaatttcagagcatggactgcaggaaggaagcaatgtatggagtatattgaactccgtcatgcggtactggtgcttcaatctatgtggaagggaaaaacactgagaagacagcttcaaaggcaacataaatgtgctatcatcatacagtcatactatagaatgcatgtgcaacaaaagaagtggaaaatcatgaaaaaagctgctcttctgattcagaagtattatagggcttacagtattggaagagaacagaatcatttatatttgaaaacaaaagcagctgtagtaactttacagtcagcttatcgtggtatgaaagtgagaaaaagaataaaggattgcaacaaagcagcagtcactatacagtctaaatacagagcttacaaaaccaaaaagaaatatgcaacctatagagcttcagctattataattcagagatggtatcgaggtattaaaattacaaaccatcagcataaggagtatcttaatttgaagaagacagcaattaaaatccaatctgtttatagaggtattagagttagaagacatattcaacacatgcacagggcagccacttttattaaagccatgtttaaaatgcatcagtcaagaataagttaccatacaatgagaaaagcagctattgttattcaagtaagatgtagagcatattatcaaggtaaaatgcagcgtgaaaagtacctgacaattttgaaagctgttaaagtccttcaggcaagttttagaggagtaagagttagacggactcttagaaagatgcagactgcagcaacactcattcagtcaaactacagaagatacagacagcaaacatactttaataagttaaagaaaataacaaaaacagtacagcaaagatactgggcaatgaaagaaagaaacatacaattccaaaggtataacaaactgaggcattctgtaatatacattcaggctatttttaggggaaagaaagctagaagacatttaaaaatgatgcatatagccgcaactctcattcagaggagatttagaactctaatgatgagaagaagattcctctctctcaagaaaactgctattttgattcagagaaaatatcgggcacatctttgtacaaagcatcacttacagttccttcaggtacaaaatgcagttattaaaatccagtcatcatacagaagatggatgataaggaaaaggatgcgagagatgcacagggctgctactttcatccagtctactttcagaatgcacagattacatatgagatatcaggctttgaaacaggcctccgttgtgatccaacagcaataccaagcaaatagagctgcaaaactgcagaggcagcattatctcagacaaagacactctgctgtgatccttcaggctgcattcaggggtatgaaaactagaagacatttgaagagtatgcattcctctgcaacccttattcagagtaggtctagatcattactggtgaggagaagattcatttccctcaaaaaagctactatttttgttcagaggaaatatcgagccaccatttgtgccaaacataaattgtaccaattcttgcacttaagaaaggcagccattacaatacagtcatcttacagaagactgatggtaaagaagaagttacaagaaatgcaaagggctgcagttctcattcaggctactttcaggatgcacagaacatatattacatttcagacttggaaacatgcttcaattctaattcagcaacattatcgaacatatagagctgcaaaattgcaaagagaaaattatatcagacaatggcattctgctgtggttattcaggctgcatataaaggaatgaaagcaagacaacttttaagggaaaaacacaaagcttctatcgtaatacaaagcacctacagaatgtataggcagtattgtttctaccaaaagcttcagtgggctacaaaaatcatacaagaaaaatatagagc

SEQ ID NO: 957 - DNA, 4027 bp, Homo sapiens
gtactgcaggcaaggcatgctgtgtggcgcccatgtggttgttgacatgtaagacttctgctcaggaggaagatttgggccaaagctttacatttatgcctttggcatatggtccacttttgaagctatgtgagaggaaaagcttgcctgaaaagtgtgtgcgtggtgaacagaggagatagcccaggacagaccccaaaggaatactgatgactgggaaagaagaactcataatggagataaggaacactagaggagaaggaagatcagaagcaagcaagatcttgcagcagcaagatttattgtgaagagtgaaagaaaaagcttccacagcatggaaggggaccggagcgggttgcccctgctgactggggtggccagcttttattcccttatttggctctgccacatcctgctgattggtccattttacagagcactgattggtccattttgcagagtgctgattggtctgtttttacagagtgctgattggtgcgtttacaaacctttagctagacacagagtgctgattggtccgtttttacagagggctgtttggtgcgtttacaaacccttagctagacacagagcgctgattggtgcgtttttacagagtgctgattggtgcgtttacaaacctttagctagacacagagtgctgattggtgtgtttacaatcctttagctagacagaaaagttctccaagtccccacctaacccagaaggccagctggcttcacctctcaatcccccctctaaacaggacaccccaactgctgctgggaattgggcgatgactgctctagctacttcctgctggatagaggcaaagaagggtccctgcagttgcagtgtcttccagaggggagctctctaggccagtgaaagggccagcgggtcggtccaggggtcctcggtagaagttgttagtttagctcatttggggttccattcgtaagaccatctgtagcttgatggcctcgattctagaggaaacagatttgacaaggaggttaaaaataagggtccgaaggcgagtaatagcaagatggctgccacaggacctagaaaggggagaagccatgttgcccaactccagaggttggtataagagttttgaaaggcgttgtctgatttcagaagccttttcctgtaagcgccaggtggcatctcttactatccctgactgattagtgtaaaaacaacactcttcccctaagaagatgcagagtcctcctttctcagcagtgaggaggtctaggcctcagcagttttggagagtcactgctgccaaagagtctatttgggattgtagagtaaggatagatttcgttatttcttgcaaactatctgagaaatcctgtgagagtgtgtggtagtaggataatgaagtggatatactggctattccggttcctgtagcagtagccattcctaaccctattaagtagggtattagttgtatggctctgcactgacggacttgagctttgaggggaacagatagggtctgatttccataaaattagaagttagtacaatacatgttacactgttaacttttagcaaacttttgttgaaaaccttgtaagtttggggttttaatttttctttgctattaataaaacctcattcagtccatattaacttagaattggtatagatggctccttcctgatactgtaagtactttaaggtttggctgagtgcaaacagctgcatgtttgaacagaccaattattaggcaattttcttaactgcttctacaagagtttccttatcacttactgaatacccattgtgtcttttttccttagtagttgaggaggaaccgtatattatcctgtcctgaagggagttcctcctagatctggtcagacctttgtatggtaattaattaagatttagatcccctgttaggaaacctgctgggttaaggatttttgataggaaggctatgggttgtcagtggcttcagtgctttcgggctacgcccttgtttacactgacaacaaggtgatattggagtgttacagggttacagagaagaccttcaattatcaattataggttttaaatttaccctggcttttaatggaatagggtacactgtttttcctttactacttctatctctctctttctctctctttgacttcttctttgtctctttctttctctcttcctttctgttgcctctgccagctgcttatgttgctgttttcccctctccttccccttttgatggctttggcagtgtaagactgccacctccttgggtttttacactgcatgcaataactccatggtttctttgtgatatttaatgggcgttcccccagaggttagtaactccctttctttccatattgcagcatgggcatgtaggattagataagcatacttgctatctgtatacacatttattcttcttccctttcccagttctaaggctcgggtcagtgccacttgttctgctaacggggcgctggtccctgggggaagaggcttactttcaagtactgttactgtggcataacctgcccttcgtatcccattctccacaagtgaacttccgtcggtatataggttaaggtgaggattagctacggggacttctaagagatcatgtcaggcggcctaagtctggactacaatttgttggcagtcacgctcgattggttccccatcctctgggagaaaagtggcagggttgagggccacgcatgtacatatttgaagcaccagtccctcaatgagtagcgcctggtatctgagtaggtggttgtctgatagccataaacttcctttggcacctagtatgccatttacatcatgagtagtccagacagtgagatcctttccttgtattattttgatagcctctgacactaagatggccaccgccacaactacccttaaagagtgaggccagcctttcgctactacatcaatttccttacttaggtatgccactggttgtggggttgccccatgagtctgagtaaggactccaagagccatccttgctctctctgtgatgcataaagaaaagtttcatcctgtgggaaggcttaaggctggagcttgagtttgttccttccaatgcccagacttcagggttgattccctcctcaagtaggggacaacaaatgggtaactcgttccccatattcatgtagataataactccagctttggctactcctactggatctagtggagtcagcgtgatccgcttctcccactcacctagtccccacacgccctgagagctagtccctgtggtctgatgtccacccctcacttcttctgccctttccttatacttccctgctggagtgactggaagtggggatgctcttccctggacacaggggagaaggagggcccctggggttgtcacttcctctgcccttttgggtggggcaggaagggcacatttgatgttagcaattcagcgtaaaagtgaaaactaatttggcctcaagatttaagagtcatccaaacaacagttacagggctaatatctttaatctttacacatttgacaatatccaataaaaagaacaccaaactacatcaagacaaaggagcaacagacatgggcctgcagaggacaaaagagaaaacaggagcactcaataaccaggaactcagggactttggaggcaacctgtgtgggttaaacatgcttttgaagatttttatcattatttctcattagaaatataaaaagtgggctgggcgccgtggctcacgcctgtaatcccagcactttgggaggccgaggcaagtggatcacgaaatcaggagttcaagaccagcctggccaacatggtgaaaccccatctctactaaaaatccaaaaattagttgggtgtggtggagggcgcctgtagtcccagctgctggggaggctgaggcaggaggattgcttgacctcaggaggcagaggttgcagtaagctgagatcacaccactgcattccagcctgggtgacagagtgagactctgtctcag

SEQ ID NO: 958 - DNA, 2441 bp, Homo sapiens
acttccggccgcctccggatgcggggtcaggggcgtcggaaaggtcaccgcggcagcccggcgcgccccagcggggctgttctgagggtgctgcgaggttgctctacgtgcgggattccgcgggcgggcagcctgctctggagaggaaaggaaggcgcatccggctcggagcccagctctgctgcgcgtcgctcgctccctgcgcaacttgcagccccgggaggcggggcgcgtcctggctcccgcggggtcacatggagcagcgggcgctgtaatccagggaggctttggggacacaacgttagggaagtcagctacccgtgtgtgtccgctggcccactgggacactgggagctcaatgaggtggttatgagccaggtattttccaaaatacgcaccaggcaccagaccgaggaagccggagccccggagagcacgcaggggcgggtgggagaggaaggcgggcgaggctgctcagcgggtgccgggagaccgcagccgcgggggactcgcagaagagccaagacctgccacccagcccgggaagggagggaaggaccgcgagagggtgccccatttcagcctggggagacgcgtgtgctggccgccagtctctcttcccggcagagggccccagtgctgaccccagccccttttccacgctcgatgcttcttacaaagtggccgggcgaggagtgtcgctccccgagaggccaggcccttcctaaacactaaagtgccaggaagatgaaactgaatgtcctggatgcccgctttgcttaattactaattacgttcgttcactcgaagccactgcataagttgcccacagccacctgcagggcctctttagtgcagagaaaaacatgcctaaggcttttctccatttgaatttgttttaagtcatctgcatgggctgacgtgaaatagcaagtgaacaaaacaagttgcagaatggagtgtgtaaagtaatgccttctttgggagaaaaggtttctttctctacggctccactaatgtctgcaagtaaaaatactgatcagctctacggagtggaaatgaagatggggaacttacgctttttatttcattcacgtctacattgtttaatcactttaacactttaaaaaataaatatgttcacttagtatctttaagcaagtctcatgggctttagtttcctcctctctaaagggttgaggctgagctataaaagtaaacaatttgtctacatactggggattccaaaatagggggaggaaggaaggggagtaatggttgaaaaactgtgtattgggtactgtgttccctattcaggtgaggggatcaatagaaactcaaacctcagcgtcaggcaaatttaacaaacctgcacatgtgcttttgaatctaaaattagaaagaaaaagggtttgtctgtatcagtctctgctaacctctgtggataaaaccaggcgggtaacatacaacccctcccctccagaaggagagaagggagattgctctgggcagcagtgagtctcggcctgggcagaaatggtcagaaatgctgcagagccaggaggggtaaaatgagctcagggggcagtgaggtgcccctgcctggagcacagggtcccacgcagtgacaggtgcaggatgaggtgggtgggtatggagccagcttaaagagacctgcactgccaggcttagacgctttatctttattttgaaggcaatctgtgggtaaagaacaaaataaaagccttgtccctttgttcccttagccatctttcttatgctttctttgttaccagatagggcctttctcatactaccctggaatactgaaatttcagactaaatcagtcaggtggctgggagtgcaagaaatccttggcaagacccttctccccggaaagcctcctgacagcagagtacacagtgtcacaccttagaatgtccaccatgaaatgtaatggtgctcagtgtagcagatgattgcaaggccagtgtgaaggcaatctacccacaacatttataactctgcgggttgtcagcttcatgagctatgcagctgagtgggaaggcatctcctgactttcactcctcaagatccattctctatgatgcccttcccacttgaaagagctttctttagccaaggtctttctttgatactctgtccccctaaaaatcagtgcttttgaaagtcatggccagaatagtataaacaacagaagggttttataaatgttaatactttgatttcgcaaattttctgtcacttggaatgattcttaatacaaaacaatgtacattataaaaataaattcatagctcagtatagaactacattatctgcaaactctacttacacacatcaaatcataaagggtagcaggaagttgttatgaaattttgaatcacaagtacaaggatcaaataaagtatacaacact

SEQ ID NO: 959 - DNA, 3200 bp, Homo sapiens
aaaccagaagaaaaatatgagacggggaatcatcgtgtgatgtgtgtgctgcctttggctgagtgtgtggagtcctgctcaggtgttaggtacagtgtgtttgatcgtggtggcttgaggggaacccgctgttcagagctgtgactgcggctgcactcagagaagctgcccttggctgctcgtagcgccgggccttctctcctcgtcatcatccagagcagccagtgtccgggaggcagaagatgccccactccagcctgcatccatccatcccgtgtcccaggggtcacggggcccagaaggcagccttggttctgctgagtgcctgcctggtgaccctttgggggctaggagagccaccagagcacactctccggtacctggtcctccacctagcctccctgcagctgggactgctgttaaacggggtctgcagcctggctgaggagctgcgccacatccactccaggtgactcactgcagtacccagggacggggtatccaacgtgtgtcactcccttgatgcctagccctgcccctccttgaacctctctggctgagctgggctgggggctggggtctggggtctggctgtcactcacaggtaccggggcagctactggaggactgtgcgggcctgcctgggctgccccctccgccgtggggccctgttgctgctgtccatctatttctactactccctcccaaatgcggtcggcccgcccttcacttggatgcttgccctcctgggcctctcgcaggcactgaacatcctcctgggcctcaaggtatgacacagggggaggtagaagctctggccaagtggtggctgtggctggtgtgacctgccctgagctgagtactgggagtgggactggtttaaaggctggagtccatggagtagaacctataatgtcctggaacagtgggtttggcaatggcaaaagagggatcaagtcaggagcaggttgggaagccttggaggaggaggaggagttctctgggtgtccttgatggaggccccccagccacatcctgctgtccacagggcctggccccagctgagatctctgcagtgtgtgaaaaagggaatttcaacgtggcccatgggctggcatggtcatattacatcggatatctgcggctgatcctgccagcctggagtacagtggtgacaagatctcagctcactgcaacctctgcctcccaggttcaagtgattctcctgcctgagcctcttgaatagctaggattacaggcacgtgccaccatgcctggctaatttttgtatttttagtagagacaatgtttcaccatgttgcccaggctagtctcaaactcctgacctcaaatgatccacctgcctcagcctcccaaagtgctggattacaggcgtgagccactgtgcctgccctaagcctgtgtgttttattcttctgacttgcaggctaaagcggcagctcttccatatctcattgctatctcctagggcttccgctaggagactgatctggggctagaggcctccctctgtgcacacgagaatgctggaaatgtcacctctcagggctctgcctgcctctcagccctgaaagccatggtggaaaggggtggcgctgacatagacatctgaggaaagaagtgagggagggtaaagggtggtgcagtaagaggaggggtggggagggcttttggaggcgctgcccctcctggcctcctgtacaatgagagtgcactggactctccattctctggcacccacacactgcgggggccaatgacctgggtctcactcctgaatcaggtgggagatagggttagcaggaataacttcttgggcttccctgcctcagagctccaggcccggattcgaacttacaatcagcattacaacaacctgctacggggtgcagtgagccagcggctgtatattctcctcccattggactgtggggtgcctgataacctgagtatggctgaccccaacattcgcttcctggataaactgccccagcagaccggtgaccgtgctggcatcaaggatcgggtttacagcaacagcatctatgagcttctggagaacgggcagcgggcgggcacctgtgtcctggagtacgccacccccttgcagactttgtttgccatgtcacaatacagtcaagctggctttagccgggaggataggcttgagcaggccaaactcttctgccggacacttgaggacatcctggcagatgcccctgagtctcagaacaactgccgcctcattgcctaccaggaacctgcagatgacagcagcttctcgctgtcccaggaggttctccggcacctgcggcaggaggaaaaggaagaggttactgtgggcagcttgaagacctcagcggtgcccagtacctccacgatgtcccaagagcctgagctcctcatcagtggaatggaaaagcccctccctctccgcacggatttctcttgagacccagggtcaccaggccagagcctccagtggtctccaagcctctggactgggggctctcttcagtggctgaatgtccagcagagctatttccttccacagggggccttgcagggaagggtccaggacttgacatcttaagatgcgtcttgtccccttgggccagtcatttcccctctctgagcctcggtgtcttcaacctgtgaaatgggatcataatcactgccttacctccctcacggttgttgtgaggactgagtgtgtggaagtttttcataaactttggatgctagtgtacttagggggtgtgccaggtgtctttcatggggccttccagacccactccccacccttctccccttcctttgcccggggacgccgaactctctcaatggtatcaacaggctccttcgccctctggctcctggtcatgttccattattggggagccccagcagaagaatggagaggaggaggaggctgagtttggggtattgaatcccccggctcccaccctgcagcatcaaggttgctatggactctcctgccgggcaactcttgcgtaatcatgactatctctaggattctggcaccacttccttccctggccccttaagcctagctgtgtatcggcacccccaccccactagagtactccctctcacttgcggtttccttatactccacccctttctcaacggtccttttttaaagcacatctcagatt

SEQ ID NO: 960 - DNA, 2355 bp, Homo sapiens
agatgcgagcactgcggctgggcgctgaggatcagccgcttcctgcctggattccacagcttcgcgccgtgtactgtcgccccatccctgcgcgcccagcctgccaagcagcgtgccccggttgcaggcgtcatgcagcgggcgcgacccacgctctgggccgctgcgctgactctgctggtgctgctccgcgggccgccggtggcgcgggctggcgcgagctcggcgggcttgggtcccgtggtgcgctgtggctccggccttcgctgccagccgtcgcccgacgaggcgcgaccgctgcaggcgctgctggacggccgcgggctctgcgtcaacgctagtgccgtcagccgcctgcgcgcctacctgctgccagcgccgccagctccaggaaatgctagtgagtcggaggaagaccgcagcgccggcagtgtggagagcccgtccgtctccagcacgcaccgggtgtctgatcccaagttccaccccctccattcaaagataatcatcatcaagaaagggcatgctaaagacagccagcgctacaaagttgactacgagtctcagagcacagatacccagaacttctcctccgagtccaagcgggagacagaatatggtccctgccgtagagaaatggaagacacactgaatcacctgaagttcctcaatgtgctgagtcccaggggtgtacacattcccaactgtgacaagaagggattttataagaaaaagcagtgtcgcccttccaaaggcaggaagcggggcttctgctggtgtgtggataagtatgggcagcctctcccaggctacaccaccaaggggaaggaggacgtgcactgctacagcatgcagagcaagtagacgcctgccgcaaggttaatgtggagctcaaatatgccttattttgcacaaaagactgccaaggacatgaccagcagctggctacagcctcgatttatatttctgtttgtggtgaactgattttttttaaaccaaagtttagaaagaggtttttgaaatgcctatggtttctttgaatggtaaacttgagcatcttttcactttccagtagtcagcaaagagcagtttgaattttcttgtcgcttcctatcaaaatattcagagactcgagcacagcacccagacttcatgcgcccgtggaatgctcaccacatgttggtcgaagcggccgaccactgactttgtgacttaggcggctgtgttgcctatgtagagaacacgcttcacccccactccccgtacagtgcgcacaggctttatcgagaataggaaaacctttaaaccccggtcatccggacatcccaacgcatgctcctggagctcacagccttctgtggtgtcatttctgaaacaagggcgtggatccctcaaccaagaagaatgtttatgtcttcaagcgacctgtactgcttggggactattggagaaaataaggtggagtcctacttgtttaaaaaatatgtatctaagaatgttctagggcactctgggaacctataaaggcaggtatttcgggccctcctcttcaggaatcttcctgaagacatggcccagtcgaaggcccaggatggcttttgctgcggccccgtggggtaggagggacagagagacagggagagtcagcctccacattcagaggcatcacaagtaatggcacaattcttcggatgactgcagaaaatagtgttttgtagttcaacaactcaagacgaagcttatttctgaggataagctctttaaaggcaaagctttattttcatctctcatcttttgtcctccttagcacaatgtaaaaaagaatagtaatatcagaacaggaaggaggaatggcttgctggggagcccatccaggacactgggagcacatagagattcacccatgtttgttgaacttagagtcattctcatgcttttctttataattcacacatatatgcagagaagatatgttcttgttaacattgtatacaacatagccctaaatatagtaagatctatactagataatcctagatgaaatgttagagatgctatatgatacaactgtggccatgactgaggaaaggagctcacgcccagagactgggctgctctcccggaggccaaacccaagaaggtctggcaaagtcaggctcagggagactctgccctgctgcagacctcggtgtggacacacgctgcatagagctctccttgaaaacagaggggtctcaagacattctgcctacctattagcttttctttatttttttaactttttggggggaaaagtatttttgagaagtttgtcttgcaatgtatttataaatagtaaataaagtttttaccatt

SEQ ID NO: 961 - DNA, 3210 bp, Homo sapiens
agaacaatgactgcgccgccgggtacccgggagcgcgtcggaggactgtgagcagccgccgccgggagagctgcgggcggcgcagtgtcaacgctgggctcgggagcctccagcgcagatcctgcccagcgcccgcagcccgcgcgaagccgctgggctccggcactgcagcgctgctcggggactgtgcattgttgtgagccggagaaggggcgcggggattacaaagcctgaagaccccggagcccctttagccatgtggatacctacggagcacgagaaatacggcgtggttattgccagtttccgaggaaccgttccatatggcctgtcattggaaattggagatacagttcagatcctggagaagtgtgatggctggtacagaggatttgccttaaaaaacccaaatatcaagggtatatttccttccagctacgttcacttgaaaaatgcctgtgtaaagaacaaaggacaatttgaaatggttattcccactgaagactctgttatcacagaaatgacatcaacattaagagactggggaaccatgtggaaacaactctatgtgcgtaatgaaggcgatctcttccaccggctgtggcacatcatgaatgaaatcctggacctgaggcggcaggtgctggtgggccacctcacccacgaccggatgaaggacgtgaagcgccacattactgcccggcttgactggggcaatgaacaactgggactggacctggtgcctaggaaagagtacgcaatggtggatccggaagacatcagcattactgagctctaccgatcgatggaacatcgacatcggaagaaagacaccccggtgcaggccagcagtcaccacctctttgtccagatgaagagcctcatgtgttccaacctgggagaggagctggaggtcatcttctcactctttgacagtaaagagaaccggccaatcagtgagagatttttcttgaggctgaatagaaacgggcttcccaaagcccctgataaaccggaacgacattgctccctctttgtggatttgggcagcagtgagctaagaaaggacatttatatcaccgtgcacattatccgaatcggtcgaatgggagcaggagaaaaaaagaatgcctgtagtgtccagtaccgacgaccctttggctgtgcagttcttagcatcgctgacctgctaacaggagagacaaaggatgacctcattctgaaagcgtaacacagagagtgagtggtaccaaatccatgagaacatcatcaaaaagctgaatgcacgttataacttgactggctccaatgcaggtttagcagtttccttacagctattgcacggagacattgaacaaatcagaagggaatattcatcagtattttctcatggagtatccataacaaggaagctgggattttcaaatattattatgcctggtgaaatgaggaatgatttatatatcactattgaaaggggagaatttgagaaaggagggaagagcgtggccagaaatgtggaagttacgatgttcattgtagacagtagtggccaaaccctgaaggattttatctccttcggctctggggagccaccagccagtgagtaccactcctttgtgctttaccataacaacagtcccaggtggtctgaactgctgaaacttcccattcctgtggataaattccggggtgcacacatccgcttcgagtttcggcattgttccacaaaggagaaaggagagaagaagttgtttgggttttcttttgtccctctgatgcaagaagatggtaggactcttccagatggcactcatgagctcatcgtgcataagtgtgaagaaaacacaaatcttcaggatactacccgctacctcaaacttcccttttccaagggcattttccttgggaataataatcaagccatgaaggccacaaaggagtccttttgtattacatcttttctctgttccacaaaactcacacaaaatggtgatatgcttgatcttttgaaatggagaacccacccagacaagatcactggctgtctctctaaattaaaagaaattgatggctcagagatagtaaagtttctgcaggatacactggataccttatttggaattttagatgaaaattcccaaaaatatgggtctaaagtgtttgattctttggttcacataataaatttgctgcaagatagcaaatttcatcattttaaacctgtaatggacacttacattgagagtcattttgctggggcacttgcatacagagatctcatcaaagtgctcaaatggtacgtggaccggatcacagaagcagagcggcaagagcatatccaggaggtgctgaaggcacaagaatacatttttaagtatatagttcaatctcgaaggctgttttcccttgccactggtgggcaaaacgaagaggagttccgctgctgcattcaggagcttctcatgtcagtccgtttctttctttcgcaagagagcaaagggtctggagcattatctcagtcacaggctgtgtttctgagctctttccctgccgtgtactcagaactgttgaagctctttgatgtccgggaagtagccaacttggtccaggacaccctgggcagtctgccgaccatcctgcatgtggatgattccctgcaggccatcaaactgcagtgcattggcaaaaccgtggaaagccagctttataccaacccaggtagggtgagtctcttggaggaaattgtgcctctgaaaagccattttgtatattttgtagccattggtcagcagatgcaattaaaaacaaaacactaaaaggcattttctcaaaaccattgtttatttggatggtaaatgtatttagtagtcaaatacaaaagtatggcaattaaaactttatttctggaaagaatgaaaactaatgattacattattgttttttatgtttaatgggatttaacactccttcagagatgcttacaggtacctgataggatccttatttttctcttttgtttttaaaagtttttcatcaatttatgttctgaagctatatgaaactttgcattattgttgttttttactttaccccaagagcaagtggtcagtgactcaaattaattttgttataataactgttagtaagttccattgcctcttgttttcttctgtttttttttcccgaataaataacagagtgagtact

SEQ ID NO: 962 - DNA, 1987 bp, Homo sapiens
agaaccccgcggggtctgagcagcccagcgtgcccattccagcgcccgcgtccccgcagcatgccgagcccccgcctgctggccgcgctgtgcggcgcgctgctctgcgcccccagcctcctcgtcgccctggggtgatgtggccttttccagaaggaggaaacaccatacctatcttacacacagatatctgttccaaaaacccctgccacaacggtggtttatgcgaggagatttcccaagaagtgcgaggagatgtcttcccctcgtacacctgcacgtgccttaagggctacgcgggcaaccactgtgagacgaaatgtgtcgagccactgggcatggagaatgggaacattgccaactcacagatcgccgcctcatctgtgcgtgtgaccttcttgggtttgcagcattgggtcccggagctggcccgcctgaaccgcgcaggcatggtcaatgcctggacatccagcagcaatgacgataacccctggatccaggtgaacctgctgcggaggatgtgggtaacaggtgtggtgacgcagggtgccagccgcttggccagtcatgagtacctgaaggccttcaaggtggcctacagccttaatggacacgaattcgatttcatccatgatgttaataaaaaacacaaggagtttgtgggtaactggaacaaaaacgcggtgcatgtcaacctgtttgagacccctgtggaggctcagtacgtgagattgtaccccacgagctgccacacggcctgcactctgcgctttgagctactgggctgtgagctgaacggatgcgccaatcccctgggcctgaagaataacagcatccctgacaagcagatcacggcctccagcagctacaagacctggggcttgcatctcttcagctggaacccctcctatgcacggctggacaagcagggcaacttcaacgcctgggttgcggggagctacggtaacgatcagtggctgcaggtggacctgggctcctcgaaggaggtgacaggcatcatcacccagggggcccgtaactttggctctgtccagtttgtggcatcctacaaggttgcctacagtaatgacagtgcgaactggactgagtaccaggaccccaggactggcagcagtaagatcttccctggcaactgggacaaccactcccacaagaagaacttgtttgagacgcccatcctggctcgctatgtgcgcatcctgcctgtagcctggcacaaccgcatcgccctgcgcctggagctgctgggctgttagtggccacctgccacccccaggtcttcctgctttccatgggcccgctgcctcttggcttctcagcccctttaaatcaccatagggctggggactggggaaggggagggtgttcagaggcagcaccaccacacagtcacccctccctccctctttcccaccgtccacctctcacgggccctgccccagcccctaagccccgtcccctaacccccagtcctcactgtcctgttttcttaggcactgagggatctgagtaggtctgggatggacaggaaagggcaaagtagggcgtgtggtttccctgcccctgtccggaccgccgatcccaggtgcgtgtgtctctgtctctcctagcccctctctcacacatcacattcccatggtggcctcaagaaaggcccggaagcgccaggctggagataacagcctcttgcccgtcggccctgcgtcggccctggggtaccatgtggccacaactgctgtggccccctgtccccaagacacttccccttgtctccctggttgcctctcttgccccttgtcctgaagcccagcgacacagaagggggtggggcgggtctatggggagaaagggagcgaggtcagaggagggcatgggttggcagggtgggcgtttggggccctctatgctggcttttcaccccagaggacacaggcagcttccaaaatatatttatcttcttcacggg

SEQ ID NO: 963 - DNA, 2155 bp, Homo sapiens
atacaaaatattagcctcctgagtagctgggattacaggcatgagccaacatgcccagctaattttttgtatttttagaagagacggggtttcaccgtgttagccaggatggtctcgatctcccgacctcgagatccacccgccttggcctcccaaagtgctgggattacaggcgtgagcctccgcgcccggccaccaccgcgcccagctggctacgtttttagaaaagaatttccagtttgtgctggggctgctacaagagctcgatgccctggtccctgctcagggacgtgggtgggtgccttgtctgtccccacaccctggtcccagcctcgtgtgtccctgggcaggaacatcgccaggcggggcctctgggttcccagcgccttagcccagggcccgccagctgccagcgaagggtgccttcccgaagggggtgccttcccgaaggggcctcctcagcaggcgctgggctcttcccttcccggaggcgtggccagaagttccccttgggcctccggtcctcggggcgtaagggccacggtgtatttttgggatgaaaaccagtccttcccggggaggagccgcaggttcctgggggtcaggcaggcagcgcgggccgtgctcctccactctgctgaccgcgtctcgccgggccttgcagccggcacagtcttcactaccgtagaagaccttggctccaagatactcctcacctgctccttgaatgacagcgccacagaggtcacagggcaccgctggctgaaggggggcgtggtgctgaaggaggacgcgctgcccggccagaaaacggagttcaaggtggactccgacgaccagtggggagagtactcctgcgtcttcctccccgagcccatgggcacggccaacatccagctccacgggcctcccagagtgaaggctgtgaagtcgtcagaacacatcaacgagggggagacggccatgctggtctgcaagtcagagtccgtgccacctgtcactgactgggcctggtacaagatcactgactctgaggacaaggccctcatgaacggctccgagagcaggttcttcgtgagttcctcgcagggccggtcagagctacacattgagaacctgaacatggaggccgaccccggccagtaccggtgcaacggcaccagctccaagggctccgaccaggccatcatcacgctccgcgtgcgcagccacctggccgccctctggcccttcctgggcatcgtggctgaggtgctggtgctggtcaccatcatcttcatctacgagaagcgccggaagcccgaggacgtcctggatgatgacgacgccggctctgcacccctgaagagcagcgggcagcaccagaatgacaaaggcaagaacgtccgccagaggaactcttcctgaggcaggtggcccgaggacgctccctgctccacgtctgcgccgccgccggagtccactcccagtgcttgcaagattccaagttctcacctcttaaagaaaacccaccccgtagattcccatcatacacttccttcttttttaaaaaagttgggttttctccattcaggattctgttccttaggtttttttccttctgaagtgtttcacgagagcccgggagctgctgccctgcggccccgtctgtggctttcagcctctgggtctgagtcatggccgggtgggcggcacagccttctccactggccggagtcagtgccaggtccttgccctttgtggaaagtcacaggtcacacgaggggccccgtgtcctgcctgtctgaagccaatgctgtctggttgcgccatttttgtgcttttatgtttaattttatgagggccacgggtctgtgttcgactcagcctcagggacgactctgacctcttggccacagaggactcacttgcccacaccgagggggaccccgtcacagcctcaagtcactcccaagccccctccttgtctgtgcatccgggggcagctctggagggggtttgctggggaactggcgccatcgccgggactccagaaccgcagaagcctccccagctcacccctggaggacggccggctctctatagcaccagggctcacgtgggaacccccctcccacccaccgccacaataaagatcgcccccacctccaccctc

SEQ ID NO: 964 - DNA, 1847 bp, Homo sapiens
cagctttgcgatccagcagagagggctggagacgggacgaaggccacaacagacccggccctgccagcgggcggtggcgcctccagatcagagccctcgggaaggaggcctgggcgggcctggcccgttcacctgtgtgccctgcagttctgcccgaggctcaactctcaagggcctgggaggggtgctgccggccaagagggtccaggacctcactggactgtgccccacagggagatcccgaagagcctgtttctgtccctcggggagccaggagggaaccaggaccatgttccagtaaatgaggactgcagcaggagccgtgagccctgactcccggccagagacacgacgtcagaccagaaagaatgaggaggccgcgtggggcccgcgggtgtgcagggcagagagggaggacaacaggaagtgccccccctccatcctgaaacggagccggccggagcaccaccgcccagaggccaagccccagaggacctcgaggcgcgtgtggttccgagaacccccagcggtgaccgtccactacattgctgacaagaacgccacagccactgtcagggtgcccggccggcccaggccacacggcggctccctgctcctgcagctgtgtgtgtgcgtcctgctcgtgctggccctgggcctatactgcggccgggccaagcccgtggcaacggcactggaggacctgcgggcccggctcctcggccttgtcctgcacctgcggcacgtggccctcacctgctggcgcggcctcctgcggctctgacgggcaggacgggcaggacgggcagggcttccaggagagctcaagcactccgggggctccgagacagcctgagccctggccctgctgcttggtgaatcatgggggccaaaaggggctgctgcctgagggctaactaggaaaagggggaccccgtggcgtgagatcggacatggggggcacagcgggcggccccgccacactagtcagcacagccctcctgtctcctgtgttgggtccatgtgagattttattagaaagaggattcgactgctaacagttgaggctccccaggctcacccaaagacccctccctcgtcccagcaggaactcctgctgctgctagggcctggcccggccatcaccgtgtgcaccctcttgaggagggggacacactgcccgtgttcaaggggctgctcggaggaggcaaacccagccttttgcgattatggcttgtggggaatccagacctcgaaaccccacggggagggaagggtctggttgtcaaggtgggtccctttgatgtgaggtgccatcctctgagcccaggtctgacccccctacccagccccgtgagtctggagaggccccagggaaggacccctcatcaggggcggcttcaggtgtagaagccgaggggacagcaaggggcccagacacccccgaccttcagaacagccatctgtgcccagctctgcaggccaggcacacccagctgagcccggggccagccagcaccacccaccagctggggcctgtgggtcccggagaccgtctgtggttgtggctttgtcgccggattgcagagctgaagggagccctgtggatgacaaacaccaggggcctctccagaccctacgtggggggagggctgaacaaagcagggaggcccacggttagacaccaggcagaactgcccaggagagacacagggacaatcagaccagcgtcctcgaggttagcctgaggcgggtgggcacggccgaccatccacccggtggttcctgtttgtcccaccacttaactgggagacactgttttattaaaacacaccgtggcttccttc

SEQ ID NO: 965 - DNA, 2139 bp, Homo sapiens
actgatgtcctgcgggagatgcaggaaggccacggcggctggaaccccaggatggcggagtttatcggacagacgggcaccgtgcatcgtatcacggaccgcggggacgtgcgcgtgcagttcaaccacgagacgcgctggaccctccaccccggggcgctcaccaagcaccactccttctgggtgggcgacgtggtccgggtcatcggcgaccttgacacagtgaagcggctgcaggctgggcatggcgagtggacggacgacatggcccctgccctgggccgcgtcgggaaggtggtgaaagtgtttggagacgggaacctgcgtgtagcagtcgctggtcagcggtggaccttcagcccctcctgcctggtggcctaccggcccgaggaggatgccaacctggacgtggccgagcgcgcccgggagaacaaaagctcactgagcgtggccctggacaagcttcgggcccagaagagtgacccagagcacccgggaaggctggtggtggaggtggcactgggtaacgcagcccgggctctggacctgctgcggaggcgcccagagcaggtggacaccaagaaccaaggcaggaccgctctgcaagtggctgcctacctgggccaggtggagttgatacggctgctgctacaagctagggcgggcgtggacctgccggacgacgagggcaacacggcactgcactacgcggccctggggaaccagcccgaggccaccagggtgctcctgagtgctgggtgccgggcggacgccatcaacagcacccagagcacagcactgcacgtggccgtgcagaggggcttcctggaggtggtgcgggccctgtgtgagcgcggctgtgacgtcaacctgcccgacgcccactcggacacgcccctgcactccgccatctcggcgggcactggagccagcggcattgtcgaggtcctcacggaggtgccaaacatcgatgttaccgccaccaacagccagggtttcaccctgctgcaccatgcctccctcaagggtcacgcgctagctgtgagaaagattctggctcgggcgcggcagctggtggacgccaagaaggaggacggcttcacggcgctgcatctggctgccctcaacaaccaccgcgaggtggcccagatcctcatccgggagggccgctgtgacgtgaacgtgcgcaaccggaagctgcagtccccgctgcatctcgccgtgcaacaggcccacgtggggctggtgccgctactggtggacgctgggtgcagtgtcaacgccgaggacgaggagggggacacagccctgcacgtggcgctgcagcgtcatcagctgctgcccctggtggctgatggggccgggggggacccagggcccttgcagctgctgtccaggctacaggcctcgggcctccccggcagcgcggagctgacggtgggcgcggcggtcgcctgcttcctggcgctggagggcgccgacgtgagctacaccaaccaccgcggtcggagcccgctggacctggccgccgagggtcgcgtgctcaaggcccttcagggctgcgcccagcgcttccgggagcggcaggcgggcgggggcgcggccccgggccccaggcaaacgctcgggacccccaacaccgtgacgaacctgcacgtgggcgccgcgccggggcccgaggccgctgagtgcctggtgtgctccgagctggcgctgctggtgctgttctcgccgtgccagcaccgcaccgtgtgtgaggagtgcgcgcgcaggatgaagaagtgcatcaggtgccaggtggtcgtcagcaagaaactgcgcccagacggctttgaggtggcgagcgccgcccccgcccccggcccgccgcgccagctggtggaggagctgcagagccgctaccggcagatggaggaacgcatcacctgccccatctgcatcgacagccacatccgcctcgtgttccagtgcggccacggcgcatgcgccccctgcggctccgcgctcagcgcctgccccatctgccgccagcccatccgcgaccgcatccagatcttcgtgtgagctgcgccgtccgccgcgcccgagctgccttcgcgtgccccccgccctgtgttttataaaaagaaagattctcgg

SEQ ID NO: 966 - DNA, 2125 bp, Homo sapiens
tgcgccctctcggggacgcgaatgccccgcgccgggcgggcgcccgcggagggaggtcccgctccagggacgcggagctccagatgcctgcgcccaaggcccctcgcctggcgccggctggtcccgaacttcggggcatgggcacccaggaagggggctgcgcgtgttgggaggcccgtcctctcgccgcgaacctccggggcagccggggaacccacctgcggagcgggaagcccaggaacgctcgaagagggtgtggcctcaggtaggacgcggcggcgaacccagagcgcgggagaagttgccaagtgtcgctggggccttggccaggagcccctctgcccgaggggcgccgtgctgctcaactctttctctccacctgcttggccccagttcccgcccgcccttcgcctccgggccctggcctggccacagccgcggggacctgcctgcggctccacggcccagtggccgcctcgcggagacccgacctggagaatcagctgagcgccggctgtgtgtaatcacctcgttcactggcatcgcagatgcacgctccagagccgcgggccgactctcccggacctgagcgggccgcgtgtgcccacccacacatcctggagagcccacgcgggagtcggaaaacctgtcaccttggatgatctgtcccatgtggacagggccccaagactgtgctggggtagccccttgcgcaggcaggaaagcgggatttaagggattccagttcccttgtcagcccttgcgcagtcctgagtcctgaggactttctagcctgagagtcctagggcaggagacccgcacccccagagcggctagggcctgtttcggagcccctccgcctgtgattttgtcccagagtcggcatcctctgcttgtcctcagcagtccctgcctaagatcagaatggccattccaaggggctcactcctggctgcccctgtgccatgtttcttttggggtacagggtgttttctatactgggggaagggacaggaatcactcatctcttccccagataaagaagtgagaagacctttgctctccttgtcttgggcccccagagaaaggctgtgttctggctgagtgctgaggaagttctggcttggaaactcagtacatgtggactccaaatggctgccgtcaagtggtggctgggtgactgccagtgtcacagagcggggaccaaggacagtgcagggattttaaaaatcattgttgggcacctcagacttcaatgattaactgaggtcactatggccacttatttttgttcactgattctttagacgcatcaatctactcacggctcaatcttttgcattataggctgtattggtttcacacaatttactctaaggcgcccacctaatagagctcaggcaacccgtgggaacctgacagtcccaaacaggtctgtaccctgtgtggctgcaccacaagcccaatgccctcggctttcctagggaaagcatggtgccaggtgcagatgctggccctctgtgctgtgggacagtggtgtgggagccagccagctaaccataccctgctgccatccccaacatccccaacacatatttatatttagtttctgttctcctccccttactctgtcgcctcctcctcctcctctttgtgtctttcccacgcggattctttctctttcctctgagtggacaatactgtaggcctgacccgcttagacaaactctgacctcctgtggtcacccaggaagctgactgctaggccttggatgagggggcagtgggagggggaccaggtgataccagaatggctccccccacagattcgttacccaaggacatgggtacactggtcgaatgctggctgcagaagcagaatgtgctgcgtggaggtggcagagattggttgctgaggatttgaaatgaaccatgaaccaaagctagaatgaaagcattatattgtctaacctagaatcgacaccctaaattatttttactgattcatgaatgcatatgtgaattattttctttgactacaaatgccttatatacccaaatcacagctccaagcagtacttttgaacagaactacaataaagtatgaatgttagattattaccag

SEQ ID NO: 967 - DNA, 1508 bp, Homo sapiens
actcagccagagacagcagcccctgccactgccccaccattaccccccatagagtccccaccagcaccatgccgggggtaccagggcctgggcctgagctggccgcagcccttgaggagcagttgggccgggcactggaggagctgcgggcggtggctgaagcaggccgggtggcagtgacccaggcagccgaggtagctgtagccaccgtggagccggtggcccgggcagctgaagagctgcgggcagagagagccgctcctccaccggcaccgcccgcagcactagtctcatggaagcagagccagcagagcctctcgctgcagcagtggaagcggccaatggggctgagcagacccgagtgaacaaagcaccagaagggcggagccctctgagcgctgaggagctgatgactattgaggatgaaggagtcttggacaagatgctggatcagagcacggactttgaagagcggaagctcatccgggctgcacttcgtgagctccgacaaaggaagagagatggcagtggcagcaccatgatgcaaaccaagaccttctcctcttcctcctcatccaagaagatgggcagcatcttcgaccgcgaggaccaggccagcccacgggccggcagcctggcggcgctcgagaaacggcaggccgagaagaagaaagagctgatgaaggcgcggagtctgcccaagacctcagcctcccaggcgcgcaaggccatgattgagaagctggagaaggagggcgcggccggcagccctggcggaccccgcgcagccgtgcagcgatccaccagcttcggggtccccaacgccaacagcatcaagcagatgctgctggactggtgtcgagccaagactcgcggctacgagcacgtcgacatccagaacttctcctccagctggagtgatgggatggccttctgtgccctggtgcacaacttcttccctgaggccttcgactatgggcagcttagccctcagaaccgacgccagaacttcgaggtggccttctcatctgcggagacccatgcggactgcccgcagctcctggatacagaggacatggtgcggcttcgagagcctgactggaagtgcgtgtacacgtacatccaggaattctaccgctgtctggtccagaaggggctggtaaaaaccaaaaagtcctaacccctgctcggggccccacggatgctggtggactgtgtgcccctggtggaggtggacgacatgatgatcatgggcaagaagcctgaccccaagtgtgtcttcacctatgtgcagtcgctctacaaccacctgcgacgccacgaactgcgcctgcgcggcaagaatgtctagcctgcccgcccgcatggccagccagtggcaagctgccgcccccactctccgggcaccgtctcctgcctgtgcgtccgcccaccactgccctgtctgttgcgacaccctcccccccacatacacacgcagcgttttgataaattattggttttcaacg

SEQ ID NO: 968 - DNA, 2083 bp, Homo sapiens
cttttctcttgtaaaacaatctaaatagaaatgaagattcatcatgcgtcatggctttcatttgctatggtagtaattacctcaaatgtacaagcggcaaatccattagctgatagtcccttaatgcacccacctgttggtccattagtaggaccctatgtagcacctgaagaaccaaaatataattatgctgaagtattacataaaagttatttattttaccatgctcaaaaatcgggtgtattaccatatcagcgtatggcatggagatctgattcttgtaaagtctgtgttggtgattttggtgaagatctgtctcgtggttggtacgaagctgctaacaccatgaaatggggtttaccgttaggttggactgtaacacaattagcttttaatatcatgatgtttgaagattcaatgaattcagttgatgaattagctgaaggtcttgaattattaaaatggggagcagattttatcacaaatgctcattataacgatacttatatcgttggccaattgggtacgtctgctattgggcccatctcaaagcaaattgaattagatgtcgatttcaattattggggtcctcctgaagaatatgaagaatgggttcctacaggtcttcctcataaagcttactatatctctcctgataatccatcgtctgaaatcgtaggtgagtatagtgctgctttggctgctgtttctattccatggagaagacataatgctacctacgctgatattttggttgatcatgcaaaacgtctttataaatttgcttcagacaatccaggtagttatgtttcatctcgtcataatgctttccaatgggctactttttggtatccttctactcgttatgaagatgagttagcttggagtgctgcttggttatatgcagctacaaaagataattactatttggatgaagcaaagaaatggtatgctaaatgctctgattcttggaccgaatattcttgggatgaaaagggtggtgctcttcatgtcttgctttatgctatcactaaagatggccatttctacaagaatgcaatgaattattttaatcaattcttacctggtagtcctactcaagttgtcaaatttactcctcgtggtcttgcttatattgagcattggggttctgttggttattctggtaatgtagcttttttgatgttagcatttgccaaatctattggttatggaacagatgaaggtaaagccatgacaacctttgctacacaacaaatcaattatgcattgggtgattatggttatagctgggttgttggttttggcgataattatccctctaaaccttatcataaatcttcatacaattcttatattgattaccctatgcgtggtacatttcaagataaggtagaaggtgactttactgaatcaaaaacaaaccaacgttttattttatacggtgctgtagaaggtggacccaatattgatgatacttggtacgatgaccgttccaattatgaatactctgaagtgactcaagattataatgctgcttggtctggtgccattgctggtttaattgatttctatggttctcaaaagtttgagccttttacggattgtggtttagatttgggttggtctcatgctaatgcttcagaacctcctgcttggccagaggatgattgttatcatacttgtaacaagggctgtccacgtggagaaatgaaatcttcatatgcatggaaacttttaacagaacctccagaaaaaatgcatgagcaattagaagtactttatcctggtcaaggtttatcgaaggctgctgctcttgaaggaaagactttggcagatttaaaagcaataggcattaaattaaatgcaaatgacacagacagtgtgagtggtgatgccatatctgcaagcgcccaaacagaagttaaatcatctgatacatctaaaaccatctctataactttatttacatatgctgtaatggcaattgctgtctatgccgtaaatctttaaaaatttcatatatcaaataaaactaaacattttttctagaaaaaatggtccgctgatgtttcaagagttt

SEQ ID NO: 969 - DNA, 1859 bp, Homo sapiens
caaaacactagaaaaacaaggaatcagatgccttctaggaatgaggttcaaactcaagggcaaatgttagagaatttgatcttggagagaaagttgtattactagataatgtgatcattattaacgtttattgcatttatgtgagcgaatgattattcacaagttgtcttgctctctctgcctggcagttgaagaaaacatatagtccagagggccagagtcctccattcacactcaatgtcaactttctaagagagcacagccgtgttactcattctgggtgccacaatgcctgctgtcccttgctgacagagggattgaggatgatttgagtccagcctgtctttaaagcacattgagttcagaagatgtctacaaatgtgagagagttggaaatgagctaggagaaaaggctatgggaactggggtggatttgaacaatgtccttgtgtcttctttattttcccaagattggaagcagttagaatgcctaggacctgacaccttattctctgtcttctcatgcatcattctgggctatgcaaataacaacaatgcatgcgaatattatgtgagcgaatacagtactaatctcttctgcccttgccttagaaaggtagtctaaggaagggcaggaggattcttagggcattcgtagaataaattagaacttagatcaattagaggacacagatagccacacagaggggatgaaacctttgctgaaggcagaggctctgttgtgttaccttaaattgctagaatttgcttcatagccaagttgcaaaaactagcctatgccatgaatagaatgcttgcattccagggaaaaaatccaaattcttcccacgtggcagcagaaaagcgaaaggatacactgtcaccagtaattcaggttgtatgtgggaagcctacagaattccgccaaatgttgcagacatgcatgaccagtgctatgaagcagggatctcatttctggtccccaagaagcacagatatcaatcacaatgttctcagaaatacagatggatacattttgccacaatttgttatatggtcacctctcactaacctgtggggtttacagtccatcaaagtacttatctaaagtggcaaaatcacagttggggagatcaagatctcataaaatacaggcagctgggaaaaataattgcattaatttatgtgacgaaggcagtagtgaaagttctagaaggtttccactcccaaaataaccactgtgtcatcatgaggtggccatatggggtgatccttttgaattgctttcttcagttgtctgggagacattgtccacatcatctgctaaggcagaggctcccagcagcaaacctggctctctgcagtgtattcgagccagccctcactggctggaaatggaaaaccttttgcaattgcttgttcactctgggtctccctctctccctcctttcctctcattttcctccctctctctttccctccttcccttttaaaatacaagtctaggcagttgtgtaaccttcaaacttttcataaaatatgcaagagcttaaaggcatagtttttgaagtctggtctttcatcccaaattatttgagagcgtcagtcttaatatcttcatttctctctctctaggtactttcctgtaataccctacctcctatagtaccctgtaggattcactctctggagtctacagggagaaagagcaataatttaggattttcctgttcttctcttaggaattaggacagaagtaacgagatagctgattttatattttttgtaaccagtttaaaagcattatctcaaaacctggaataaaagattgatgcatataaagtaccctgtgctcaacc

SEQ ID NO: 970 - DNA, 2055 bp, Homo sapiens
ttctttcttctgttttgttatcccactgcccctgtggctcttctgtctcttcatgccttcctggtctggcctctgctcatttcattcatcttatggggtgcctccatggttgctgtctttgggctgctattctagctcatgattccaaagtggggtactctacttcggtgactcaacatgaccttaaagacttgcttatgcacctctgacaaatcaagatgcacgacccctggacaccttcaaaaagccacagggcttttagtttctcagatgatcaccacattggcatcctattgctgctgtaacaaattcgaacctcgtggcttcatcatcttactgttttgcaggtcagaagccctaaaagaaggtgacggcagggttggttcctcccaaaagctctgggaagaatctggtccttgccttttccagattctagaaacctccctcatattttgcctcgtgatcccctcctcacacttcagagcccgtcggcacaacctctgcttctgttatctttccttcacattgacccttctgccttcctcataaatagaaccttgtgattacgtttggccaacccagataatccagtctatctttccatctctagacccttattttaatcatacctgcaaactcctttttgccatgtaaggtaacatagtcccagattctggggactgggatgtagacatctttggaggcccttattctgcctaccacagtcatgatgagttggggcaatgttgctgactgacgacacacagaacctctaaaacattcttttactttccctgttcgtctccattgtaaatagggattctttgtctagggtttggggtttaagcctgttaatttagtagaacctcatttttctcttctacccctggaagatttttttccactgaggctgtgattcctagagtcagccagtatttcttgagttctatttattgtgcacctgggtacacaaaatgagtaagatacgaccctggaccttatggactgctagaggaaaaagatgttactgcagtagagtacatgttgtgttgatttcattttctagatatctttaggttccgtccctttgtttctgtcttctctcattgtgtcatttgttactatgatttctgaaaacaatttacccagtttcccttgacatcagttggactcacaccgtatctcctccagtccattactgtacacacagaggtgtttgtgttacctctttgcctaaggtccttccattcccagcatcagaatacactgaaatctttaacatgtcatacttcttgttgcagtctgtattgtgcttttccttctagcctttttacctgccataccaagaagcacttctgttcttgccatatgggataagttatacttcccttagagttcccctagagttctcctatactttccctatagtttttttatagttctcctaaagttcccccatagctaccctatatttcccctatagttctgtgctctctcttggctcctgactctgaagagcttctcttattcactagacttttcctctttattccctgcctaagaaacttctgtgcatcctgaagcctgggcttaagcagtgcttcctagaaagcttgcactgacaacatctccaggactatagtttgaatatttgtcccctccaaaactcatgttgaaatattaatcaccagtattaaatcagtatttaatctccagtgtcattattgagaggtggggcctttaagaggtgattgggtcatcataggagagccctcattaatggattaatacatgtgtggattagtggattaatgggttatcatgggagagggaccagtggctttatgagaagaggagagacttgaactagcacactcagccccctcaccatgtgatgccctatgctgcctcaggaatctgcagagtcccggccgggcgtggtggctcacgcctgtaatcccagcactttgggaggctgaggcgggcagatcatgaggtcaggagattgagaccatcctggtgaacacggtgaaaccccatctctactaaaaatac

SEQ ID NO: 971 - DNA, 1731 bp, Homo sapiens
agtccggacagacagacaggcagacagacgcacggacaagcagatgctccttggccagctatccactcttctgtgcctgcttagcggggccctgcctacaggctcagggaggcctgaaccccagtctcctcgacctcagtcctgggctgcagccaatcagacctgggctctgggcccaggggccctgcccccactggtgccagcttctgcccttgggagctggaaggccttcttgggcctgcagaaagccaggcagctggggatgggcaggctgcagcgtgggcaagacgaggtggctgctgtgactctgccgctgaaccctcaggaagtgatccaggggatgtgtaaggctgtgcccttcgttcaggtgttctcccggcccggctgctcagccatacgcctccgaaatcatctgtgctttggtcattgctcctctctctacatccctggctcggaccccaccccactagtcctgtgcaacagctgtatgcctgctcgcaagcgttgggcacccgtggtcctgtggtgtctcactggcagctcagcctcccgtcgacgggtgaagatatccaccatgctgatcgaggggtgtcactgcagcccaaaagcatgaactgagcatcgtggatgggtgcacggagacacgcaccttggagaaatgaggggagatggaccaagaaagacgtggacctggatgatgtactctgggtcaagagaccagggatgcagggttaggcagacaggtccccagagtcctcaccctgctccccagacagtagacacagtgcccgtcctggagttgcaccactgatagtcacagcacacaatgattgacaactcacttttttttttttttttgagatggagtctcgctctgtcgcccaggctggagtgcagtggcgcaatctcagctcactgcaagctccacctcccgggtttatgccattctcctgtctcagcctcccgagtagctgggactacaggcacccgccaacacgcccggctaatttttcgtatttttagtaaagacagggtttcaccgtgttagccaggatggtctctatctcctgacctcgtgatctgcctgccttggccttattattttttttttttaaggacagagtctctctctgtcacccaggctggagtgcaatggcgcgatcttggctcactgtaacttccacttgccaggctcaagcagttctcctgcctcagcctcctgagtagctgggactacaggcacccgccaccatgcccagctaatttttgtatttttagtagagacagagtttcaccatattagcctggctggtctcaaactcctggcctcaggtgatctgcccacctcggcctcccaaagtgctgggatcaaatccactgttaatcattaggctgaactgtctcttatagaatgaggtcaaagacactcccagttgcagggagggtagatggccccacccagaccgagagacacagtgatgacctcagcctagggacaccaaaaaaaaaaaaaaaaaaaacccaaaccaaaaacgcaaaccaaagcaggcaggcagacagctgctgggggaaatcctggggtccttgagacagaggcaggaccctcgtgttcccagctgcctcttgccttgatagtggtgctgtgtccctctcagaccccccacctgagtctccacagagccccacgcctggcatggcattccacagaaaccataaaggttggctgagtcc

SEQ ID NO: 972 - DNA, 1422 bp, Homo sapiens
agtcctgctactggatgccatcattggcccccgactgcccactgcttgccatgcctgaggagacccaagaagactccgtggcgccaatgatgcccagccagaggagcagggggccattggcccccaaccacgtgcatgaggtatgcctgcaccaggtggagtccatcagcgacctacatagtggagcaggcacactgcgcccctatctaactgaagaggcacgaccgtgggatgagctgctgggcgttttgccgccgtcactgtgtgcccaggctggctgcagccctgtgtacagacgaggagggttcctgctgctgctcgcgctgctggtgctcacttgcctagtgctcgcactcctggctgtctacctgagcgtgctgcagagtgaatccctgcgcatcctggcacacacgctccgcacgcaggaggagacactactcaaactccgcttggccagcctcagccagcttcggaggctcaactccagtgaggcccaagcacccagctgagatgccatttggatctggggcctgggggtgtgtgttggtgggggaataaagtggctatgggcaggtctctccttccctactgctggctgccacatctacactatttccttggtgagatttttgtacaagaacctgttgttaacttaatggctgcctccctctcctgatctcttcaagccaggcctagccaagcctctggtgccaaagcctcgctttgggtggcccaaggtcaggggaaggggcaccagcctcctggctcctcctgtggcctgtcaacactctctggccaccccagatggcaggttctgaagtctagaaatagctgcccccatagcaatcacccaaactctgccagggctcccagtgagggtccagcctcagctcttaaagacaggctgggctctgagtagggggagaggcaccacctggggaagactgccttggagggcaaaggtgacatcgtggaagaccagttgggcccaagcctgggatagtagatggggagggagaacagaaaaatacccaggggttaagaccacagaaggctgaccgttctgtttaattatctgtaataatccttaaaaatcagcacacaaatccattccaggtagctttgccaccccacctgctgtggtggcatttgtccagatgccaccacccccctaagagtgggtcatcctgggggagcaaggcctgagaaaggaaaggaagggaaaggccccctagtgcctgccccacagccctgaggaaggcacatatttagcctggcctgagacaggacaggaaggggccacagggctgagtgcagggacaaaggggtcagggtcccaagtgtccgggcccccagctacccaccccatgtctgtttttggttttgtcattaaaaaaaataaagtgacaaatactggtggag

SEQ ID NO: 973 - DNA, 2094 bp, Homo sapiens
atgttgcctgcctgtggtgtgtggtgtgggggggaggcctggggcagcaggagcaggacagccggacaggaagcccagacggggttcgagcacctcaacttctctcctggggacactgttcaaactccgggggccataggccaagctgagcgatgagtgctgaggaggaggtgctggtcacactatcagggggagccccctggggcttccgacttcatgggggggccgagcagaggaaaccgttacaggtgtctaagattcgaagacggagccaggctggcagagcaggactccgagagagggaccagctcttggcaatcaatggggtctcttgcaccaacctctcccatgccagtgccatgagcctcatcgatgcctcaggaaatcagcttgtcctcactgtgcagcggttagcagacgagggtcctgtgcaatctccatctccccatgagcttcaggtgctgtcacccttatctccactaagtcctgagccccctggtgctccagttcctcagcctcttcagcctgggagccttcgttcacctcctgatagtgaggctcactacggagagactgacagtgatgctgatggccctgccacccaggagaagccccgtcgacctcgccgccgaggccccacaaggcccacccctccgggtgccccacctgatgaggtctacctgtctgacagccctgcagagccagcacctactatccctggccctcccagccagggtgacagccgtgtgagctccccgtcttgggaggatggggcagcccttcagccacccccagctgaggctctgctgttaccccatggccccctccgacctggtcctcatctcatccctatggtggggcctgttccccacccagtggcagaagatcttactaccacctacacccagaaggccaagcaagccaaactgcaacgtgcagagagcctccaagagaagagcataaaagaggccaagaccaaatgcaggacaattgcatccctgctcactgcagcccccaacccccactccaaaggggtacttatgtttaagaaacggcggcagagagccaagaagtacaccctggtgagcttcggggctgctgctgggacaggcgctgaggaggaggacggcgttccccccacgagtgagtccgagctggacgaagaagccttctctgacgcccgcagcctcaccaatcaatctgactgggacagtccctatctggacatggagcttgccagggcgggctcaagagcatcagagggccagggctctgggctgggagggcagctgagtgaggtctctgggcgaggggtgcagctctttgaacagcagcgccagcgcgcagactccagcacccaggaactggcacgggtcgaaccagcagccatgctcaacggggaaggcctgcagtcaccacctcgggcccagagtgctcccccagaggcagctgtgctcccacccagccccttgccggcgcctgtagccagccccagacccttccaaccaggtggtggagccccgaccccagctccaagcatctttaaccggtcagccaggccctttaccccgggcctacaagggcagcggccaactaccacctcggttattttccggcctttagcccccaaaagggcgaacgacagcctggggggcctcagccccgccccaccccccttcttgtcttcgcaggggcccacccctctgcccagcttcacttcaggggttcccagccacgcgccagtctctggttcccccagcaccccacgctcctcgggccctgtgacagccaccagctccctgtacatcccagcccctagtcggcctgtcaccccaggtggagctccagagccccccgctcctcctagcgcagctgccatgacctcctttcagtcccaccccatccctcaaaaccccagctattgcttcttttcagcttcaggtcctgatctccaatcttagtatggactcccttctcaccaagaccaccaccagctacgtttgctgtgtaatctggaaagtgataatttcctttgcttgttgggtgtgagtcacaatactttggtttgtgcacaagaataaatttatgccccat

SEQ ID NO: 974 - DNA, 2419 bp, Homo sapiens
tgcacacaccctgtggtttatttggtggtcagtaaggaacgtctttgctgctaagtggaagaaagctaatggaacgtaatcaaaatagtggtttaattgacgaattttacttgcacctgtgccttcttcagatcctacctgcctacttagtttacgtgaaggccgactgcaccatgccccccaaccccgacccccaccacacacaacggggccattgtcatgctaggtgcttgctttccccacctcagctccggagatgtgatggtctttggccctggaggtctcggccagcctgtcctccatcctgttctcgttctcgggcaccaccagcagccggtgctgggttttggctccaagcttgtggtcgggccggtggtcgggcctcaagcctgtcttggtgtccagtttgcactcagcgcggtacttgccctccccctccctcttgaaggaggcagaagacgtggctttgggcttggggggctgcagccacgagtggctgaggatctcatcgatgtggagccgctggctgacgtcgggctgcagcatgcggtagatgaggtccttgcactcgcaggtcaggttcttggagcgcgggaagtccacacggtgctccttctggatacgcagcatcttcctgatgtcggagtcgtcatagggcatggagccgcagaccatgatgtacaggatcacgcccaggctccagatgtcatacaccttgggctggtaggggatgctctgcagcacctcgggggctgcatatgctgccgacccgcagaaggtcttgctgaggatgatgcgcccattgctgtcccgcaggcagcgcttggagaagccaaagtcagacagcttgatgttgaagtccttgtcgaggagaaggttctcgcacttgaggtcccggtggacgatgtccaggtcgtggcagtacttgacggcggaggagagctgtcggaacatcttgcgtgccacgtcctcatgcagggctccctggcacttgatgaactcgaggaggtcgccctggacgccaagctccatgatgatgtagatccgtccgtcagaggtctcaaagatctcgtaagtcttgatgatggagccgtggttgacagttgccaggatgtccatctcccgaggaaggaatctctccacaaagtcagtaggtgttttcttgcggtcgatgatcttgacagccacattgaacttgaggcgctcagagtaggcagatttgacttttgcgtaggaacccttgccaagattgatgcctacgacgtaacccttcttccttaggactgtggcatcgtccatggtgccaggagcgactggcgccgctgccgtctacatccccccgtcatgtgggccagcaggcattgtcctcatttacactaccggaggcgtctggctgggctgccctgggctgggcttcgactcaggggtggaacactcagcattgtctccgggtgacttcagccaatgaactcataaagccaaggagtgggggcggggactgggctgagggagaacagggtctctggaaccgtggaagccaggctggtctggcaggagcacccactccccgcccgctggaaggaagcctgtccccaggacaggactctggtggccctgctgctgctgcattggtttccctgtcacaagtcaagctggaggggaggcggcccacgtccagcctgtttgcatcacctggctgtggggactgaccctgcattggtctttgtcccactagggtgggtttcctgcagcttctttggctatgaagaaaagcacccccagggctgtgtccttggtgtggtaggacagttgtccctgacagtcacccagacaggcctgcatagcaccccagttacacaggcagatttccacagcactgccttaccattgagcacatagttaaatctagggaaatcagtgcccagacatcaaagctagaaatgaaacatggtcagcaggagccttgcatgggcttctcttttgctggagcaagccaaaataataggaacggttttacattcctagtgccaggacccatctcgggtcgacaaaatctgaagacaagttaagggaacaggcagctgtttgaatagatcaattggatagtctaaggcagctctctggaccaagctgtaaaggagatacaatcgaaataatcactccggtaccacagtagacaggccttgaaggcactgggccccttttaatcggacttagcaagcattttttttgcctctgaccttctccttggaacaaaattagttaccagtagacttaggtgattgctgtactgcatgtaggcacataaccccaacctatataaacagtaagaaaattgtagcactttgagttggtctgctggaattatctccagccttctccctgtatccagttacagtgataaactcccttctttcct

SEQ ID NO: 975 - DNA, 2099 bp, Homo sapiens
attcatgtgtcaatgaagaattcctgccagacttccagtactgtcctcgaccatgggcagaatcccagctgcccctcccagaacactccatgccactggaactcaggagcgcaggtgggcttatctaaatcagatcccaaatagtatttaaaaagcctctaccaaaagaagaggaggggctcaacctgagagaaaactcaccagggcagaaaagatgacagccatggaagcagagctcaaaggactgaagagctcatgaaagacttcttagagaagagagacaaggggaaacttctcatacagagaagtagaagactaaaacagaatctcttgagaccgatgcaactttccgtaactgaagatggctatattcattacggtgacaaagtgatgcttgtgaatcctgatgatcctgacacagaagctgatgtgtttctgcgtggggacctgagcctgtgtatgactccagatgaaattcagtcccatctgaaagacgaattagaggtaccctgtggcctgagcgcagttcaagccaagaccccaattggcagaaacacttttatcattttgagtgtacacagagatgccactggtcaagtccttagatatgggcaggacttttgcctggggataacaggaggatttgacaacaaaatgttgtatttgtcaagtgaccacaggaccctcctgaaatcgtctaagaggtcttggctccaggaagtgtacctaacagatgaggtctcccatgtgaactgctggaatatgaaggcttccccgtcccggcaaatgctaaaattctcatcaatcactgtcacacaaatcggggactggcagcccaccggcatcttttcttaaggtattgtatttcagggtacaacaaaatgctgtgattggggctgggggccatgaatataagcaaagaagctcaattgatagtgtatggctgcacatacaaaaaatgtcctttgctgatgaaataccgccacatagaacttcaatggtgtgaaaaatcctattagagccccttcttttatacaaatcctacccctacaagaggactttggttctaatgggatcctactggcctaatctttgcccaaataaggtgtaacctccctgcaaacatgtcccattttagagattccctagggctttatctagcaatccgcttcttaaggtgctttcgagattaaattattaataacagcttattgagagttgttattcaatttcaaaccacaactgattctctcttgctccagcacctattttggaaaggaggctgaggttgtagctcacacatacctggattcacatagagttgagaaaccaaggaaccactggatgttggttactgggaatcccagggatgcctcgtcctccatgttggatctgcccaaaccacccacagaggacactcgagccatggagcaggccatgggccttgacacgcagtaacacgccaggcacgtgcatgttttccctggtcccgctctcatcaaatgtagctttaaaagaaattaacaaccttggtcatgcctcaagctatttttgaatcagatgtgggactctctgggcactatattaaaataaagattacattaagattattgaatttgtggtgggagtctagggccgaagaaaaacagctctggagaataattagtatttgaaagtgacaaacaatagccttttgttgataaacaaattctgaagaactcagcttcctctacttatatccttcattatctacaaggacagtgcgttactttttaaagttatgtctatgtaataaagctgttggacctatactgaatttttggtaccacagtttccctcttgaatgtactaaaacacaaaaaactgacagctctgagctgtggccttaccttggaattaaacatttccacctttgtaaaacatcctatttttgtttctacctttggctttccaggtcaggacctctacctgatcagtaacctattattttgtaatgatttttaagctgcagaatctctaccttgtctttgaaactggcacattagttgtggcacccatgtgattagatagttcctgacaaaataaatgtatgtccttcc

SEQ ID NO: 976 - DNA, 1615 bp, Homo sapiens
ctatgaccacaatccttgcaggaacgcacccaaggtggccaaaggtgtgcgccgtgtggggagatgggcagaggagacgccagagcccgactctagaaaagccaggcgctatgcgttggtcagagaggaaagccaggagctacaggcaccagtccctctacttcctcctaccaactcctgaggagcttcagttgcaagtcaatgccaaggacccaactgcagcatgttctggaagcctctccattggagtggaaaggatggctctgggtcatttgggagtggctctgctagtagagactgatggagagagccaggtggaatgccataaatcacactgagaaaatatttctggcaaacagctcctcttccagaggggagttgtgtgccaatgatggcatgacaatccagagatcataacttctttgcaagaaaacagcttctccacacatgtattttgaaacactgaagagcaaaaggggctgggacactctgaactcctgcactctccagaagtgactggtcatgaagctcatgagctcctcaaataaggtatttgccatagaactaaatattctggtggtctgtctctttgcaggacatattttctttactgtaaatgaccataaacagtatcaatgtatcactgaggccaccgaaaaggacatttctacctaggcaatcagtcagattcacagaaaaaagttgtttgttgttgtaaaggctcaagatgaaactctttccccagcagtttagtgcctgctgaaaagatccctgatggacaatacttcttggtggactccagctgccccttttattattattagagacaaggtctcactctgttgctaggctggagtgcagtggcacaatcatggctcactgcagccccgaactactgggctcaagccttcctcccgcctcagcctgcccagtaactggtactacagatgtgcacacctggctaagtctttaattttttcgtagagatgaggtcttgctatgttgcccaagctagtttcaaactcctgggctcaagcgatgctcctgcttcagcctcccaaagtgctggggttacaggcatgagccaccacacccagccttcagctgtcaccttaaacttgacagtggctcatgctgatttagttcattttccctaaaaggtttgtcccaagatctgctcccaacagtcgactgtcactgacaatgttggaagtcatctggaaaagagaacctctgtggtaatgtggtctcattaaagtcaagccttgttgtgattcctgtctacctccctgaagcaaagcccttctgtttattcacactaatgagccagagctgagctaaattgaatccctgtccttggaggaaaaccacatttccagaagcatgttagtttaaaggtagtaggtgagaaatgtgttctcttgaaacaagcactttgaaatttgaataggaagttgtagtgtatataggaagtctctgcctctttcgcctagtatctctgcctttgtttcaatttgttttgatttttacagactgttttgacaatgtataaaccaaggtattttgttttttggaagtatgtaaattgtgaccttcccacaaatatataaacttt

SEQ ID NO: 977 - DNA, 2183 bp, Homo sapiens
gatgcgccgctgacgcctgcgggagccgcgcgcctggggcgggaggatgctccagaggggcctctggccgtggcgcacgcggctgctgccgacccctggcacctggcgcccagcgcgcccgtggccgctgccgcctccgccccaggttttgcgtgtgaagctgtgtggaaatgtgaaatactaccagtcacaccattatagtaccgtggtgccacctgatgaaataacagttatttatagacatggccttcccttggtaacacttaccttgccatctagaaaagaacgttgtcaattcgtagtcaaaccaatgttgtcaacagttggttcattccttcaggacctacaaaatgaagataagggtatcaaaactgcagccatcttcacagcagatggcaacatgatttcagcttctaccttgatggatattttgctaatgaatgattttaaacttgtcattaataaaatagcatatgatgtgcagtgtccaaagagagaaaaaccaagtaatgagcacactgctgagatggaacacatgaaatccttggttcacagactatttacaatcttgcatttagaagagtctcagaaaaagagagagcaccatttactggagaaaattgaccacctgaaggaacagctgcagccccttgaacaggtgaaagctggaatagaagctcattcggaagccaaaaccagtggactcctgtgggctggattggcactgctgtccattcagggtggggcactggcctggctcacgtggtgggtgtactcctgggatatcatggagccagttacattcttcatcacatttgcaaattctatggtcttttttgcatactttatagtcactcgacaggattatacttactcagctgttaagagtaggcaatttcttcagttcttccacaagaaatcaaagcaacagcactttgatgtgcagcaatacaacaagttaaaagaagaccttgctaaggctaaagaatccctgaaacaggcgcgtcattctctctgtttgcaaatgcaagtagaagaactcaatgaaaagaattaatcttacagttttaaatgtcgtcagattttccattatgtattgattttgcaacttaggatgtttttgagtcccatggttcattttgattgtttaatctttgttattaaattcttgtaaaacagaagtattgtttgaagttctcaactgagatttttactttttggatttttatgacttgctaatgttagaaagggcttgtatgcgtctatcaaagcaacagtggctgctgttagctaaaaatccttgtcagcttgtcccacgtttattctctatgtggaggtgaaagggtctgtgcttggcattcacttccattcttagacttaatttggaatcatccttttaaaaaaatcagagaccaggtcttgccaaatcaaactcctgggctcaagcaaccctcctgcctcaacctcccacggaatcgtcttgtcattaacttctttttttaatatgcattagttgggagtaagatctttttatcatttatcaaaaaggcataaatgttccaccaaccataaagtatagttggtactttttgaacttcaactgaaacagtgtatataaacgattgcttttgaacctgcaaatcacaagtttcaggtatcgaagccaaaacagttaactttcttcagcctctggcagattattaacaaaacagtattattcagattctatatcatattaataagaattgaaccttgaaagtaacatctgttattctattaatgtgattgtgtgtgaatgggtctgatgactgttggactgtttgtaggaacttaacatggaagatgctgacagaatcagattttgcaggtgttcaacctatagtggctaagaattatgttttctatttcatcctcagaatgccatacaacaattctggaatgctgattttttttaaagtaggaattaaagtcatacacaaaatgtggtaattcatatgtagatgaaatattaaacatttaaatgaccgagtaaaaaacatctatcaattacacaaatgaacaagaatgtgagttagaaaaatgtaataaaatatgaattttgaatattttattaagggatgatttaattcctggatttcaaaaacctttaaaaacatcaaacaataaacttttataaaaaagtg

SEQ ID NO: 978 - DNA, 1524 bp, Homo sapiens
ctattattacttagtgtctttaagaggcaaactttgtgggggctgattttgttttcccaaaaacagtatcaccaaaatataggcaagggctcattagggctcactggccccaaaataagacttttttttttttccataccatcctcatgcaactgtagtaagctaaaaagtttgcccttgcagatgcatctttgcatcggctaaatggttttagtggcgtggcccgtgcaaccaagtaaatactacttaatagaaaggagcctggaactcaagaagatgagctgcagaaatctcttaattaagaactgcaaattatatgtatttttaagagacagagtcttgctctattgcccaggctggagagcagtggtgccactttggctcactgcaacccccaccttccagtttcaagagattctggtgcctcagcctcaagcagctgggactacaggtgcacaccagctaattttttgcatttttagtagacatggagtttcaccatgttggcctggctggtctcaaactcccagcctcaagtgatctgcccgccttggcctcccaaagtgctgggattataggcatgagacaccgtggctggtggttatttcttacaccactatcacccctggtcattgtcatctgtggctctggttcactttggtgaaacacataccaaaatcatgatgtagtaaaagaaatttcctggctggaatctctgggctgacaccctgtcactttctagcactcttgggaaattaacctgaggcccagtgttttccatctgtaaggcagtgataccatcaacctacacttgcagggaagtgcctgtgactaaatatgctttatgtcacaagactattacagtatctggtacttagggatagacttatgttggcaactcagtaacaactgataagaacacagaaaagaactctatgttctaatactgttaaacttcatactctttaacaacatttaatactacaatctgataaattctttgacaacttttacttgctttgccatgactagtggctctggctgaatttctactcctgcttctattcttaaatcagtagatgaaaaacacaagctacaaataacaaaggttctctagcactggatataaggttctcctctaagcgctgggtgtaacagctgaagctaatcagaaggaatatatgcagaatgagagaactccaattaagaaagacaaaatgtgtattttacttgcttagatttgggagcataattgctcacaaagattcatagattttttttttattgttaagctgcaacgtacatggtttaatacaacaacaaaaaaaatttaatcaagtgaaacgtaataaactgaacaataaacactcaaaacattttccattggaaacatgtaaagacaatatgaggttttgttaccatcttactgcaattttcttatgtgttactagtctacataccccatgttttctgtaatcatgcagatgtgaatggaagtttgaatgattaaataaatgaaaagtc

SEQ ID NO: 979 - DNA, 1798 bp, Homo sapiens
atgtatgatgatgccactgcactccagcctgggggtcagccagattctgtcttaaaaacaacaacaacaacaacaacaaaacctgctgaatgaatggacccgtcagccccaaatccaaggccaggccatcctctccctccacatcctggcacaggcctgcctccccctgccccagcccagggccaggccacactctgcctccaaagccaccgtccccccgaggcaccactgcatcccccaaggggcgggttcggaggaaggaggaggcaaaggagagccccagcgccgcagggcccgaggacaagagccagagcaagcgcagggccagtaacgagaaggagtcagcagccccagcctcaccggcaccttcgccggcgccctcgcccaccccagccccgccccagaaggagcagccccccgcggagacccctacagcccctgctcccccggtgacccctagcaaaccaatggccggcaccacagaccgagaagaagccactcggctcttggctgagaagcggcgccaggcccgggagcagcgggagcgcgaggagcaggagcggaggctgcaggcagaaagggacaagcgaatgcgagaggagcagctggcacgggaggccgaggcccgggcggagcgggaggcggaggcccggaggcgggaggagcaggaggcacgagagaaggcgcaggccgagcaggaggagcaggagcggctgcagaagcagaaagaggaggccgaagctcggtcgcgggaagaggcggagcggcagcgtctggagcgggaaaagcacttccagcagcaggagcaagagcggcaagagcgcagaaagcgtctggaggagatcatgaagaggactcggaagtcagaagtttctgaaaccaagaagcaggacagcaaggaggccaacgccaacggttccagcccagagcctgtgaaagctgtggaggctcggtccccagggctgcagaaggaggctgtgcagaaagaggagcccatcccacaggagcctcagtggagtctcccaagcaaggagttgccagcgtccctggtgaatggcctgcagcctctcccagcacgccaggagaatggcttctccaccaacggaccctctggggacaagagtctgagccgaacaccagagacactcctgccctttgcagaggcagaagccttcctcaagaaagctgtggtgcagtccccgcaggtcacagaagtcctttaagagggtttgccttggatccgggcacagttgtgagggctcctctgcatcacctaccaggatgtctggaggagaaaaagacagaacaaagatggaagtggcctgggcccctgggggtgggtcctctctgttgtttttaatctgcaccttatagactgatgtctctttggccggagccagatctgcccctcagtgcattcgtgtgctcgcacgcgcagacatcccttctcccccatacacacatatacactcacagcctctctggcctcttcccttggggaggggccacctgtagtatttgccttgatttggtggggtacagtggatgtgaatactgtaaatagcttgtgctcagactcctctgcgtggagagggtgggtgcaggaggcagaccctccccccaaagccccctggggagatcttcctctctctatttaactgtaactgagggggatcccaggtctggggatgggggacaccttgggccacaggatactggttgcttcaggggtacccatgccccctgccctcgcctggaatcagtgttactgcatctgattaaatgtctccagaaatag

SEQ ID NO: 980 - DNA, 2074 bp, Homo sapiens
ctctggccagatgtcccagtggacatagccagcccagcttacaacatggcctcagcaccacggcccccaggcccaccaagaatcaggctacaggcagcaatgcccagggctctgagccccccaagctcaatgccctcaaccatgatcccacctcaccacagtggggccccggcccctcaggagagcagcccatggaaggttcccaccaaggggcccctgagagccctgacagtctgcaaagaaaccagaaagagctccagggcctcctgaaccaggtgcaagccctggagaaggaggccgcaagcagtgtggacgtgcaggccctgcggaggctctttgaggccgtgccccagctgggaggggctgctcctcaggctcctgctgcccaccaaaagcccgaggcctcagtggagcaggcctttggggagctgacacgggtcagcacggaagttgctcaactgaaggaacagaccttggcaaggctgctggacattgaagaggctgtgcacaaggcactcagctccatgtctagcctccagcctgaggccagtgccagaggccatttccagggacctccaaaagaccacagtgcccacaagatcagtgtcacagtcagcagtagcgccaggcccagtggctcaggccaggaggtcggaggtcaaactgcagtcaagaaccaagccaaggttgaatgccacactgaggcccagagtcaagtcaagatcagaaatcacacagaggccagaggtcacacagcctcaactgccccttccaccaggaggcaggagacatcaagagagtatttgtgccctcctcgggttttaccttccagccgagattctccctcctccccaacatttatctccatccagtcggccacaaggaagcctctagagactcccagctttaagggcaaccctgatgtctcagtgaaaagcacacaactggctcaggacataggccaggccctgctccaccagaaaggtgtccaagacaaaactgggaagaaggacatcacccagtgctctgtgcaacctgaacctgcccctccctcagccagtcccctgcccagagggtggcaaaagagtgttctggagctacagacggggccagggagctcacaacactatggagccatgagaaccgtgactgaacagtatgaggaggtggaccagtttgggaacacagtcctcatgtcttccaccacagtcaccgagcaggcagagccacccaggaacccaggctcccacctcgggctccacgcctcccccttgctgaggcagttcctgcacagcccagctgggttcagcagtgacctgacagaagctgagacggtgcaggtgtcctgcagctactcccagccagctgcccagtgaggcccaccgcctcccaccacacctgccacctgttcctggcctccactgccccaggactgaagtgggtacctgcctcctgtacactggagcaaggaccaagaggaaatggcatcttcagaggattactgtgggccatttccctttcgcagttctttcaataggcccagttcttccaaatggaaaaagaaaggtctggaagaggcccacagagttgcacaggcgtgggggtaggatgggggctcccagctgcttgtggaggatgtaatatatacagacacacacatgtttttcacacaggcctggcccacgcatcgacatgtgtgaatttgcacaccactgcctgaattggagccccccagagtgtccctctacccagagtttttatttctttaattagtctgagtgttcccagccatctgctccttaatccctggagaggaacagagccaactggacacagcgttggtctctgtttggaatcactgtgaggtctccagaaggacctggccgccagccccttcatcaccatctccatcattcagctggtcatctggtggcccaaaggtcacccaaagagtcagcaatcagcatgtccctagaagccaaatgcactgcctttctctgtccccatgactgtcccccactctgcaccccaaatgggaagcatacggtctgaataaatccaagttttattctct

SEQ ID NO: 981 - DNA, 1736 bp, Homo sapiens
cagtgaggcaaaccctccagacagacctggagacatccattcggcggattgccgacctgcaggctgccttggaagaagtggcatccagtgacagtgatactgagagtgtccagacggcagtggattgtggcagcagcggccgaaaagagatggataacgtctccatcctcagctcccagccagagggcagcctgcagtcctggttgagctgtactctgtccctggccacagatactatgaggactccttctcgacagtcagccaccagcagccgcatcctcagccccaggataaacgaagaggctggggacactgagaggacccagtcggcattggcactgagcagagcccggtccaccaatgtccacagcaagacctcaggagacaagcctgtttctccccactttgtccgccggcaaaagtactgtcattttggggacggcgaagtgcttgccgtccagagaaagtccacagagagattagaacctgcttcctctcccctggcttctcggagtacaaatacatccccgctgtcgagggaaaagctgcccagtccttcagcggccctctcggagttcgtggaagggctccggaggaagagagcccagagaggccaggggtccacgctgggcctagaggactggcccactctccccatttaccagacgactggggcctccacactaaggaggggcagggctggcagtgacgagggaaacctctcgctgagggttggggcaaagtcacccctggaaatcgaaggggccgctggtggtctcttgaggtccaccagcctcaaatgcatctcttcagacggtgttgggggcacaaccctactccccgaaaagtcgaaaacccaattcagttcctgcgagtccctcttagaatccagaccgagcatggggagaaaactgagctctccgaccacacccagggacatgctgttgtcgcccacactgcgtcctcggaggcggtgtctggagtcctctgtggacgatgcgggctgtccagaccttggaaaggagccgcttgttttccagaaccgccagtttgcccacctgatggaggaacctctaggcagtgacccattcagctggaaactcccaagcctcgactacgaacgcaagaccaaagtggacttcgatgacttcctcccagctatccggaagccccagacacctacctccttggctggatcagccaaaggtgggcaagacggttcacagcgttcaagcatccactttgaaacggaagaggctaaccgttcctttctctcggggatcaagaccattttgaagaagagcccggagcccaaggaggatcccgctcacctgtctgactcgtcctcatcctccggctccatcgtgtccttcaaaagtgctgacagcatcaaaagtcgaccaggaatcccacgacttgcgggtgacggtggcgagcgaacgtcccccgagcggagagagccagggacggggaggaaagacgacgatgttgcgagcataatgaagaaatacctccagaagtaggaaccagttcagcctccttgaagctgcccttgaagacttcccgactctacaataacttggagacagagagactggccaggcctccccggtggccagagccagccagcatggccaccctcaagaggcgagatgagcccacagaggcatatcctgcggggatgctgggctcccagtgtggttggcctgaacaaaataaagtgttgactcctgggc

SEQ ID NO: 982 - DNA, 2393 bp, Homo sapiens
aggctgccgggggctgcagacatggagggccagagcagcaggggcagcaggaggccagggacccgggctggcctgggttccctgcccatgccccagggtgttgcccaaactggggcaccctccaaggtggactcaagttttcagctcccagcaaagaagaacgcagccctaggaccctcggaaccaagcccctgacatggccctcccaaggcttggcacccagagtacagggcctggcaggtgcctgagccccaaccttcaggcccaagaagccccagccccagtcaccacctcctcttctacatccaccctgtcatcctccccttggtcagctcagcctacctggaagagcgaccccggcttccggatcactgtggtcacatggaacgtgggcactgccatgcccccagacgatgtcacatccctcctccacctgggcggtggtgacgacagcgacggcgcagacatgatcgccatagggttgcaggaagtgaactccatgctcaacaagcgactcaaggacgccctcttcacggaccagtggagtgagctgttcatggatgcgctagggcccttcaacttcgtgctggtgagttcggtgaggatgcagggtgtcatcctgctgctgttcgccaagtactaccacctgcccttcctgcgagacgtgcagaccgactgcacgcgcactggcctgggcggctactggggtaacaagggtggcgtgagcgtgcgcctggcggccttcgggcacatgctctgcttcctgaactgccacttgcctgcgcatatggacaaggcggagcagcgcaaagacaacttccagaccatcctcagcctccagcagttccaagggccgggcgcacagggcatcctggatcatgacctcgtgttctggttcggggacctgaacttccgcattgagagctatgacctgcactttgtcaagtttgccatcgacagtgaccagctccatcagctctgggagaaggaccagctcaacatggccaagaacacctggcccattctgaagggctttcaggaggggcccctcaacttcgctcccaccttcaagtttgatgtgggtaccaacaaatacgataccagtgccaagaaacggaagccagcttggacagaccgtatcctatggaaggtcaaggctccaggtgggggtcccagcccctcaggacggaagagccaccgactccaggtgacgcagcacagctaccgcagccacatggaatacacagtcagcgaccacaagcctgtggctgcccagttcctcctgcagtttgccttcagggacgacatgccactggtgcggctggaggtggcagatgagtgggtgcggcccgagcaggcggtggtgaggtaccgcatggaaacagtgttcgcccgcagctcctgggactggatcggcttataccgggtgggtttccgccattgcaaggactatgtggcttatgtctgggccaaacatgaagatgtggatgggaatacctaccaggtaacattcagtgaggaatcactgcccaagggccatggagacttcatcctgggctactatagtcacaaccacagcatcctcatcggcatcactgaacccttccagatctcgctgccttcctcggagttggccagcagcagcacagacagctcaggcaccagctcagagggagaggatgacagcacactggagctccttgcacccaagtcccgcagccccagtcctggcaagtccaagcgacaccgcagccgcagcccgggactggccaggttccctgggcttgccctacggccctcatcccgtgaacgccgtggtgccagccgtagcccctcaccccagagccgccgcctgtcccgagtggctcctgacaggagcagtaatggcagcagccggggcagtagtgaagaggggccctctgggttgcctggcccctgggccttcccaccagctgtgcctcgaagcctgggcctattgcccgccttgcgcctagagacggtagaccctggtggtggtggctcctggggacctgatcgggaggccctggcgcccaacagcctgtctcctagtccccagggccatcgggggctggaggaagggggcctggggccctgagggtggggtaggcagatgggccaaggtgaccaccattctgcctcaatcttttgcaagcccacctgcctctctcctgctgctcctccagctgtatctgcacctgcctctctgtcctggccaggggtggacaactggggtcccccaaaactcagtcctggcacctcaactgtgacaatcagcaaagccccacccaggcccccatctgggatgatgggagagctctggcagatgtcccaatcctggaggtcatccattaggaattaaattctccagcctc

SEQ ID NO: 983 - DNA, 1704 bp, Homo sapiens
attaaggaggcaaaatggtggccgcgaacgccatcaggctgcgccagcgcggggtttcggcgcaaacagaggatcccgtcagattcaggcggccagaactcctcctcacccaggccaccccccggggcccacagcctggacagctacgggcgtggcgcctgcggcaccgagaccccaggcgagagtgtggaggcggcggcggcttccccgcgaccgtgaacaacgacgccattatcagcaccccctgccggcgcctccggcgcagcccgcgcaggaggcaaggcccggcctccgagggaggggaaggaggacggggcgggaggaggggaagagggtgaagagggcgggaggagaaagaagaaggcgggaggaggggagagagaagagggagggaagacgggagagaggcggggcggggcggagcggcgggccgggcgggctacggggacgggggcagggcgactgctgctgccgggtggccccctcctcaggccgccctttccctgcgggtgggaactccagatggacgagggcccaccccacccggcgcttccccgtgcagcccggggtcgcggcgggcggcgagggcagcggctccccggctcccctaccttaccttccctgtccttctcgtccgccatcttgctgcggagccggtcgcctgggagatgcctaacgataacctcggccgcggtgtccgggcctgctcagcgccccgcggcgagcctggcctggaggggaggaggggccgctctgaatcccgggggaggaagacccttgggcggggcggggcggggaggaggctccgagcgcgccctgtccccgcttcgcgccacgaccctcgcgctgggggaagaccagaggccccgtctgccccccggcccccggccttgtccctccagacccgaggccggagccggacttgtcccgggcctagcatgttgcttcatcacacggtccccaacccctcctttcccttatttctcatccatttggggacagcacgcgcgcgcacacacccctcgccccctcctgtcctgtttgtgcgacgtggcgttgctcgatttttgttgttaactgcagattttgaaaagcgccggagagctaggtgaagagctgggctcccaagggggtgatagaaccagcccgcggcccggcctcctcctcccgcttcccattcgcagcccgcctcccgccgggaagcggcccggctgctgcagaacggccgcgcctgccctcccggtttctcccgtccagtcttcaccgtcctttcccagagaaagcgacagcacagcctatgacaaccgaagctaaaacggaaaaactgggccgggcgcaagaggaaaccagagccattcgactattgctagaggagaggaatagctgcaggaaaacatgcgcaaaatagcacaaacattgcgtcgtcaaggctgcaatgtctaatacaaaatagaaggttctcatagcaacaaaaacgtgcccatgttgtgctcagtattacatgcgttaaaatgttcttagttgtgaaatttgacatgaccgctagttaaagttacaatggaagttttaaatcccgctttccgaaaactttgcagctatagcatgaagttaaatttttgtcttattttctggataagtttactatactggaacatagtaaagctctttttataaagagctttgaataaaatacctaatgatgtg

SEQ ID NO: 984 - DNA, 2338 bp, Homo sapiens
acgcgcagccgcctcagtggcttcctccacagccacctccggagggatctggctgaggaggaagtggaggtgtcactggccccggcctttgccccaatcttgtgtgggcactgaagggggactacaggttcgagagttatgggtgctacatgtgtgctttcagagcagtagtgtgaggaagcttggagtgggatggcaggacggcctcatccctatgatggtaactccagtgatccagagaattgggatcggaaattgcatagtagacctcgtaaactttataaacattcaagtacttcctcgcgtattgctaaaggaggagttgaccacaccaaaatgagtctacatggtgctagtgggggacatgagagatcaagagatagacgaaggtcaagtgacagatcacgagattcatctcatgaaagaacggagtctcagctcactccttgtattagaaatgtgacttctccaacacgacagcaccatgttgaacgagaaaaagatcacagttcctctcgtccaagcagtccgcgtcctcaaaaagcatccccaaatggttccattagcagtgctgggaacagcagcagaaacagtagtcagtcaagttcagatggtagctgtaagacagctggggagatggtgtttgtatatgaaaatgcaaaagaaggagctcggaatataagaacgtcagaacgagtgacactaatagtggataacactagatttgttgtagacccatccatttttactgcacagccaaatacaatgttgggcaggatgtttggatctggattactataaaacaggaataatccgttgtcctgatggcatatctattcctgaactgagagaagcatgtgactatctttgtatctcttttgaatatagcactattaaatgtagagatctcagtgccctaatgcatgagttatcaaatgatggtgctcgtagacaatttgaattttatctggaagaaatgatcctccctctcatggtagctagtgcccagagtggggaacgggaatgtcatatagtggtgcttacagatgatgatgtggttgattgggatgaagaatatccaccacagatgggagaagaatattcacaaattatttatagcacaaaattatatagatttttcaagtatattgaaaacagagatgtggccaagtcagttttgaaggagaggggtcttaagaagattagattgggaatagaaggttatcctacctacaaagaaaaagtaaagaaaaggcctggaggccgcccagaagtgatctacaactatgtccaaagaccctttattcgaatgtcctgggagaaggaagaaggaaagagtcggcatgtagactttcagtgtgtaaagagtaaatctatcaccaatcttgcagcagctgcagcagacattccccaggaccagctggtagtcatgcatccaactccacaagtggatgagctggatattctccctatccatcccccttctggcaacagtgacctcgatcctgatgcacagaatccaatgctgtgatgctgatcttccttgaaaccatagcatgctactcttcacagtgacgttgtactctcctcattctgcactgcaaggccactcttcttcattgtgagatgcacataacaatgtttaggatattgcagtgtaggcttttttaaagaccaaaggtagctgaatggtttttttttaaatgagtacaactctagcattttgaagttccagttgtaaatgtatttgtttaccagtaggtttgtgaaattggttctttgtatgggggatggtcctttttcacacagctaggtcttttcagaagtggtggaaattggcagctggggtactttcagtttggactgatattcatcacacctcagataaaatgcagagtaatatatagttgcactttataaatggtggttaaatggaaatgttcaagccattttatagttgtgatgcacaatataatttaagtgcttctgtcaaagtattcctccagtacaatttgtatagtttgctgcccttgatgagcaaaaagtatttatcttgggcttatctgaatgatcaggatgagatttaatgcccatatcttaccagttcagttatctccagagccatttcaccctttagagtgagtcacatgcagggagtgtgaatgtcagaggtggtttattatccagtctgccttacccttaatctgttcacagatatttatttactaatgctttttttttcttaagagttatgggataggaaaatgaagtgtttgctcttcatttactaaatgattgtaaacttgagtttttcatcaaaataaaattccattgtttt

SEQ ID NO: 985 - DNA, 2946 bp, Homo sapiens
agtattggccgtgtacccgaaaaactgattgactgggctggcgttaactgtgcggaggcaggatttccctggggaaagtcttcactcagagcttcgctgacagccaaggatggcaagcaaggggccctcggcctctgcatctcctgagaactccagtgcaggggggcccagtgggagcagcaatggcgctggcgagagcggagggcaggacagcactttcgagtgcaacatctgcttggacacagccaaggatgccgtcatcagcctgtgtggccacctcttctgttggccgtgtttacatcagggatttcaaggatttggatttggagatggtggcttccagatgtcttttggaattggggcatttccctttgggatatttgccacagcatttaatataaatgatgggcggcctcctccagctgtccctgggacaccccagtatgtggacgagcagttcctgtcacgcctcttcctatttgtggccctggtgatcatgttctggctcctgattgcctaatgctgggctcctgcctacatccgtggcagggctctggactggtgacgtgccaccccaactcctggtgtttggcttcctggctaatcttgactcctggaatcagtgggatcagtaacacatcaaggagtcttgtttcttcatcagagctttggaactcgagaccagttggcgatgacccctgaatatcgccaccgctgtaaacactctataacttcaggccttggcattgagtcatctctcatgggtgacaccatgaaatcttgtttcagccagttctgcaggtcctgactctgcagagggaagaggcagaaagagagaaactgtcagagtataatttcacctgagtttaatattacagaaacaaagggatgcaccaaatggtatttctggaaattttcatgtctttaaataccccttggtaagttgcttctgaagccagtgggggctcctcagatagagaggttcccctttcaaatcccagtgccgctctgttctctttccttcccctcccactccccctcttcttcctctgtagagatgcaagaaattgctgtcccataaaaatcataattgcagtagctaaagctggggtcacttcgtgaattcaccagagactcaaagatcttttattggctctgggctgtgctcagtgtctttggcctcagagaacaacttgaatgacttcctggtttcctggcataaattattcctggtgagacatgtggcttaactcacaggtttcccatcagctttctccctaaaactatgttcatctgcctctctctgccagagaacatacagccgagaatactgccgaagctgagactgactactgtgcattaggaaagacctggagtcaggactttggtgggatttggagctccgaggcagtaataactgaacaagcagccctgtcccctaggctgcagaagcttgaatgcatcctctcccagaacctgccacaggaaactgggggctttgtcaggtcagcccaactgcatgcaaaagaccaccatcctcagaagccaagttgtcttttatgaagaggcaaggaaaggggaaacccacatgtgaccctgattttggtatggcttgatagagttccctgaaaactccttgtatgtgtgctaaaaccagggaagcatgtgactgccaagcaggcaacccctgatgatttgtaaggccaggtggcagggccttggggagccccagcacaatgatattgtgtggtcttccctcctgtggaatcgaggggaaattattcttcccaataccttgatttgattttcagtttcataagcttcttcctctgaatcttattgagggactatggtaccaagcaggtaggactgttcacctggtggaacagttcttgctctgccttctaggcttcatcccagaaatccagcctctttctggagaccccaaagctggagggagatgggctttcctctgggcctctctcctactttgccatccacactgctcctggctaaccccagcaataaccaacaaatggtaggaagccccatctattgctttttctcaattatgactgcatagtttgtggaaacaaagatcttgaggaagatgagggaagccctcccctcttcatagtccccatctcttctcctttgtacctgtcaacaccagagttcagtgtttaaacagacaaaatataaagtattgagtaggtggttcatatgccgaatccacttggtaggaagaaaccaccagctttatagtgtgcctgatagattttaaacattcctgggcacccactcaagagtgctctttttatcaccttctggaaatccgcaaagttgcaggggcctctggagtgtctcttctctagagagaattggtgggacccccctcagtgcagtggccccaactagtggagggagagaggacttaagtcagatggactcaacagaaatgggtttccagaagaataatgaaaagttgtgggtaggaaaatgaatcatttggactcttcaatgaaatggagtgagcccaggagagctcagccaacagaggcactctgggaacctgttagtaaagccagcctggccaaatgccatttgattttgaacctcgtaggtccccactcaccctctgccaggagctaagtaaggcaggagagctgacttgggactcctggctcggccccaacagggagcccccttcccaccatccctcggcaagctcaccacctcatccttctgccaaggcagctttcctttcttttgtgtgttttctgtgttcttagcctccaccctcctcctgccacccttgtggactaggaccaggtcctgaccccagtcagaaaatgatgatatgtacagtggcacaccttaaccagtcactaattttcactgttgtgaaagtgatttgatttagaattaaacaaatggttttacatt

SEQ ID NO: 986 - DNA, 2600 bp, Homo sapiens
ctgtttattatatgtctctgtctctctctattgtgtgtgtgtgtgtgtgtgtgtgtgtgtgtgtgtgtgtggtgcaggagtgccacccccagggccctgtcaacctctcttttctcctccatggctgtctgcctgcgtatctgtctctgagaatcctcggggcggtcaggggatgtcaggaggggaaggagccgccctccctatcttgctgctcctcttggcactcaggggcaccttccatggagccagaccgggtggaggggcttctgggatttggtgtctgctgctgccagagcaggaacccccagtctaggacttgggcattttaacagggagaaagtagtggcttcccttttctctctctcctcctttttccctttaagcccacagattcaggtcatgccaaaagctctctggttgtaacctggagacatgtggaggggaatggcgatgggattataggactctccccatctcgggccctgaccctgacccttgccaccaacccaaagacagctggtgggtttccccttggagacaatcctgcgtttgcctgggccggccctggctgccctcagctttcgctgatctgcccggcctggagcctcccatcaccccgcttcttgttgggcctcaggcactggttaccagaagggggtctgggtctgctcaggatcatgttttgtagcacctcctgttggaggggtggagggatgttcccctgagccaggctgagactagaaccccatcttccctgagccaggctgagactagaaccccatcttccccaccacgccacccctgtggctgctacaggagcacagtagtgaaggcctgagctccaggtttgaaagacccaactggagcgtggggcgggcaggcaggggttagtgaaaggacacttccagggttaggacagagcatttagccttctggaagaacccctgcctggggtgggactgtgcaggccagagaaggtggcatgggcctgaacccacctggactgacttctgcactgaagccacagatggagggtaggctggtgggtgggggtggttcgttctctagccggggcagacacccagctggctgggtccttcctcagccttgcctcctcctgtccccaaccctttcctttcctcctgcttgcggactgctggtcccccctccttccctccttccagctgtttctagttaccacctacccctggccgtggactgatcagaccagcattcaaaataaaagtttgttccaagttgacagtgtggtgctccctgcccagcccctccaggtggaggtgctgccacgggaacgcagttgctctgcctgccctggggcccctggcgacagctgggagcagggcagtgctgtgaggagcccagctttcccagtcaggcaggcatggcttccgtgttcaggctccctcaccagctggtgacacgggacaagcttacaaaccttctctgaacctcagttttctcatttacaagaggcaaagccatccatcaccttgtgtggattcagagaatgtgaggccctggggtgtcctacacaagggaaaggcttgctcagtgagcggtctgcacactgttagccaccctgccacctctgtgccctgggcaggctccaaaggaaagctctggctgggactgccaggagtctcacacgctcctgttgacattcccagcagccgcccctgaggtcgatgtttgttctgtttttctttttcttttttgagacggagtctcgctgtgttgccaggctggagtgcagtggtgtgatctctgctcactgcaacctccgcctgccagtttcaagtgattctctgcctcagccttctgagtagctgggactacaggtgcacgccaccacgcccagctaactttttgtattttagtagagacagggtttcgccatgtcggccagggtggtcttgatctcctgacctcatgatccacccgcctcagcctcccaaagtgctgggattacaggtatgagccaccgcaccgggcctgttctatttttctagttaagggaactgaagctcagagaggtgtcaccagcaggtgttcattcccatgccagccttgccccccggcttttcccaggcaggctcctgcgtgcccactggctccagcctggtcctctgtctcttggctgcttcactcctgctctttgtcccgactctggccctgcttacaggggccactacctgctggtgcctccataacaagcgtctggcgttgagacccctggcatggcaggggctttggggtctggtttccacaaggcttagccatggcagaacctcgttttattttaactctttgcccctacaaacaaacagcagtacttgccagaaccattcttgggattcaggagctcgggcgactgccttggcctctggccgcacccaggagggtggggttggatctgtgtagttgccaggcccacacctgccagcagggggctgactggatccatgctttactgtgtttaatgggggtaacaggggtccctacagccctcccagctaaacatttggaacaaaacaccagcccttttgtagtggatgcagaataaaattgttaatccaatc

SEQ ID NO: 987 - DNA, 2896 bp, Homo sapiens
atcttccgtcagagaatcccggctcctgctgcaataagaggctgttctggaagctctggggttcgggtctttgtccctgcagtcttttccagctattgtgtagagcattttgggcaggagaatctaggaccaagtcacatcagttctctccttaacccactccattcgactgttatcacagctatgcttccagagtgctctgtgcatttttacgatcagcaaacaatgaataaatctctggattccagaacaatgctacgagggtctgaatgcctgtcccacacataggattctagaacaccccagctgtcgtctgaatgattgccccccacatatgattccagaacactgctgctgcggtctgaatgattgtacctcacacaggattccagaacactcctcctctagtctgaatgtttgtccctcacataggactccagaacactgctgctgtgttctgaatgttcttcctcacatagtattccataacattgctatgagggtctgaatgtttgtctcacacatagggacccagaacatcccagatgtggtgtgaatgattgtccctcacataggattccagaacgcagctgctgggttctgagtgtttctcctttacgtaggattccaaaacattgctactgggatctgaatttttctccctcacataggattccagaactctgctatgaggatcttaattattctccctcacataggattccagaacactcctgttgtggtctgaatgtttgtccctcacttaagcttccagaacactgctgtcgggttctgggtgtttgaccctcacgtacgattccaaaacactgctacgtgtgtctaaatgtttttccctcacataagattccagaacactgctatgagggtctgtatgtttgtcccgcacgtaggtccgcagaacactactgctgtgttctgaagggtttttcctcacataggattccagaacaatgctacaatggtataaatgattgtccctcacagaggattccagcatacttcttctgggttctgaatgtttctccctcacataggattacagaacactccttctatgatctgaatgtttgtccctcacttaggaatgcagaacactgctgttgggttctgactgtttgtccttcacgtacggttacagaacactgatacatgggtgtaaatgtttgtccctcacataggattctagaacactgctacaagggactgaatgtttgtctcgcacataggactctggaacacacctagtgtgttctgaaagtattttcctcacataggattccacagcaatgctacgtgagtctgaatctttgtcccaaacctaggactccagaacaactcagctgtggtctgaatgattgtccctcacataggattccagaacactgctgctgggttgtgagtgtttctccctcacatggtattccagaacactgctactgtggtctgaaagtttttccctcacataagattgcagaacactgctacgagggtctgaattattctccctcacataggattccagaagattccttcgtggtctgtatgtttgtccctcaattaggattccaggacactgctgtagggttccaagtgtttgtctctcacgtgcggttccagaacactgctccctgggtctaaaagtttgttcctcacataggattgcagaacagtgctacaagggtccgggtctgaatgtttgccccacacataggattccagaatgcctcaactgtggtatgaatgattgtccctcatataggattccacaatactactactgggttatgagtgtttctccctcacatggcattccagaacactgctacgagggactgaatgtttgtcccgcacataggactccacaacactcctgttgtgttctgaatgtattttcctcaaagaggattccagaaaaatgctacgcgggtctgcatgtttgtcccacacgtaggactccagaacaccccggctgtagtctgaatgattgtccctcacataggattgcagaacactgcttctgggttgagcatttctccctcacataggattccagaacactgctacgagggtctgtattattctccctcacaatggattccagaatattccttctgtgatctgtgtgtttttccctcaattagcattccaggacaccgctgctgggttctgagtgtttctccctcacataggattgcagaaccctgctactgacatctgaatatttgtccctcacaaaggattccagaacactgctgcaatggtctgaattattctccctcacataggactccaggacactcctactgtggtctgaatgtttgtcccacacgtaggattccagaacatcccagctgtgttctgaatgattgtcccttacatagaattccagaacactgctgctgggttctgagattttttccccttatgtaggattccagaacattcctgctgtggtctgagtgtttgtcccacaaataggattccagaatacttctactgtggtctgaaagtttgttcctcacgtaggattccagagcactgctacgagggtctgaatgtttgtcccacacataggactccacaacactcctgctgtcttctgaatattcttcctcacataggattccagaacattactacgagggtctgaatgtttgtcccgcacctagggatccagaacaccccagctgtggtctgaatgtttgtccctcacttaagattccagaacactgttgttgggttcggaatgtttgttcctcacgtacgattccagaagactgctatgtgggtctaaatgtttttcccttacctaggattccagaacactgttacgagggtctgtatgtttgtctcgcacatagatctccagaatact

SEQ ID NO: 988 - DNA, 3036 bp, Homo sapiens
agctatgggctggaggccccggagagctcgggggaccccgttgctgctgctgctactactgctgctgctctggccagtgccaggcgccggggtgcttcaaggacatatccctgggcagccagtcaccccgcactgggtcctggatggacaaccctggcgcaccgtcagcctggaggagccggtctcgaagccagacatggggctggtggccctggaggctgaaggccaggagctcctgcttgagctggagaagaaccacaggctgctggccccaggatacatagagacccactacggcccagatgggcagccagtggtgctggcccccaaccacacggtgagatgcttccatgggctctgggatgcaccgccagaggatcattgccactaccaagggcgagtaaggggcttccccgactcctgggtagtcctctgcacctgctctgggatgagggcaggcgagaagcgcgcaggacccggaagtacctggaactgtacattgtggcagaccacaccctgttcttgactcggcaccgaaacttgaaccacaccaaacagcgtctcctggaagtcgccaactacgtggaccagggatgccctgtgtgggaagctgcagtgccagggtggaaagcccagcctgctcgcaccgcacatggtgccagtggactctaccgttcacctagatggccaggaagtgacttgtcggggagccttggcactccccagtgcccagctggacctgcttggcctgggcctggtagagccaggcacccagtgtggacctagaatggtgtgccagagcaggcgctgcaggaagaatgccttccaggagcttcagcgctgcctgactgcctgccacagccacggggtttgcaatagcaaccataactgccactgtgctccaggctgggctccacccttctgtgacaagccaggctttggtggcagcatggacagtggccctgtgcaggctgaaaaccatgacaccttcctgctggccatgctcctcagcgtcctgctgcctctgctcccaggcgccggcctggcctggtgttgctaccgactcccaggagcccatctgcagcgatgcagctggggctgcagaagggaccctgcgtgcagtgggtaggctccgagcgcctgcttcctgagcctactcctgcggttcccctcctcagagctctgctggggctgtgggagctggggcaggccctcagccttgcccccaggtgcagagagcagccccagaggccatggaaagaagtagctttgaacaggaggttccagtggcctcccagtcaagcgagggggtggatccctgccccaccaccagcaccgcaaggcatggccctctacctcccagagatgggggcagagggcataacagacaggggcagggcaccacctgggccccgggtggcagctaagaggaccctgacaaagcgagttgtgattgagggtctgtgggcagaggagcaaggtggccagagcctggcgtgtcagcacggagggggcgctgcagagggtggcggctgcttctcatccccaggcgggagtctcagggcaggggagaatgttttgaaggaacatcacaggaaatgacaaggccttgggggatgggatggggacagtcaaagatggcttggaatcatcaagggcagcagggcacccaggggcaaggagagcagacatagctgccgaaggggcggacatccaaggttctttggaagctgagcgatgccagcatctggagagtgccaggctgctgggtggtgtcagagcctggaggaaatgttaggactagagagaggaggtgccagccgagggcatgaggctcacttggagcctggatcccaaggctcccctgaagagggagcaggaagggagctgagagggtgacttggagcagatgggtgccccaagaaactcagtaaacgcagaactccctgggctggacaccatgctgcggggaggcaataacccactcaggatcactgtgccaacctcctggactcttatcacgttgctcagccccaaagatggcccacacagggaccaccccctgggcggcgttcaccccacggagttgggccccacagccactggacagtcctggcccctggaccctgagaactctcatgagcccagcagccaccctgagaagcctctgccagcagtctcgcctgacccccaagatcaagtccagatgccaagatcctgcctctggtgagaggtagctcctaaaatgaacagatttaaagacaggtggccactgacagccactccaggaacttgaactgcaggggcagagccagtgaatcaccggacctccagcacctgcaggcagcttggaagtttcttccccgagtggagcttcgacccacccactccaggaacccagagccacattagaagttcctgagggctggagaacactgctgggcacactctccagctcaataaaccatcagtcccagaagcaaaggtcacacagcccctgacctccctcaccagtggaggctgggtagtgctggccatcccaaaagggctctgtcctgggagtctggtgtgtctcctacatgcaatttccacggacccagctctgtggagggcatgactgctggccagaagctagtggtcctggggccctatggttcgactgagtccacactcccctgcagcctggctggcctctgcaaacaaacataattttggggaccttccttcctgtttcttcccaccctgtcttctcccctaggtggttcctgagcccccacccccaatcccagtgctacacctgaggttctggagctcagaatctgacagcctctcccccattctgtgtgtgtcggggggacagagggaaccatttaagaaaagataccaaagtagaagtcaaaagaaagacatgttggctataggcgtggtggctcatgcctataatcccagcactttgggaagccggggtaggaggatcaccagaggccaggaggtccacaccagcctgggcaacacagcaagacaccgcatctacag

SEQ ID NO: 989 - DNA, 2294 bp, Homo sapiens
ccttttctcggggcgcccgagaggccagctcagacctcccggctcgacaggcggcgcgggcggcggtaaaatgtcggttccaggaccttaccaggcggccactgggccttcctcagcaccatccgcacctccatcctatgaagagacagtggctgttaacagttattaccccacacctccagctcccatgcctgggccaactacggggcttgtgacggggcctgatgggaagggcatgaatcctccttcgtattatacccagccagcgcccatccccaataacaatccaattaccgtgcagacggtctacgtgcagcaccccatcacctttttggaccgccctatccaaatgtgttgtccttcctgcaacaagatgatcgtgagtcagctgtcctataacgccggtgctctgacctggctgtcctgcgggagcctgtgcctgctggggcaggagtgcagtggtacgatcgtagctctccgcagctttgatctcctgggctcctgcaatccgcccagctcagcctcctgagtacctgggaccacaggtgcatagcgggctgctgcttcatccccttctgcgtggatgccctgcaggacgtggaccattactgtcccaactgcagagctctcctgggcacctacaagcgtttgtaggactcagccagacgtggagggagccgggtgccgcaggaagtcctttccacctctcatccagcttcacgcctggtggaggttctgccctggtggtctcacctctccagggggcccaccttcatgtcttcttttggggggaatacgtcgcaaaactaacaaatctccaaaccccagaaattgctgcttggagtcgtgcataggacttgcaaagacattccccttgagtgtcagttccacggtttcctgcctccctgagaccctgagtcctgccatctaactgtgatcattgccctatccgaatatcttcctgtgatctgccatcagtggctcttttttcctgcttccatgggcctttctggtggcagtctcaaactgagaagccacagttgccttatttttgaggctgttctgcccagagctcggctgaaccagcctttagtgcctaccattatcttatccgtctcttcccgtccctgatgacaaagatcttgccttacagactttacaggcttggctttgagattctgtaactgcagacttcattagcacacagattcactttaatttcttaattttttttttttaaatacaaggagggggctattaacacccagtacagacatatccacaaggtcgtaaatgcatgctagaaaaatagggctggatcttatcactgccctgtctccccttgtttctctgtgccagatcttcagtgcccctttccatacagggatttttttctcatagagtaattatatgaacagtttttatgacctccttttggtctgaaatacttttgaacagaatttcttttttttaaaaaaaaacagagatggggtcttactatgttgcccaggctggtgtcgaactcctgggctcaagcgatccttctgccttggcctcccgaagtgctgggattgcaggcataagctaccatgctgggcctgaacataatttcaagaggaggatttataaaaccattttctgtaatcaaatgattggtgtcattttcccatttgccaatgtagtctcacttaaaaaaaaaaaaaagaaaaagaaatggataatttcatctactgcctttacttggggttaatgtgattcttaaacaccttcatcatggaactctcagagtggggtccgttttggtttcctggtggtgggttttgaaagataagggaaagcacattttgagcatgtctgggtaccatggtgcggatgcttgggaaccagaactgtttcagaggaatctgaagtctgattttagttttcagagacacagcttgttgtaaaacatgagaagacatgatttctaggactcaagcagcaagccaggattctaggttggctgctgtgtcatctttgaagtcaagacaaagctgggctcgaccttcaagggtcctcgttttgataatacttcagaatagggaactcatgtgaatactactatgtagaaataaaacctagaccttgagcgaacatctgtatattggttgaaaacgatagtggtaaccattgatcccccttcatttgatgtttggaaaattccagtaattatcatttttgcaacgaatatggataccacatagtactttggtgttacctgcttttgaaaaataaagtctttggttcacccggtg

SEQ ID NO: 990 - DNA, 2829 bp, Homo sapiens
actgagagacgccctggaacgtctgtggcagcttctgtctcgctgggacccgcactgacagcgggaggcagagggaggaacctggacgccggaagccgggaaatggactcagtggcatttgaggatgtggctataaacttcacctgtgaggagtgggctttgctgggtccatcacagaagagtctctacagagatgtgatgcaggaaaccatcagaaacctggactgtatagactgaataagaggaggggttggtcttgctgtctcaagagtagcagagactgaagaaattcatatgaatgatgatggcaaaatcatgatatagaagaagatcagtacaaagatctcagaagaaatctaagatgtcatatggtagagagagcctgtgaaattaaagataatagtcaatgtggaggaccctttacccagactcaagacagtattgtgaacgagaaaatacctggagtagatccatgggaaagcagtgagtgtacagacgtcctcatgggtcgttcatctcttaattgctacattagagttgacagtgaacacaaaccatatgagtatcaagaatatggagagaagccatatacacatacacaatgtgggacagctttcagttatcagccctgctttcaaatacatgaaagacctcagcatggaaagaaactctatgattgtaaggaatgtgcaagcttcagttctcttgaaaaccttcaaagacacatggcagcacaccatggagatggacctcgtatatgtaagttgtgtggaaacgcctttatttggcctagtttatttcatatgcttagaagaactcacactgaagagaaaccatatgaatatgagcagtgttctacagcgtttcctgcttatagttccactctaagacatgaaagaacacacagtggagagaaaccctatcaatgtaaacaatgtgggaaagccttcagttgttcctgttacactcaactatatgaaaggactcacactggagaacaatcctatgaatgtaagcaatgtgggaaagcattttatcatcttggaagctttcaaagacacatgatagtgcacactggagatgggcctcataaatgtaagatatgtggaaaaggctttctttctcccagttcagttcgaagacataaaagaactcacactggagagaaaccgtatgaatgtaagtattgtgggaaagcattctctgattgcacaggttttcgaagacacatgataacgcacactggagatggacctcataaatgcaaggtatgtgggaaagcctttgattctcccagtttatgtcgaaggcatgaaacagctcatactggggagaaaccctataaatgtgaatgtgggaaagcctttagtgatttctattactttcgaaatcatgaaactactcacactggagagaagccatataaatgtaaacaatgtggaaaagccttcatttgttgcacttaccttcaaatacatgaaagaattcacactggggagagaccctataaatgtaaacaatgcggaaaagccttcaggtcttccaattacattcgagtacatgaaaagactcacactggagaaaagccctatgaatgtaagcagtgtggaaaagcactttctcatctgaaaagctttcagagacacatgataatgcacactggagatggacctcataaatgtaagatatgtgggaaaagctttgattctcccagttcatttcgaagacatgaaagaattcacactggggagagaccctataagtgtaaactatgtgggaaaggcttcaggtcttccagttacattcaactacatgaaaggactcacactggagagaaaccctatggttgtcagcaatgtgggaaagcattatctgatctctcaagctttcgaagacacatgataacacatactggaaatggacctcataaatgtaagatatgtgggaaaggctttgattatcccagttcagtgcaaagacatgaaagaactcacactggagagaaaccctatgaatgcaaggaatgtggtaaagccttcagtcattcaagttacttacgaatacacgaaagagttcatactggagagaagccgtataaatgtaaggaatgtgggaaaccattccattgtcccagtgcctttcataaacatgaaaggacccacagtatggagaaaccctataagtgtaaagaatgtggggaagcatttcattgtatcagttcctttcataaacatgaaatgactcactagagaaaacccctatgagtgttgaacatgtgagaaagccttaagtactttcagcttcttacaaatacataagagactcacactgaaaaaagttgtatgaatataaaaatatactaaaaccttccatttttttcagtaccttttgaaaacatgaccaaactcatacttcaaaaatatatatataatgaatgtgaggaatatgaaaaaactttctttctctagcaaactttcaaaggtggttattataacatactagcaatggaccttactactgtaaggaatgtagaaatgcatttactagtcctaactcatttcagttacatgaaagatttcaaactgcagagaaccactatgaatgtaaacaatgtggtaaagcatttagtagcttcagtttcttttgaatacagtcttctctagtttctgaggtgaattgattccagcaccctcaggaatacctatattcagagatattcaagtccctgatattaaaaacagcatatttgcatataatctaggcacatttttctgtatatcttaaatcatttctagattacttataatacacaatgcattgtaaattctg

SEQ ID NO: 991 - DNA, 2607 bp, Homo sapiens
tcttttgccaactgaagccttcttctgccacttctgcgggctccctcctctggcaggcttcccccttgatcgacttcttggttttctctctggatggaacgggcatgggcctctctgggggagggcgaggcccgtggggcagggctggaatgggagacctgttggcctgtgggcctcacctgcccctctgttctctcccctcacatcctcctgcccagctcctcacatacccacacattccagggctggggtgagcctgactgccaggaccccaggtcaggggctccctacattccccagagtgggatccacttcttggttcctgggatggcgatggggactctgccgctgtgtagagaccagtgggatgggctctacctctctttctcaaagagggggctctgcccacctggggtctctctccctacctccctcctcaggggcaacaacaggagaatggggttcctgctgtggggcgaattcatcccctccccgcgcgttccttcgcacactgtgattttgccctcctgcccacgcagacctgcagcgggcaaagagctcccgaggaagcacagcttgggtcaggttcttgcctttcttaattttagggacagctaccggaaggaggggaacaaggagttctcttccgcagcccctttccccacgcccacccccagtctccagggacccttgcctgcctcctaggctggaagccatggtcccgaagtgtagggcaagggtgcctcaggaccttttcgtcttcagcctccctcagcccccaggatctgggttaggtggccgctcctccctgctcctcatgggaagatgtctcagagccttccatgacctcccctccccagcccaatgccaagtggacttggagctgcacaaagtcagcagggaccactaaatctccaagacctggtgtgcggaggcaggagcatgtatgtctgcaggtgtctgacacgcaagtgtgtgagtgtgagtgtgagagatggggcgggggtgtgtctgtaggtgtctctgggcctgtgtgtgggtggggttatgtgagggtatgaagagctgtcttcccctgagagtttcctcagaacccacagtgagaggggagggctcctggggcagagaagttccttaggttttctttggaatgaaattcctccttccccccatctctgagtggaggaagcccaccaatctgccctttgcagtgtgcagggtggaaggtaagaggttggtgtggagttggggctgccatagggtctgcagcctgctggggctaagcggtggaggaaggctctgtcactccaggcatatgtttccccatctctgtctggggctacagaatagggtggcagaagtgtcaccctgtgggtgtctccctcgggggctcttcccctagacctccccctcacttacataaagctcccttgaagcaagaaagagggtcccagggctgcaaaactggaagcacagcctcggggatggggagggaaagacggtgctatatccagttcctgctctctgctcatgggtggctgtgacaaccctggcctcacttgattcatctctggttttcttgccaccctctgggagtccccatcccattttcatcctgagcccaaccaggccctgccattggcctcttgtcccttggcacacttgtacccacaggtgaggggcaggacctgaaggtattggcctgttcaacaatcagtcatcatgggtgtttttgtcaactgcttgttaattgatttggggatgtttgccccgaatgagaggttgaggaaaagactgtgggtggggaggccctgcctgacccatcccttttcctttctggccccagcctaggtggaggcaagtggaatatcttatattgggcgatttgggggctcggggaggcagagaatctcttgggagtcttgggtggcgctggtgcattctgtttcctcttgatctcaaagcacaatgtggatttggggaccaaaggtcagggacacatccctttagaggacctgagtttgggagagtggtgagtggaagggaggagcagcaagaagcagcctgttttcactcagcttaattctccttcccagataaggcaagccagtcatggaatcttgctgcaggccctccctctactcttcctgtcctaaaaataggggccgttttcttacacacccccagagagaggagggactgtcacactggtgctgagtgaccgggggctgctgggcgtctgttctttaccaaaaccatccatccctagaagagcacagagccctgaggggctgggctgggctgggctgagcccctggtcttctctacagttcacagaggtctttcagctcatttaatcccaggaaagaggcatcaaagctagaatgtgaatataacttttgtggaccaatactaagaataacaagaagcccagtggtgaggaaagtgcgttctcccagcactgcctcctgttttctccctctcatgtccctccagggaaaatgactttattgcttaatttctgcctttcccccctcacacatgcacttttgggcctttttttttatagctggaaaaaacaaaataccaccctacaaacctgtattt

SEQ ID NO: 992 - DNA, 2238 bp, Homo sapiens
ggcgcgggggcgtggggcggtgctgaggagctgaagccgtagccagctcgacgccggacagtccagcgagcagcacggcgggaaccggcagccggagcagtcccggagcagaagcagcagcagcagcagcagccctcgccgttcgcggagcgcagccgagccggccatggcgttgtcgatgccgctgaatgggctgaaggaggaggacaaagagcccctcatcgagctcttcatgattctttggctcaaaggagttgtatttagtgtgacgactgttgacctgaaaaggaagccagcagacctgcagaacttggctcccgggacccacccaccatttataactttcaacagtgaagtcaaaacggatgtaaataagattgaggaatttcttgaagaagtcttatgccctcccaagtacttaaagctttcaccaaaacacccagaatcaaatactgctggaatggacatctttgccaaattctctgcatatatcaagaattcaaggctagaggctaatgaagcactggagaggggtctcctgaaaaccctgcagaaactggatgaatatctgaattctcctctccctgatgaaattgatgaaaatagtatggaggacataaagttttctacacgtaaatttctggatggcaatgaaatgacattagctgattgcaacctgctgcccaaactgcatattgtcaaggtggtggccaaaaaatatcgcaactttgatattccaaaagaaatgactggcatctggagatacctaactaatgcatacagtagggacgagttcaccaatacctgtcccagtgataaggaggttgaaatagcatatagtgatgtagccaaaagactcaccaagtaaaatcgcgtttgtaaaagagatgtcttcatgtcttcccctaagaatacgcttttcctaacaggctactccttcctgtagagcagaaattgtattttgcacgaacatgcagttattgaagattaggatcaaggatagacaaggtatagtagttatcttaaaatatacactcctaagcagtattattttaaaatcctttaccctggctacctcccctacccgggttcccctctctttaatttggagacactccaccacaaacttttcactttagaggtagcttgccatctctcaggagccctcaccattgtgtccattcactgtgtatagatggcagaacttttgaggtgcaatgtttaattgttaaaaatagtagccacgactttatcaggcagccccaaactggtgcataatgcatggtacaagaaatatttatgtattttttggaattttgtaatatttagtaagagtatatgaaaggattgctactgtatcagaaatattgtttcaatttagtctatcctggatatgtactaacgaatattaccaccagagaagagagctttctacaaaagtcactacagattttgctatattgctttgtagatagatttttacttttgcctaaaagcatttatccttcataccaattgtaacatctgacaccatgtagaagctaaaagtttagagggagtgagggttttctcaagaccttcctcaagcattttatctttagaagagaaactgatgggcacctgatactctgtctaaatacgtttgttatatgtgttttgccctgtgccattcatttggaactttattgcattctttattttaaaaagcttgtttttacgtaatcatagagcttgctatttgtacatctgttgagcaacactacataactgatttttagttgacttagctatagcagtacaatgattagtaatgtaaaaattaacacagaaattaacctaaggaatgaagggtgggtttgtcaaaatatcaagtaaatttttgtttctaaagtacatttaatgtagatgacctaaagaatgcgttatccatcctatataaaagaaagataaaacacaggtcaccaattttctcatttcaccccatttaccttgtatagaggattgttcattcctttgggactaagttatagttatggtgagtgtgtatttactgtagttttgcctgatctcactcattgcacttcctggagttaaattttccaacagccatgttgaggaatagcactctgcatgtttttgttttgtttttcggggttttttttaattgaagccctaaaccaggaattatttgtgttctaacaggaggatgaacttgctgaaaataaaactttgctatgt

SEQ ID NO: 993 - DNA, 1804 bp, Homo sapiens
ataaccgtccgcgacgccgagacaaaccggacccgcaaccaccatgaacagcaaaggtcaatatccaacacagccaacctaccctgtgcagcctcctgggaatccagtataccctcagaccttgcatcttcctcaggctccaccctataccgatgctccacctgcctactcagagctctatcgtccgagctttgtgcacccaggggctgccacagtccccaccatgtcagccacaatccccatggcttattatccagtcggtcccatctatccacctggctccacagtgctggtggaaggagggtatgatgcaggtgccagatttggagctggggctactgctggcaacattcctcctccacctcctggatgccctcccaatgctgctcagcttgcagtcatgcagggagccaacgtcctcgtaactcagcggaaggggaacttcttcatgggtggttcagatggtggctacaccatctggtgaggaaccaaggccacctttgtgccgggaaagacatcacataccttcagcacttctcacaatgtaactgctttagtcatattaacctgaagttgcagtttagacacatgttgttggggtgtctttctggtgcccaaactttcaggcacttttcaaatttaataaggaaccatgtaatggtagcagtacctccctaaagcattttgaggtaggggaggtatccattcataaaatgaatgtgggtgaagccgccctaaggattttcctttaatttctctggagtaatactgtaccatactggtctttgcttttagtaataaaacatcaaattaggtttggagggaactttgatcttcctaagaattaaagttgccaaattattctgattggtctttaatctcctttaagtctttgatatatattacttgttataaatggaacgcattagttgtctgccttttcctttccatcccttgccccacccatcccatctccaaccctagtcttccatttcctcccgccagtctccattgaatcaatggtgcaggacagaaagccagtcagactaatttccttctttcctcgcacttctccccactcgtcatcttttaactagtgtttcacaaggatcctctgaaaccctctctgtgccccaagtacagatcccattacttctgctttcgtatctcctcaggcaaaagtggagggtgccttatgggccctcctcataggttgtctctgcatacacgaacctaacccaaatttgctttggtgccagaaaaactgagctatgtttgaacaaagatgtcgtgcaaactgtactgtgaacaacagttggtttaaaatatgaggggcaaggaggaggatgcatttcaaaagcttgattgatgtgttcagagctaaattaagaggagttttcagatcaaaaactggttaccattttttgtcagagtgtctgatgcggccactcattcggctccccagaattcctagactgggttgatagggtcatattgtgaatgtctcactacaaaatgacttgagtccagtgaaatctcattagggtttaagaatatttcagggatccttaatgttttgatttttgttttctgaaattggattttatttatcttataatttcagttcatctaaattgtgtgttctgtacatgtgatgtttgactgtaccattgactgttatggaagttcagcgttgtatgtctctctctacactgtggtgcacttaacttgtggaatttttatactaaaaatgtagaataaagactattttgaagatttgaataaagtgatgaagttgcattac

SEQ ID NO: 994 - DNA, 2411 bp, Homo sapiens
atgtgccagagcgccgtctcccctgagccgtgccctgccggggagtacggcgagagagaggttctggcctctcggagtgggcttgcggttccggtgccccctctcttcgtcctcgtggctgattgtgccagagagctcctcggggagggccctagcgtgagggcagtttcccagcgccggggccgcggtggacgccaatgcagctgtctaggacctgcgcccgcggtgcgtccagagggccccggcgcgaacgtcagaacgccgccccgttccgcgctctcagcagccagccagggccgctgccagttccaccgtggagaggaggaaaccgggcgagagcctcacttccctttccgcccaaaaagctttctcagtgattgctgtagtacctgagattctaccataggatcttccgcctacattaaagtagtcgatttcttctttaaaatacttttttattggagtataatatacatactgaaaagtgtgcaagtcgtaatatagacattgatgaattaccacaaagcgagtaaacctgtgtaggaagcaagagcattcctaccgctccagaagcccttattgcggcccccacttagtctctccaaaggtaaccggtatcctgacttctaacgccacagatttttttttttagtgttttaacatttgaaggtgtagacaccttggtataaagagccccctttacccatcacctggcttcaacaattatcagctcttagtctttattttatctttattactgtttccccatcccgatgctttggataattttgaaggagatcccaggcagtaagtcatttcatccgtaaatattttgatacagatctccaaaagacaagggtgcttttcaataccattatcacacctaaaatattaatagggttgtaaatatcacgaaatatccagttagtgttcagatatccctgatactctctttcttattttattttattttcttagagccttgctcttgtcgcccaggttggagtgcaatggcacgatctcagctcgcttaaacctcctcctcccaggttcaagcgattctcctgcctcagcctcccgagaagctgggattacaggcgcccgccaccatgcccggctaatttttgtatttttagcagagatggggtcttgcctttttggtcatgctggtctcgaactcgtgacctcgtgatccgcccacctcggcctccccaagtgctgggattacaggcgtgagccaccgctcctggctcaggtatccctgatactctcaaatttttttttttatgatttggttgaatcaggattcaaataaagcctcgtataatacaattggttgctatgtgcccccgttaactctttctgaatctttttaatagaaacatacagaagtagagagagtagaataaacccctgtgtactgtcacccagctccagcaattatcaattccctaccagtgttgtttcatcaactccccacctgttcaccagattactttttaacaaacttaattatcggggtttttttatatgtactttgatatgtacctctaaaagataaggatttttaaaaacgtaattaatcatactattctaaaaaactagtacttctgtaatattaaatattccattaatgttcacattttcccaaatgtcttataaatttctttttaatttagtttgttgaaatgtgatctagataaggtccataccttgcaatgtgttgagttgtctcaactatcttagtttgtaagttttttgcaatttatttattgaacaaaacaggtcttttttggagtttcccacattctagatttgctgatttcatccttattgtggtgtttagcgtgctcctctgccttccatatgtcttgtgaaactggtagttggagaaaggggcttgatcagattcaggactttttattttgtcttttggtataaatacttcatagtaagtgtttacttgtgtcagtaagcacacagcatttgattgcccctctgcgaagttaaaggccattcatgatctttacttagatttgttatttcatttgaagctgcatactattgctgtttaaattttatcatttcttttcatttattatctaggaaatttttatgacagaacttccattcatcaacagtttacttaccctgaaatagtttgtatatgagttagctttcaaaataacttgcaaaaatgatgaatgaggacttcttaaaatgtcattaagaactcatagatttaaataattgagacattttaatccattgctgttgatacttttattgatagggccatagttcaactgtgctctgtagagccctgggctttcctacttcaatcagatttcaacttttgattgtttctgtactgggcttccctttggctaaaataaacactgagttacagc

SEQ ID NO: 995 - DNA, 2904 bp, Homo sapiens
ggtgcgccgggccgtggtgagtccgggctcccgtggccgcgtgctgggaggagactggagcccggttaggaagaatggagttggcgactcgctaccagagcacttcgcaggcatagtttggaagtcatcagggctggttcttttccttccagatccctaaagaagtggctgacatctttaacgcccccagtgatgatgaagagtttgttggcttccgagatgatgttcccatggaaaccctctcgtcagaggagagctgcgatagttttgactcactagagtcagggaaacagcaggatgtgcgctttcattccaaatacttcacagaagagctaagaagaatttttatagaggacactgactcagagactgaggattttgcaggatttacgcagagtgatctgaatggaaagactaacccagaagtaatggtcgtggagtcagatttgagtgatgatggcaaagcatctttggtgagcgaggaagaggaagatgaagaagaagataaggctacccctagaagaagcaggtctagaagaagtagtattggtcttcgagtagcctttcagttccccaccaagaagctggccaacaaaccagataaaaacagttcttccgagcagttgttttctagcgcacgcttacagaatgagaaaaaaacaattcttgaaagaaagaaagactgtagacaggtgatacaaagggaagattctacctctgagtctgaggatgactctcgggatgagagccaggagagttcagatgctttgctgaaaaggaccatgaacatcaaggagaacaaagccatgcttgcccagttattggcggaattgaactcgatgccagatttcttcccagtacgaaccccaacctcagcttctaggaagaagacagtgaggcgggccttctcggagggacagatcacgcggcgtatgaacccaacccggagcgcgcggcctcctgagaagtttgctctagagaacttcactgtctcagccgctaaatttgcggaagagttttacagcttccgaagaaggaagacaattggggggaaatgccgggagtacagacgacgtcaccgtatatcttcttttcggccagtggaggatatcaccgaagaggacttagaaaatgttgccataactgttcgagataaaatctatgataaagttctgggtaacacgtgccatcagtgtcgacaaaagaccatcgacaccaagacagtgtgtcggaaccagggttgctgtggtgtgcgaggacagttctgtggaccatgcctgcggaaccgctatggggaggatgtcagatcggcattgctggacccggattgggtgtgtcccccctgtcgtgggatctgcaattgcagctactgtcggaagcgtgacggccgctgtgccacaggaatcctcattcatctggccaagttttatggttatgacaatgttaaggaatatctggagagcttacaaaaggagctggtagaagacaattaagaggaaaacaaacagaaccagccacctcaccatagagtactccaacaagacatgcataccattggtgcctaagatttttttacagttgtgtttttatacagaaattctttgtagaaattactattttttgttaaagattgtttatatgcttacaaagatttctcaggaagacagcagagcagaggaatctatatagatgtatgcacagacctgtctgtatgctgaactttgttaaaaatatctgccagttattaaaaagcacagttgaaatggggtggggttaaagttcaggtaagtaagttagagagaaaacattgtatgatcagctcctgcacttgatctatctttggcttcccaaacagtaactcactccaggccaagtgtgccttagcacgagtgaccacagtttaatagaccacacacatcgtttaacctgctcttggtcattggaaatttacactgaacaaagtgcaattaactgtagaacagttttatttttattaaaacttgactgaacaaaaggggaccatcaacattgtagacactggacactggaggccttacagagtgctagcctcttccttcaggactcacctggggcctgctgcttttatattttgaaagagtttaagggctaataatttaatttgttgtttgttaaaaattaaaatctccgttctttccggctgcattgcttttgcatgttcacatatgatgtacttttatgatgtactttttttttttttgagatggagtcttgttctgttgcccaggagggagtgcagtggtgcaacctcggctcactgcaacctttgcctcctaggttcaagtgattctcctacctcctgagtaactgggattacagtcgtgtgccaccacgctcagccctgagttagtttctagtatttttttctgactttcactctaaggatagcgttgaaaaaagaatgcacgtgtgagttactaaaaagttagaataatgtgcatgggaacagtgcagcaacatgctagaaaatcctcactgcactccagcagaggctagaggaatgccagtgttaccttacacttctagaagcagagccactccagccagaacccattttgcagtcttctcttcgctcttcagcctgaaggtccagatgtagctggggcctctcagtttggttctatacacagggcactcgtaggtctgtttggtttcttgtctgtccacgggggtggcttttgcaaagatgaccggcatagggcatgccagctccttgagacgggcttcaacaatggttcctgcttgggtgtcccagcgggcgcctatggcaaaaacacagcggttgcaattgtgtggcagcttgctactaatgataatgatcaagttgtttgatgcaataaacattcaacattctggttttgtcat

SEQ ID NO: 996 - DNA, 2625 bp, Homo sapiens
aagaaggctggcggtgtttcctcttagaggggagaaactcagcctgggtaggagacccagccccacgcagggaaaactgtgctaacgcttccgatgtgtgtggcaggtgcggcggcggcgaatacggtttgtcctcgagcctaaccctgtctgtgttggtgtcagcagtggcccccctaccacacacacagggtccctggcgtcccaagaccactcctggcagccccgccactggctgcgcctggaagccgcgtcctcaggcctcgcctggcatttgctgtcacagaggttgcttccttgggtccgtccgtcctcgcccctccagcctgggcgcccccccacccctgtctcattccctccaccacatgcagcacagtccaggaggctggggtccaagagggccatggctggcacccggcttagtgctgagtccccagtgcccagcaagcctggcacccaggaggtgctcagcaaacgcttctgaacgacaggaagtgggactcttcagccatcgatgatccgctgtgcggccacaggctctgctgttctcctgcactcagggtcctcggtacccgccgctgctggcagctccgtggtgtccgagtccgcggtgagctgggaggcgggcgcccgggcggtgctgcgctgccagagcccgcgcatggtgtggacccaggaccggctgcacgaccgccagcgcgtgctccactgggacctgcgcggccctgggggtggccccgcgcggcgcctgctggacttgtactcggcgggcgagcagcgcgtgtacgaggcgcgggaccgcggccgcctggagctctcggcctcggccttcgacgacggcaacttctcgctgctcatccgcgcggtggaggagacggacgcggggctgtacacctgcaacctgcaccatcactactgccacctctacgagagcctggccgtccgcctggaggtcaccgacggccccccggccacccccgcctactgggacggcgagaaggaggtgctggcggtggcgcgcggcgcacccgcgcttctgacctgcgtgaaccgcgggcacgtgtggaccgaccggcacgtggaggaggctcaacaggtggtgcactgggaccggcagccgcccggggtcccgcacgaccgcgcggaccgcctgctggacctctacgcgtcgggcgagcgccgcgcctacgggcccctttttctgcgcgaccgcgtggctgtgggcgcggatgcctttgagcgcggtgacttctcactgcgtatcgagccgctggaggtcgccgacgagggcacctactcctgccacctgcaccaccattactgtggcctgcacgaacgccgcgtctttcacctgacggtcgccgaaccccacgcggagccgcccccccggggctctccgggcaacggctccagccacagcggcgccccaggcccagaccccacactggcgcgcggccacaacgtcatcaatgtcatcgtccccgagagccgagcccacttcttccagcagctgggctacgtgctggccacgctgctgctcttcatcctgctactggtcactgtcctcctggccgcccgcaggcgccgcggaggctacgaatactcggaccagaagtcgggaaagtcaaaggggaaggatgttaacttggcggagttcgctgtggctgcaggggaccagatgctttacaggagtgaggacatccagctagattacaaaaacaacatcctgaaggagagggcggagctggcccacagccccctgcctgccaagtacatcgacctagacaaagggttccggaaggagaactgcaaatagggaggccctgggctcctggctgggccagcagctgcacctctcctgtctgtgctcctcggggcatctcctgatgctccggggctcaccccccttccagcggctggtcccgctttcctggaatttggcctgggcgtatgcagaggccgcctccacacccctcccccaggggcttggtggcagcatagcccccacccctgcggcctttgctcacgggtggccctgcccacccctggcacaaccaaaatcccactgatgcccatcatgccctcagacccttctgggctctgcccgctgggggcctgaagacattcctggaggacactcccatcagaacctggcagccccaaaactggggtcagcctcagggcaggagtcccgctcctccagggctctgctcgtccggggctgggagatgttcctggaggaggacactcccatcagaacttggcagccttgaagttggggtcagcctcggcaggagtcccactcctcctggggtgctgcctgccaccaagagctcccccacctgcaccccctgccctttctctgccccatccctaccctagccttgctctcagccaccttgatagtcactgggctccctgtgacttctgaccctgacacccctcccttggactctgcctgggctggagtctagggctggggctacatttggcttctgtactggctgaggacaggggagggagtgaagttggtttggggtggcctgtgttgccactctcagcaccccacatttgcatctgctggtggacctgccaccatcacaataaagtccccatctgattttt

SEQ ID NO: 997 - DNA, 2421 bp, Homo sapiens
gagggatgatgaggactgtgtcgtcaggaggtgcgagtcctgagccctggagtggccccacatgaggaagaaagaatgtgaggagaagtgagcctagagaccagtgaggcaggagggaaccaggctgctcctggagcccaggaggggagtcgagggagtgggatggggagactgccttgcgggccactgccaggccagtggacagcggactgcagcgaaccgctggacagcagctgttccttctcccgagggcgagcccccccacagcagaatggcagcaaagacaactctctggacatgctgggcacggacatctgggcggccaacaccttcgattccttcagtggtgccacctgggacctgcagccggaaaagctggacttcacccagttccaccgcaaagtccgacacacgcccaagcagcccctgccacacatcgaccgcgaagggtgtggcaaagggaagctggaagatggggatggcatcaacctgaatgacatcgagaaggtccttccagcctggcagggctaccacccgatgccccatgaagtggagatcgcacacaccaagaagctgttccgcaggaggagaaatgatcgaaggcggcagcagagacctccggggggcaacaagccccaacagcatggtgaccaccagccaggcagtgccaaacacaacagggaccaccagaaatcctaccaggggggctcagcaccccacccctcagggaggcccactcaccatggctacagccagaaccggcgctggcaccatggcaacatgaagcacccaccaggcgacaagggggaggcaggcgcacaccgcaatgccaaagagaccatgaccatcgagaacccaaaactggaggacactgcaggggacaccgggcacagcagccttgaggccccccgcagccctgacaccctggccccggtggcttctgagcggctgcccccacagcagtcaggggggccagaggttgagacaaaacgtaaagacagtattcttcccgagcgcatcggggagcggcccaaaattaccctgctccagtcttccaaagacagactgcggcgaaggctaaaggaaaaggatgaagtggccgtggagacgaccactccccagcagaacaagatggacaagctgatcgagatcctgaacagcatgcggaacaacagcagcgacgtggacaccaagctcaccaccttcatggaggaggcccagaactccaccaactccgaggagatgctgggcgagatcgtgcgcacaatctaccagaaggctgtgtccgaccgcagcttcgccttcaccgctgccaagctctgcgacaagatggcgctctttatggtggaggggaccaagttccggagcctgctcctcaacatgctgcagaaggacttcacggtgcgcgaggagctgcagcagcaggacgtggagcgctggctgggcttcatcaccttcctgtgcgaggtcttcggcaccatgcgcagcagcacaggcgagcccttccgtgtgctcgtgtgccccatctacacctgcctcagggagctcttgcaatctcaggatgtgaaggaagatgctgtcctttgctgctctatggagctgcagagtacaggccggctgctggaggaacagctgcctgagatgatgacagagctcctggccagcgcacgggacaagatgctgtgcccctcggagtccatgctgacccggtcgctgctcctagaggtcatcgagctccacgctaacagctggagccagacggggaagggagcggcccacgggcagctggggccctggtgcacagggccagatggacaggcgggaggacaggggtggccctggcgggagaaagaaatggggaggagggcaggcagagtcggtggccagtctggagcccgagcatgcaagctcacaccaataagggaagcatgtttctttttcctggtggccctggccctccccttcctcactcccgcctctcccctccccatcagacccatcccccacggagctttgtgtgagggatctcatcgctgtgactcctcggagaccttggcagcctcgcacgccggggcaccgcttgggtcagaaaggacctcggaaggctgaaaaagtgggtcggagacgggctcgcattgttcccgcatgctgtcagccgcagtcgccaactggcagcaggcgacgtgtagcagatgtccgggaggacaaaggcaggcacggtccccaccagccgcccgtaattgacggcctttgtcagccatggcagagctgacgctccacctcccacctccaagtcctcctcactgcagcccccacagcctcaggcctagggggtcaggcgcagcgggggagatggagtttgcagttccacttgcactcttttgtttattgtgttttatttttcaaaagtcggttgctttg

SEQ ID NO: 998 - DNA, 3113 bp, Homo sapiens
actcggtgcgccttccgcggaccgggcgacccagtgcacggccgccgcgtcactctcggtcccgctgaccccgcgccgagccccggcggctctggccgcggccgcactcagcgccacgcgtcgaaagcgcaggccccgaggacccgccgcactgacagtatgagccgcacagcctacacggtgggagccctgcatgtgacggagcgcaaatacctgaagcgagactggtgcaaaacccagccgcttaagcagaccatccacgaggaaggctgcaacagtcgcaccatcatcaaccgcttctgttacggccagtgcaactctttctacatccccaggcacatccggaaggaggaaggttcctttcagtcctgctccttctgcaagcccaagaaattcactaccatgatggtcacactcaactgccctgaactacagccacctaccaagaagaagagagtcacacgtgtgaagcagtgtcgttgcatatccatcgatttggattaagccaaatccaggtgcacccagcatgtcctaggaatgcagccccaggaagtcccagacctaaaacaaccagattcttacttggcttaaacctagaggccagaagaacccccagctgcctcctggcaggagcctgcttgtgcgtagttcgtgtgcatgagtgtggatgggtgcctgtgggtgtttttagacaccagagaaaacacagtctctgctagagagcacttcctattttgtaaacctatctgctttaatggggatgtaccagaaacccacctcaccccggctcacatctaaaggggcggggccgtggtctggttctgactttgtgtttttgtgccctcctggggaccagaatctcctttcggaatgaatgttcatggaagaggctcctctgagggcaagagacctgttttagtgctgcattcgacatggaaaagtccttttaacctgtgcttgcatcctcctttcctcctcctcctcacaatccatctcttcttaagttgacagtgactatgtcagtctaatctcttgtttgccagggttcctaaattaattcacttaaccatgatgcaaatgtttttcattttgtgaagaccctccagactctgggagaggctggtgtgggcaaggacaagcaggatagtggagtgagaaagggagggtggagggtgaggccaaatcaggtccagcaaaagtcagtagggacattgcagaagcttgaaaggccaataccagaacacaggctgatgcttctgagaaagtcttttcctagtatttaacagaacccaagtgaacagaggagaaatgagattgccagaaagtgattaactttggccgttgcaatctgctcaaacctaacaccaaactgaaaacataaatactgaccactcctatgttcggacccaagcaagttagctaaaccaaaccaactcctctgctttgtccctcaggtggaaaagagaggtagtttagaactctctgcataggggtgggaattaatcaaaaacctcagaggctgaaattcctaatacctttcctttatcgtggttatagtcagctcatttccattccactatttcccataatgcttctgagagccactaacttgattgataaagatcctgcctctgctgagtgtacctgacagtagtctaagatgagagagtttagggactactctgttttagcaagagatattttgggggtctttttgttttaactattgtcaggagattgggctaaagagaagacgacgagagtaaggaaataaagggaattgcctctggctagagagtagttaggtgttaatacctggtagagatgtaagggatatgacctccctttctttatgtgctcactgaggatctgaggggaccctgttaggagagcatagcatcatgatgtattagctgttcatctgctactggttggatggacataactattgtaactattcagtatttactggtaggcactgtcctctgattaaacttggcctactggcaatggctacttaggattgatctaagggccaaagtgcagggtgggtgaactttattgtactttggatttggttaacctgttttcttcaagcctgaggttttatatacaaactccctgaatactctttttgccttgtatcttctcagcctcctagccaagtcctatgtaatatggaaaacaaacactgcagacttgagattcagttgccgatcaaggctctggcattcagagaacccttgcaactcgagaagctgtttttatttcgtttttgttttgatccagtgctctcccatctaacaactaaacaggagccatttcaaggcgggagatattttaaacacccaaaatgttgggtctgattttcaaacttttaaactcactactgatgattctcacgctaggcgaatttgtccaaacacatagtgtgtgtgttttgtatacactgtatgaccccaccccaaatctttgtattgtccacattctccaacaataaagcacagaatggatttaattaagcacacaaatgctaaggcagaattttgagggtgggagagaagaaaagggaaagaagctgaaaatgtaaaaccacaccagggaggaaaaatgacattcagaaccagcaaacactgaatttctcttgttgttttaactctgccacaagaatgcaatttcgttaatggagatgacttaagttggcagcagtaatcttcttttaggagcttgtaccacagtcttgcacataagtgcagatttggctcaagtaaagagaatttcctcaacactaacttcactgggataatcagcagcgtaactaccctaaaagcatatcactagccaaagagggaaatatctgttcttcttactgtgcctatattaagactagtacaaatgtggtgtgtcttccaactttcattgaaaatgccatatctataccatattttattcgagtcactgatgatgtaatgatatattttttcattattatagtagaatatttttatggcaagatatttgtggtcttgatcatacctattaaaataatgccaaacaccaaatatgaattttatgatgtacactttgtgcttggcattaaaagaaaaaaacac

SEQ ID NO: 999 - DNA, 2547 bp, Homo sapiens
atccgtcgaggggaggccgagcttgccaagctggcgcccagcggggtcatggtgcccggcgcccgcggcggcggcgcactggcgcgggctgccgggcggggcctcctggctttgctgctcgcggtctccgccccgctccggctgcaggcggaggagctgggtgatggctgtggacacctagtgacttatcaggatagtggcacaatgacatctaaggattatcccgggacctaccccaatcacactgtttgcgaaaagacaattacagtaccaaaggggaaaagactgattctgaggttgggagatttggatatcgaatcccagacctgtgcttctgactatcttctcttcaccagctcttcagatcaatatggtccatactgtggaagtatgactgttcccaaagaactcttgttgaacacaagtgaagtaaccgtccgctttgagagtggatcccacatttctggccggggttttttgctgacctatgcgagcagcgaccatccagatttaataacatgtttggaacgagctagccattatttgaagacagaatacagcaaattctgcccagctggttgtagagacgtagcaggagacatttctgggaatatggtagatggatatagagatacctctttattgtgcaaagctgccatccatgcaggaataattgctgatgaactaggtggccagatcagtgtgcttcagcgcaaagggatcagtcgatatgaagggattctggccaatggtgttctttcgagggatggttccctgtcagacaagcgatttctgtttacctccaatggttgcagcagatccttgagttttgaacctgacgggcaaatcagagcttcttcctcatggcagtcggtcaatgagagtggagaccaagttcactggtctcctggccaagcccgacttcaggaccaaggcccatcatgggcttcgggcgacagtagcaacaaccacaaaccacgagagtggctggagatcgatttgggggagaaaaagaaaataacaggaattaggaccacaggatctacacagtcgaacttcaacttttatgttaagagttttgtgatgaacttcaaaaacaataattctaagtggaagacctataaaggaattgtgaataatgaagaaaaggtgtttcagggtaactctaactttcgggacccagtgcaaaacaatttcatccctcccatcgtggccagatatgtgcgggttgtcccccagacatggcaccagaggatagccttgaaggtggagctcattggttgccagattacacaaggtaatgattcattggtgtggcgcaagacaagtcaaagcaccagtgtttcaactaagaaagaagatgagacaatcacaaggcccatcccctcggaagaaacatccacaggaataaacattacaacggtggctattccattggtgctccttgttgtcctggtgtttgctggaatggggatctttgcagcctttagaaaaagaagaaaggaagtccgtatggatcagcagaggctcagaaaacagactgttggaagcagattaaatatccctttgccagacatcagtcagctgagtttaccatcagctatgataatgagaaggagatgacacaaaagttagatctcatcacaagtgatatggcagattaccagcagcccctcatgattggcaccgggacagtcacgaggaagggctccaccttccggcccatggacacggatgccgaggaggcaggggtgagcaccgatgccggcggccactatgactgcccgcagcgggccggccgccacgagtacgcgctgcccctggcgcccccggagcccgagtacgccacgcccatcgtggagcggcacgtgctgcgcgcccacacgttctctgcgcagagcggctaccgcgtcccagggccccagcccggccacaaacactccctctcctcgggcggcttctcccccgtagcgggtgtgggcgcccaggacggagactatcaaaggccacacagcgcacagcctgcggacaggggctacgaccggcccaaagctgtcagcgccctcgccaccgaaagcggacaccctgactctcagaagcccccaacgcatcccgggacgagtgacagctattctgcccccagagactgcctcacacccctcaaccagacggccatgactgcccttttgtgaacacaatgtgaaagaagcctgctgtggtactgagcgtcgggctgtcacaaggcactggaagaagggagcctgctggtccagagtgtgcgtgtgtatcggtgtgtgtgtacacttgcatgtgtgtgtgtgatccagtaggatcctagagacaacctgtcatactgtttacaaaattgtgcagctggtttcgtgctgacccttagggtgcgtctgttgggttttgttgggctagaaaaatgaaaatttttagatggcgttttcattcctctgactgatattgagctgctttggtgttaaaggtgtaatgtgtacagagttgtatttaacaataataaaagtaacttaagtttgctct

SEQ ID NO: 1000 - DNA, 2192 bp, Homo sapiens
agatgcgagcactgcggctgggcgctgaggatcagccgcttcctgcctggattccacagcttcgcgccgtgtactgtcgccccatccctgcgcgcccagcctgccaagcagcgtgccccggttgcaggcgtcatgcagcgggcgcgacccacgctctgggccgctgcgctgacgctgctggacggccgcgggctctgcgcctacctgctgccagcgccgccagctccaggaaatgctagtgagtcggaggaagaccgcagcgccggcagtgtggagagcccgtccgtctccagcacgcaccgggtgtctgatcccaagttccaccccctccattcaaagataatcatcatcaagaaagggcatgctaaagacagccagcgctacaaagttgactacgagtctcagagcacagatacccagaacttctcctccgagtccaagcgggagacagaatatggtccctgccgtagagaaatggaagacacactgaatcacctgaagttcctcaatgtgctgagtcccaggggtgtacacattcccaactgtgacaagaagggattttataagaaaaagcagtgtcgcccttccaaaggcaggaagcggggcttctgctggtgtgtggataagtatgggcagcctctcccaggctacaccaccaaggggaaggaggacgtgcactgctacagcatgcagagcaagtagacgcctgccgcaaggttaatgtggagctcaaatatgccttattttgcacaaaagactgccaaggacatgaccagcagctggctacagcctcgatttatatttctgtttgtggtgaactgattttttttaaaccaaagtttagaaagaggtttttgaaatgcctatggtttctttgaatggtaaacttgagcatcttttcactttccagtagtcagcaaagagcagtttgaattttcttgtcgcttcctatcaaaatattcagagactcgagcacagcacccagacttcatgcgcccgtggaatgctcaccacatgttggtcgaagcggccgaccactgactttgtgacttaggcggctgtgttgcctatgtagagaacacgcttcacccccactccccgtacagtgcgcacaggctttatcgagaataggaaaacctttaaaccccggtcatccggacatcccaacgcatgctcctggagctcacagccttctgtggtgtcatttctgaaacaagggcgtggatccctcaaccaagaagaatgtttatgtcttcaagtgacctgtactgcttggggactattggagaaaataaggtggagtcctacttgtttaaaaaatatgtatctaagaatgttctagggcactctgggaacctataaaggcaggtatttcgggccctcctcttcaggaatcttcctgaagacatggcccagtcgaaggcccaggatggcttttgctgcggccccgtgggtaggagggacagagagacagggagagtcagcctccacattcagaggcatcacaagtaatggcacaattcttcggatgactgcagaaaatagtgttttgtagttcaacaactcaagacgaagcttatttctgaggataagctctttaaaggcaaagctttattttcatctctcatcttttgtcctccttagcacaatgtaaaaaagaatagtaatatcagaacaggaaggaggaatggcttgctggggagcccatccaggacactgggagcacatagagattcacccatgtttgttgaacttagagtcattctcatgcttttctttataattcacacatatatgcagagaagatatgttcttgttaacattgtatacaacatagccccaaatatagtaagatctatactagataatcctagatgaaatgttagagatgctatatgatacaactgtggccatgactgaggaaaggagctcacgcccagagactgggctgctctcccggaggccaaacccaagaaggtctggcaaagtcaggctcagggagactctgccctgctgcagacctcggtgtggacacacgctgcatagagctctccttgaaaacagaggggtctcaagacattctgcctacctattagcttttctttatttttttaactttttggggggaaaagtatttttgagaagtttgtcttgcaatgtatttataaatagtaaataaagtttttaccatt

SEQ ID NO: 1001 - DNA, 2266 bp, Homo sapiens
gtttacaccgccagcagaatcagggtctcccagcaaggagaccctaccacctcctgcagcaccccccaagcctggaaaactcaatctttctggagtcaaccttcctggagttctccaacaagggtgtgtgtcagcaaaagcccctgttctgagtgggcgtggaaaggactccgtggtggaatttccttctcctccatccgattctgattttccaccccctccacctgaaacagagcttcctctgccccccattgagattccagcagttttctcgggaaacacctctccaaaagtggcagtcgttaatcctcaaccacaacaatggtctaaaatgtcagtgaagaaggcccctccacccacacgacccaaacggaatgatagcacccgcctcactcaagctgagatttctgagcagccaacaatagccacagttgtgccacaagtgcccacctctcccaaatccagccttagtgtccagcctggattcctggctgacctcaacaggacactgcaacgaaagtccatcactcggcacggctcactctcctcccgcatgtccagagcagaaccaacagccaccatggatgatatggcattgcctccaccaccccctgaactgctgtctgatcaacagaaggctggttacggaggcagtcatatatcaggctatgcaacgttgcggagaggaccccctcctgctccccccaaaagagaccagaacaccaagctctccagagactggtagccaccataggactttattttcatgatatctgtaatcactgctacaatcagctcacctgatcatctgtgaattcaggtgttcagagcctcctggtatgatgttattcaggtagtgtccagctatatgtgtatgtgtgtgtgtacacgtgcatgtacacacagctgtacagtgtgtgtatatatgtatacatatatgtatgtgtatgtgtatatagagagagagctgagagttattctatttattccttttctctcctaatctgaaaatgggtgttctgtattttgggtggaagaggcatagaaggggatgtgtgttgtctcttaagatttctatatcatgtggattggaccaaaaacttctaatcacttatttagaaggtatttataagtgtctgtccatgtgtagcctattcgtgcatgttgtgtattatataactaaggaatagatgtagaatgtgctatttctggttgagaaaaatcaccagaatgtttggtgtatctataaggcttttgtgtttgtttttccccagttggctgaagttagaattgcttgactgacacttcattgctatacatgaaggggcactttaaatcaggaaaatctctcagcttcatagaacgggtaactagtgcaggatggggaaatgttcacagacatcatctgtatgtggttgtgcatagaaagtaaatacatggcgtaattaactcagctgttctagctgcagtactgctgcagtgatccacccacatttaggatgtgctgacagataagctctttgcctacaatacatggataattagtgctataattctggatagttcctttttagtactgttttatgaagctttatcaacttggcttcatgatcctcactttgattgattttaagaggatggataacacagttatctctgtaatgttctgtcccagtatgtctttgggtcaccagttaccttcttaaaatatgtgctttaggtaggtgttattacatatctgtagacaattggtatatgaaatatacacatcctgtgccccaatatggtgcattatgaaaaacaaaatcattttctaaaatgcattttttgagcattgctctatagaagggaagggtgatgagagaacagaactggcccctgtacaggtgtcattaatctggttgtatatgggttataatatgtaatacaaaaagctcattaagtatgggactacatggagagggaagacagtttcatttatagctactggggctaccaggacccttgctgactgcagcctggttgtgattagttcaggttactaggtgttctgatggagtgggacagtccaagtccagtaactgacattacgttttatgcgtgtgcagtttggtataacgtggagtcagtgctctaacgacacactatacttctatatgcttttttctgtgaattttccttggtacatgagagaaataagtactctcatcaacttatgataaattggactattaggaataaaacaatctcagagcagctcctaaac

SEQ ID NO: 1002 - DNA, 2286 bp, Homo sapiens
ttttgttggcattaaccacgccagtgctaaattggattttgccaataatgtccagctgtccttgactttagcagccctatctttgggcctttggtggacatttgatcgttccagaagtggccttgggctggggatcaccatagcttctagctacgctgatcacgcagtttctcgtgtataatggtgtctatcagtatacatccccagatttcctctatattcgttcttggctcccttgtatatttttctcaggaggcgtcacggtggggaacataggacgacagttagctatgggtgttcctgaaaagccccatagtgattgagtcttcaaaaccaccgattctgagagcaaggaagattttggaagaaaatctgactgtggattatgacaaagattatcttttttcttaagtaatctatttagatcgggctgactgtacaaatgactcctggaaaaaactcttcacctagtctagaatagggaggtggagaatgatgacttaccctgaagtcttcccttgactgcccgcactggcgcctgtctgtgccctggagcattctgcccaggctacgtgggttcaggcaggtggcagcttcccaagtattcgatttcattcatgtgattaaaacaagttgccatatttcaaagccttgaactaagactcaattaccaacccgcagttttgtgtcagtgcccaaaggaggtaggttgatggtgcttaacaaacatgaagtatggtgtaataggaataatatttatccaaaagatttttaaaaatagggctgtgtttaaaaaaaaaaacaaaacaagaaaagcagcagtgattatagagaggtcacactctaagtggggtcgcggcgtggccacgcttcacggtcacgctcgtccgtcctgcagtggcgtgtttacatggtcacacgtgtgtgtatcaccagtgggtcaactgcttgtcattcctcccgtggcagtttgtgtagacaatcttactgagcaaaaggcaatgaaaagtcttggttcccacactgcgatatattggaattttcacctcagtttatgaagtttatttcgaaatccatagtcatctaagaatgaatacctgtctgccatgtatttcaatcttagcgagccaaaattgtttgtttgttactacagaatagagatgactgttttttgccacagccctatggaatttgcaatctgtgattgccttgtaaaaaggagagtgcatatggcactgcattaaacgtgtggtgtttctagtcaatgatattggtgagcacaatgtattcatttaatggcatagaccataccagacctaatttgcaagtattgggtcttaaacttcaagtgcaatgtatatgaaaaccaatctgagccttgtatctcttaaatatttattttttttaacgtgtgagatgttcgagagaaggttctccattcatttcagtgctgcctggaggaaactcggcaatgatttctttcagttgtgaagttcctttcgtgttacaccctccactgaaccctcaaccttcgaaatactccagttttgtgggtttggtcatttttacttataaatttacctttttgtattttgcaatttacatgtgtttggtttgttttaaattctgtgaaagtggcttgattaaaagactccttttaaatggaagccaccagtcagcagaatggaagcttagaggaacttgcctgtgagcgctggtctttgtgtttggttttgtgatgtaacgatctttgctggggttttttgctttgttttgagggaaatgtcttggagtaaattttaagttcctggagttaatttgttttacaggaattttgttttttaaaaaaataggatcattctgaactttggaatgacccccttatatattttctgaaaatgaaaacagttacatgaaaaaaatttccaatgaagatgtcagcattttatgaaaaaccagaagttattagatgaaagcagcgagtgaatctttaaaacagacttgatcacgcacacacaataagtctttctctccgaaaccggaagtaaatctatatctgttagaaataatgtagccaaaagaatgtaaatttgaggatttttttgccaatagtttatagaaaatatatgaaccaaagtgatttgagtttgtaaaaatgtaaaatagtatgaacaaaatttgcactctaccagatttgaacatctagtgaggttcacattcatactaagttttcaacattgtgttctttttgcattcattttctacttttattaaaggttcaaaacc

SEQ ID NO: 1003 - DNA, 1958 bp, Homo sapiens
ctgagagcgcagcgcgccggccgctaccagccgcgccggagcccctgcgccctgcggcccgctccccggggaccgggccggcgccatggaccgaggccaggtgctggagcagctgctcccagagctcaccgggctgctcagcctcctggaccacgagtacctcagcgataccaccctggaaaagaagatggccgtggcctccatcctgcagagcctgcagccccttccagcaaaggaggtctcctacctgtatgtgaacacagcagacctccactcggggcccagcttcgtggaatccctctttgaagaatttgactgtgacctgagtgaccttcaggacatgccagaggatgatggggagcccagcaaaggagccagccctgagctagccaagagcccatgcctgagaaacgcggccgacctgcctccaccgctccccaacaagcctccccctgaggactactatgaagaggcccttcctctgggacccggcaagtcgcctgagtacatcagctcccacaatggctgcagcccctcacactcgattgtggatggctactatgaggacgcagacagcagctaccctgcaaccagggtgaacggcgagcttaagagctcctataatgactctgacgcaatgagcagctcctatgagtcctacgatgaagaggaggaggaagggaagagcccgcagccccgacaccagtggccctcagaggaggcctccatgcacctggtgagggaatgcaggatatgtgccttcctgctgcggaaaaagcgtttcgggcagtgggccaagcagctgacggtcatcagggaggaccagctcctgtgttacaaaagctccaaggatcggcagccacatctgaggttggcactggatacctgcagcatcatctacgtgcccaaggacagccggcacaagaggcacgagctgcgtttcacccagggggctaccgaggtcttggtgctggcactgcagagccgagagcaggccgaggagtggctgaaggtcatccgagaagtgagcaagccagttgggggagctgagggagtgggggtccccagatccccagtcctcctgtgcaagttggacctggacaagaggctgtcccaagagaagcagacctcagattctgacagcgtgggtgtgggtgacaactgttctacccttggccgccgggagacctgtgatcacggcaaagggaagaagagcagcctggcagaactgaagggctcaatgagcagggctgcgggccgcaagatcacccgtatcattggcttctccaagaagaagacactggccgatgacctgcagacgtcctccaccgaggaggaggttccctgctgtggctacctgaacgtgctggtgaaccagggctggaaggaacgctggtgccgcctgaagtgcaacactctgtatttccacaaggatcacatggacctgcgaacccatgtgaacgccatcgccctgcaaggctgtgaggtggccccgggctttgggccccgacacccatttgccttcaggatcctgcgcaaccggcaggaggtggccatcttggaggcaagctgttcagaggacatgggtcgctggctcgggctgctgctggtggagatgggctccagagtcactccggaggcgctgcactatgactacgtggatgtggagaccttaaccagcatcgtcagtgctgggcgcaactccttcctatatgcaagatcctgccagaatcagtggcctgagccccgagtctatgatgatgttccttatgaaaagatgcaggacgaggagcccgagcgccccacaggggcccaggtgaagcgtcacgcctcctcctgcagtgagaagtcccatcgtgtggacccgcaggtcaaagtcaaacgccacgcctccagtgccaatcaatacaagtatggcaagaaccgagccgaggaggatgcccggaggtacttggtag

SEQ ID NO: 1004 - DNA, 1946 bp, Homo sapiens
ttcctccgccttcaggaaggtcttttcagcaggggccttacgggtgcatgcttcggtcctggaggccttatcctagcctcctctccatcagcgccacccgtctggggcccgaaaggagggagctttccctctgtcccccagcctttggactgtcagcaaacaagccattcgttcatcaaatactttttaagcgcctaccatgtgcctgacaagggagatgtaacggtgagaaaaactaggtgtggtccaggcccttcaggggctcaggtgctcgtggaagaagtggacattgaagtacttatcacacaaatgaggataaaagtacgatagcgatatctaccacgaagctgttgttccccaccagaaccaaatgagcgcaagatctgacaaagaaaaaaaaaaggttcatcttttattcctccaaacactttcatttaaatcaagaggatgggatgtggttattgctgtgtttttagacagaatcaacggtttctgggtctgagatgttgcatacaccttctcagtccctgtatcctgagatggagtcacctgagaatccacagcaagtcctaaccagggatgggtctgggtgattaaggaaggttggcttcagaactgggccaggggcactgctttgcttttgctgttttgatcagctctctgcctgaaggagacaagaaaaaccaacgggaacagctggggaaactgagttacagagcttgtctgcactgagtcatcaggagcaaatgctagatcagatagggtctctctctctgccacccaggccagagtgcagttgacgcagggcaggggagccccgaagtggagcatagtgtgtccggaactggtgggttcttggtctcactgacttcaagaaagaagccgcggaccctcgcgaaactcctggagggcagaggcatgcctgccatcttcatcattgcattaccaccacccaacactatcgggggacctgccctgataatcagtctacaggtgtatccagcagctccagagagacagcgaccagcgagaaggggccatgatgatggaggtggttttgtcaaaacgaaaatggggatatgtagggaaaagaaagagagatcagactgttactgtgtctacatagaaagggaagacataagagactccattttgaaaaagacctgtactttaaacaattgctttgctgagatgttgttaatctgtagctttgccccagccactttgccccaaccactttgacccaatctggagctcataaaaacatgtgttgtatgaaatcaaggtttaaggcatgtagggctgtgcaggacgtgccttgttaaccaaatgtttgcaagcagtatacttggtaaaagtcatcaccattctctcatctcaataaaccaggggtacaatgcactgtggaaagccgcagggacctctgcccttgaaagctgggtattgtccaaagtttctccccatgtgatagtctgaaatatggcctcgtgggatgagaaagacctgacggtcccccagcgcgacacccataaaagatctgtgctgaggtggattagtcaaggaggaaagacttgcagttgagatagaggaaggccactgtctcctgactgcccctgggaactgaatgtctcggtataaaacacgattgtacatttgttcagttctgagatgggagaaaaaccgccctatggtgggaggcgagacatgtttacagcaatgctgccttgttatcctttactccactgagatgtctgggtgcagagaaacataaatctggcttacatgcacgtccagtcatagtaccttcccttgaacttcattatgacatggattctattgctcacgtttgttgctgaccttctccttattatcaccctgccctcctactacattcctttttgctgaaataatgaagataataatcaataaaaactgagggaactcag

SEQ ID NO: 1005 - DNA, 2072 bp, Homo sapiens
acacacgccgaagggctccgagggggtcaggccaatcggcagccgtcaccccacaccccagcccatcaccacactcaaggggccgctaagacagtgtctcctaagtctcgtctcctgtccccagcggcctacagctccctgcaggctggtggccgcttacctggccgccgctcccgctgccgatgtcagggtcatgcaagcggcctctcgcgaccgttacccgagggagcgcgcgcgcccggcgtctctccagtgattggctgcccggaaggaggcggagacagcctcgcatggcgcgcgcgtccacctcgccgttccccctcgcgcagctccaaccaaagagagacatccaaccccgggggagtgacaagggggcgggattgctgtgaaactctcttctctgattggctctctgggagccagccgctgccacgagggaaagaagcttcagtttctcgcatgcgcagtgagtaaacatgagcctctggtagataagagaaaccgcgatcggagtacggcgcgtgcgcagatcagggatcgcgattgcgaatcctccgctgaggtgatttggatatccctagaacgttgagggcacgagtcgggtcctgagaccaggtcctcagccagcagagccacgttccttatgagcaccgtgggtttatttcattttcctacaccactgacccgaatatgcccggcgccatggggactccggctttgggagaagctgacgttgttatccccaggaatagctgtcactccggtccagatggcaggcaagaaggactaccctgcactgctttccttggatgagaatgaactcgaagagcagtttgtgaaaggacacggtccagggggccaggcaaccaacaaaaccagcaactgcgtggtgctgaagcacatcccctcaggcatcgttgtaaagtgccatcagacaagatcagttgatcagaacagaaagctagctcggaaaatcctacaagagaaagtagatgttttctacaatggtgaaaacagtcctgttcacaaagaaaaacgagaagcggcgaagaaaaaacaagaaaggaaaaaaagagcaaaggaaaccctggaaaaaaagaagctacttaaagaactgtgggagtcaagtaaaaaggtccactgagaaaagaattagagattccaactgacagaatctgccagaagctcccagggaataatggtggcgagttccatcaccagcattattatagtgcttcaaaagaaatatttttgatgaacttaaaagacaacaaatttatttaaatggtgcactaaactgtagtgaacagagacatgcacgattcaagaataaaactcggccgggcacggtggacggtgcctcacatctgtaatcccagcactttgggaggccgaggcgggcggatcacttgaggtcaggagtttgagaccagcctggccaacatggtgaaaccccgtctctactaaaaatacaaaaaattagccaggcatggtggcgggcacctgtaatcccagctactcgggaggccgaggcaggagaattgcgtgaacctgggaggcggaggttgcagtgagctgagatcgcgccactgcactcaagcctgggcaacacctgggtgacagagcaagaccccatctcaaaaaaaaaataaaactaggtcaagtgcaatgacacacgcctataatcccagcaccttgggaggctaagacaggaagatcacctgagcccaggagctcaagattgcagtgagctatgaacaccactgcactccacctgtccacttgtccttgtgtgacagaacaagaccctgtctctaaaaaataagataaaaccataaagaaacacagtcagtactatacaagaataatggctacttctagagggaaggagttgtcattgtgatgaggcacttggaggggttctggggtgcctgacaaagttctgtttcttcacctgggtggtagttagaagggtgtccccgtatttcaaattgtacctttgtgagattgtatgttttgtaataataaaattttttttgtaattagtaaagtcaatttttatggagaactgg

SEQ ID NO: 1006 - DNA, 1866 bp, Homo sapiens
gcgcgagcgagggacgacggaagggacgggcaggtgtgggcgcggggccacgcagcccgacggcgggagtcgcaggtgctgggtgcatgggccagtgaggacgcacagagatccctcgccgcgcggaggaggagcagcgcgggagccaggcgctgccccaagaccctgcctgcgtccgagcgagcggaacctcgcgcttcgcccggggacaacccgaagtccgcgctatggaagaggagaaatatttgcctgagctgatggcagagaaagatagcctggatccatcttttgtgcatgcgtcgcgccttttggcagaagaaattgaaaagtttcaaggttctgatggaaaaaaggaagacgaagaaaagaagtatcttgatgtcatcagcaacaaaaacataaagctctcagaaagagtactgattcctgtcaagcagtatccaaagttcaattttgtggggaaattgcttggaccaagaggaaactccttgaagaggctacaggaagaaacaggtgctaaaatgtctatcctgggcaaaggatcaatgagagataaagctaaggaagaagaactaaggaagagtggggaagccaaatatgcccacttgagtgatgagcttcatgtattaattgaagtgtttgctccacctggggaagcttattcacgtatgagtcatgcattggaagagattaaaaaattcctggttcctgactacaatgatgaaattcgtcaggaacaactacgtgaattatcttacttaaatggctcagaggactctggtcgtggcagaggtattagaggcagagggatcagaatagctcccacagctccttcaaggggccgtgggggtgccattcctcctcccccaccacctggacgaggtgttctcacccctcggggaagcactgtaacccgtggagcgcttccagtgccacctgtagcaagaggtgtccctacccctcgagcccggggggcaccaacagtgccaggatacagggcacctcctcctccagcccatgaagcttatgaagaatatccatcattaccactttccttgttttttgatacggtggcaaaatctcaccagcattgtgataacgaagtaccacaaactggttcaaccagacttaacccaggacgaagcttttttttactggcatggaggtgggagtgggactgagttgttcatcaggattctgaacaataataagagtgttaccaaagaagtgaatcatatagaaaatgtcatccaagctactagttcatctcatttattgaaaaactgaatcatttaaaatcacaaaagagaaaatcaaggataatttaaacaacaggacaggaaaagatgaatgagaaatgaagagcagattcaaaaagtataattttgctctcaaactgacatcatttataaatctaagtgctttggctttttatgcttctacagtaaagtttgaactaaagaagaaaacatattttaaaaatttctgatcagctattttcatagacagctatttactagttattctatgtccaatatggttaccagtagccacatgtagccacttgtacctacttaaattgaaaggcggggcacggtggctcacgcctgtaatcccagcactttaggaggccgaggcatgtggatcacaaggtcaggagatcgagatcatcctggctaacacggcggaaccccatctctactaaaaatacaaaaaattagccgggcatggtggcgggcgcctgtagtcccagctactcgggaggctgaagcaggacaatggtgtgaacctgggaggcggagtttgcagtgagccgagattgtgccactgcactccagcctgggcgacagagtgagactccgtctc

SEQ ID NO: 1007 - DNA, 2811 bp, Homo sapiens
gcaggaagcggaggaggcgccccgggccggaccgcgctgccgcaggagcgaagcggctgcaggacaggacaggacccggcgctggaagctgcaccgccagcgcgccgcccctccgtccctccgccccgcggcgcaggaccccacagccgcccagcatggcccagcggcactcagacagctccttggaggagaagctcctgggacaccgcttccactcggagctccggctcgatgccggggggaacccagcctccgggctcccaatggtccgtggctccccgcgtgttagagacgatgccgccttccagccccaggtcccggcacccccacagcctcggcccccggggcacgaggagccatggcccatcgtcctgagcacagagagcccggcggccctcaagctgggcacccaacagctgatccctaagagcctggctgtggccagcaaggcaaagaccccagcccgccaccagagcttcggggcggctgtacttagcagggaggccgcccggcgggaccctaagctcctcccagcccccagcttctccctggatgacatggacgtggacaaggaccccgggggcatgctgaggcggaacctgcggaaccaatcctaccgggcggccatgaagggcctggggaagccaggtggccagggagatgccatccagctaagccctaagctccaggctctggctgaggaacccagccagcctcatactcggagcccggccaaaaacaagaagacgctggggaggaaacgtgggcacaagggttccttcaaggacgacccccagctctaccaggagatccaggagcggggcctgaacaccagccaggagtctgatgacgacatcctcgatgagtcctccagccccgagggaacccagaaggtggacgccaccattgtggtcaagagctaccggcccgcccaggtcacctggagccagctcccggaggtggtggaattgggcatcctggaccagctctccactgaggagcggaaaaggcaggaggccatgttcgagatcctcacgtcggagttctcctaccagcacagcctgagcatcctggtggaggagttcctgcagtccaaggagctgcgggcgaccgtgacccagatggagcaccaccacctcttctccaacatcctggatgtcctgggtgccagtcagaggttcttcgaggacctggagcagcggcacaaggcccaggtgctggtcgaggacatcagtgacatcctggaggagcacgctgagaagtacttccacccctacatcgcctactgctccaacgaggtctaccaacagcgcacgctgcagaagctgataagcagcaacgccgccttccgagaggccctgagagagattgagaggcggccggcgtgcgggggcctgcccatgctctccttcctgatcctccccatgcagcgggtgacccggctgcccctcctgatggatacgctccgcctcaagacccagggccactccgaaaggtacaaggctgccagccgtgcactgaaggccatcagcaagctggtgaggcagtgcaacgagggggcccacaggatggagcgcatggagcagatgtacacgctgcacacacagctggacttcagcaaggtcaagtccctcccactgatctccgcctcccggtggctgctgaagcgcggagagctgttcttagtggaagaaaccggactttttcgaaaaattgccagccggccaacgtgctaccttttcctgttcaacgatgtcctggttgtgaccaagaagaagagcgaggagagctacatggtccaggactacgcccagatgaaccacatccaggtagagaagatagagccgtctgagctccctctgcccgggggcggcaaccgtagctcctccgtgccccaccccttccaggtgaccctgcttcgcaacagcgagggccgccaggagcagctcctgctctcctcggactccgcgagtgaccgggcacggtggatcgtggcgctcacacacagtgagagacagtggcagggcctctccagcaaaggagacctgccccaggtggagatcaccaaggccttcttcgcgaagcaagcagacgaggtcacactgcagcaggcggacgtggtcctggttctgcagcaggaggatgggtggctctatggcgagaggctccgggacggagagacgggatggttccccgaggactttgcccgcttcatcaccagccgtgtggccgtggagggcaatgtccgcaggatggagcgtctgcgggtggagacggacgtgtagccctggcgaggccagccggcggcagcacagcctgtccccaatcagcaagtggtcgtgcctggctctagagagcgtggggagctggtctcaaggacccagcatggttccctggggcttcccaagagcctgtggctgtggtgccgggctccagacacttcacggaaggaagatcacatgtccccagagaggcacccccaggcaagctcgagggggccacaccgtgtcccagggagcccagcctattcccgttggctggctgggcccctctcagctgctgggccccacctccccactgcacccaggggacaactccacctggactgatgggcacaggaggcaccaatagcgattattgggggcaatgcgaggtctcctcctatgcccttcctacccctgagtgggacaagaagggccttgagtgcccaggagtgccccacgttctgagaaggggccggccggagggaggggacccggcagggagatttcggttttgaggtttctaaatacattaaagttatttcttaag

SEQ ID NO: 1008 - DNA, 2525 bp, Homo sapiens
atttcagcaccccaggctagtctgggaggctggcgcaaacgcagcgggtggctggggtaggggctcattgggagcccacggagcgcggcggcggctcgggggccgagttccctacaacaaggatggcggtgacgggcgcagggagcggggcccggctctccttgcctcgaggctcctctgattccactcgcgtggctgcgcggccctggcagcggccttcgtcccgggggtgggagctacacagggatccgccccgtcctggcgaggacgcctgagggggctctgtggtaaggctctgtcgggcaggccgggcttccgggaggacctggtctggatcggtcaccgctgggtgcctgagctccgcatggagcctgcagcctttgtttaacttataaagaaatgggggctccgagcagtcaagaagaacatgccccaagttattcgtcagtgaggcggaaattgtggtgtacttgtgtaagtttacattttatactttaccattatactgtgctccaaattatctgatatttactttcaaagtatgtgtaggaagtttactatgacgatgcagagacattgtacagaatccagtcccttgattctcaggtccccagaacactcacttcacaattttgttgaccttttctgtcaacttaaacctggcactctcttggctggctttctctgctctttctgggcactccaaagcttctgtacttacatgctacaactccagtcacaggaagatgctgagttctttagtcccagatccatattcctgagaaaacctaattgcctaggctcatgtcataactctgtatctgtttcagttgattatggctgggcctactgcccctctgtatggtggtggggcaaaagttcccagagagaggcaggggtgacagggactgttgtctcaaatgctaggcagacatctggagtggtaaccactacatctgttcacagtgagcacatccttgcagggaaactgggttaatcatctctattattgaaactcagaggtatagtgtttcttcataggaattttctttccttatttgagatgggggtctcactttgttgcccaggctggagtgcagtggtgtgtgatcttggctcactgcagcctcccctcccgagttcaagtgattctcctacctcagcctgctgagtagctgggactacaggcatgggccaacatgcctggctaatttttgtatttttcgtagagacaagttttcaccatattggccaggctggtcttggactcctgacctcaggtgatctgcccaccctggcctccctaagtgccgggatgacaggtgtgagccatcgcgcccagcctatttataggaattttctgtaggtatataagtaataatttgaaggtcccaactagatgccttttcgtgtaaccgtatcttgaatggaacattttctttctacgtaattatacataaataacccaatgctttttaatacccacgaaaaaccattagctcaaagacacttgcaaacttgtatcaggttgttctccttggtgtgtattaagtttgaaaaggggattttcagataccaagacgaagcagaagtcttccaccaagttgaaatcatcacgttgcaatttaatcatatgatacaaccaattttttgatgtgttatgccattcgccaaataccaaaaattttttaggggaaactttacatcctcaatactatacacttccagctacaccaccacctaacagagactttaaaaagaatacaaagtacggtatgccttctcagtgccttgttagtaattcagttacagttctgccgaactttctttaaaggaatacaattctcaatcttacaccgttcagagcacaagcatagcttattgtatacaagagatgtgcatcagttcccactcctcagggactgtatgaatttggctttttttttgacggagtctcactctgtcaccgggctggagtgcagtagtgtgatcttggctcactggactctgcctcccgggttcaagtgattctcctgcctcagcctcccgagtagctgggactacaggtgcacaccactatgcccagctgattttttgtgtgtttttagtagagatggggtttcaccatgttggccaggatggtcttgatctcttgacctcatgatctacccgctttggcctcccaaggtgctgggattacaggcatgaggcactgtgctgggccaaatttggttcttgtggcatctgtgtttctctttctgctctgtctctccccatatcctagtccaaacatccaaagaaattaattacctccaggagatcgagaccatcctggctaacacggtgaaaccccgtctctactaaaaatacaaaaaattagccgggcatggtggcgggcgcctgtggtcccagctacttgggaggctggggcgggagaatggcgtgaacccgggaggcagagcttgcagtgagccgagatcgcgccattgcactccagcctgggcgacagagcaagactctgtctc

SEQ ID NO: 1009 - DNA, 2195 bp, Homo sapiens
ctttttgcagtacctgctgcggccgctttcggcatggaggaaatttatgcgaagtttgtgtcccagaaaatcagcaaaacccgctggcgaccgctgcctccgggaagtttacagaccgcggagacgttcgctacaggatcttgggacaatgaggaaaattatatttcactgtggtctattggagattttggaaacttggactctgacggagggtttgaaggagaccatcagttattgtgtgatatcagacaccatggtgatgtaatggatttacagttttttgaccaggaaagaattgtcgctgcttcatcaacaggatgtgtaacagttttccttcaccatccagataaccagactctgtcagtcaaccagcagtggactacagctcactaccacacaggccctggcagtccttcctatagcagtgcaccatgtacaggtgttgtgtgcaacaacccagaaatcgttacagttggagaggatggtcgaataaatcttttcagagctgatcacaaggaagctgtaagaaccatagacaatgcagatagtagtacactccatgctgtaacctttcttcgaactcctgagattcttactgtaaattcaattggacagttgaaaatatgggatttcagacaacaaggaaatgagccttctcagatattgtcactgactggtgaccgagtgccactccactgtgttgatagacatcccaaccaacagcatgttgtagctactggtggccaagatggaatgttgagtatttgggatgttagacaaggtactatgcctgtatctctgctgaaggctcatgaagctgaaatgtgggaagttcactttcacccatccaacccagaacatctttttacctgctctgaagatggatccctctggcactgggatgcttccacagatgtacctgaaaagtcgtcactctttcaccaaggaggaagaagcagtacttttttgtctcatagcattagtaaccaagctaatgttcaccagtctgtcattagctcctggctcagcactgatcctgcaaaagaccgaattgaaatcacaagcttacttcccagtaggtctctgtctgtgaacactttggatgttttaggtccttgtcttgtttgtggaaccgatgcagaagcaatttatgttactagacatcttttttcgtagaagtactataattataagatttcagatagaacatgcaattagccttttgaaatccaacttctgtgcaaaattttagtatcagaaaatacgagatttgcaggggaaacatcagtaaactaccattaatgtcaatgcccagttttgacttttgttagcctgacactcccaaacagttgtagaatccgatagatgactgatggcaaaagattgtgaacatgtggaagaaaatcagtgggattctggtgctgatgaataggttgccttcagagtattattgacagacagcttgtggaactaattctttatttttgatgttgtgggaattaacacatcaatggtggttatgggaactaccaatgggttcctacaatttttatcagtagtatgtggcatatacaccttcctagtggcagttgccaatgttaatgattattctttttattgcaagtatttcctatgatccttccacactttatttccttaataataataaactttttcagaaagaattgagtagagcaaaaatgacaaagatgtgtagctgtgttcaatttttttttttttttttttttgaggcagagtcttgctctgctggagtgcggtggtgcaatctcggctcactgcaacctccacctcccaggagaattgctcaaacccgggaggcagaggttgcagtgacccgggatcgtgccacttcactccagcctgggcaaaagagcaaaacgccatctcaaaaaatatacatatataaggagataaagtttcccattttccaatacagtttcacatttgaacagccctaattgatacaactttatggcagggttttagtgtgtgagtgggatccaaaacactcaatcctgtaaaagggtacagtcctattgtatgttagttaacacactgatgatgtgagcctgtgagatgagccaatcaccagttgttatgttcgaatctgctttgtgttgggacgctttaatgtagggtttcactaaataaatgaattttcatatactgaactg

SEQ ID NO: 1010 - DNA, 2763 bp, Homo sapiens
acgtgtgctattccatcccacatggcggcgctcctgaggagactgctgcagcgcgagaggccttcggcggcctctggccgccccgtaggacggcgcgaggccaacctgggcactgatgccggggttgcggtgcgagtgcggttcgctcccagccccacaggcttcttgcacctgggtggcctccgcactgccttgtacaactacatctttgctaagaagtaccaggggagcttcatcctgaggctagaggacacagatcagactcgcgttgtgcctggggcagcagagaatattgaggacatgctggagtgggcaggcatcccgcctgatgagagcccccgccggggcggtcctgctgggccctaccagcaatctcagcggttggagctgtatgcccaggccacagaagcgctgctgaagaccggagctgcttacccctgtttctgctcaccccagcggctggagctcctgaagaaggaggccttgcggaaccaccagacgccccggtatgacaatcggtgcaggaacatgagccaggagcaggtggcccagaagctggccaaggaccccaagcctgcgatccgcttccgcctggagcaggtggtgccagccttccaggacctggtgtatggctggaataggcatgaagtggccagcgtggagggagacccagtcatcatgaagagcgacggcttccccacataccacctggcctgcgtggtggacgaccaccacatgggcatcagccacgtgctgcgaggctctgagtggctcgtctccactgccaagcacctgctcctctaccaggccctgggctggcagccaccccacttcgcccacctgcccctgctcctcaacagggatggcagcaagctctccaagaggcaaggggacgttttcctggagcactttgctgctgatggcttcctgcccgattccttgttggacatcatcaccaactgtggctcaggttttgcagagaaccaaatgggcaggaccctgccggagctgatcacacagttcaacctgacacaggtcacctgtcactcagccctgctggacctggagaagctcccagaattcaacagactgcacctccagcggctggtgagcaatgagagccagaggcgccagctggtggggaagctgcaggtccttgtggaggaggcctttggttgccagctgcaaaacagggatgtcctcaacccagtctacgtggagaggatcctcctgctgagacagggtcacatttgccgcctgcaggacttggtgtccccagtatactcttacctgtggactcgccctgcagtaggtcgagcacagctggacgccatctcggagaaggtggatgtgattgccaagcgtgtgctggggcttctagaaagatctggtatgagcttaactcaggatatgctgaatggagaactgaagaagctatcagaaggtctggaaggcaccaagtacagtaatgtgatgaaactccttcggatggccctcagtggacagcagcaaggacctcctgtagctgagatgatgttggccttgggaccaaaggaagtacgggaacggatccagaaggtggtttccagctagggagaggatgtgtcgggcagtggagatcgccctaagaacctgtgagcttagaaacagctttcagagaccagaaggaggcctggggcccgtcgggaagtttgctgaaggaactaagagtggaaacaatctctgactgcacacaagtgcatttgtgatccaccacaggcacgtttttgtcaattggctggggaagcccaacccatctaacctcctggactctggaaaggcattctccgggtctggtttctcacacattacacagcagaggtttggagttagttcacagaaaagttaacatcccggaacagtgcagaaggcttgggtttcagtttgctagggcccccataacaaaatgccacagaaccaggtggtttaaacagatttattttctcacatttggaggctagaagttcaagatcaaggtgtcagcaggcctggtttttcctagaggcctcttttgttggcttgcagacagctgtcttctcactgtgtccttgtgcggtcttccctccatgcacacacatctctagtttcattatgtgcccaacgttcctcttctaagaacaccagttggactggattttaactttaaccagcctcatttaagttaatcacctctttaaatgctcaatctccaagtgaaaggaggatggtggcagggtacatgaacccctaccaggcttctaggcttcccctgcatggcagccagcctctaagttggcccccaaccatccctgccttcttctattcacacccttgtgtggttccttcccacattgaataggcctgacttgtgtaaccactacactattgaagaaatgagagtttgacttctgagggtaagtcataaaatacatcgtggcttctgtcttgttttctttgatcgcttactttgggggaagccagcttccaggtcatgaaaatactcaagcagccttatggagtgctccacatgacaagggatggaggcctcccaccaatagccatgggagtgtgcaatcttgaaagctggtccttcaattccagccaagcattcacatgaccgcaatcctagctgatctcgcttgtgacctctatgggagaccctaagccagaaccactcagagaagctgctctggaacgtcagacacacatgaactgtgagatagtaaacgtttattgtttaaagct

SEQ ID NO: 1011 - DNA, 2124 bp, Homo sapiens
acacaggtaggagctcctaggaccaggctgaggcccagggacagtgaggccgaggctgggtggcctccaggccaagggcttgggccccatcctgagtctccaggacccaagggcaagagacgccaggcttgggcagcaggagggaggatctagacctgggcctgggtctgtccctgcccgaaatccatgccgagttcccttcccggcagccaggtcccccaccccactctggacgcggttgacctagtggaaaagactctgaggaatgaagggacctccagttctgctccagtcttggaggaaggggacacagacccctggaccctccctcagctgaaggacacaagccagccctggaaagagctccgcgtggccggcaggctgcgccgcgtggccggcagcgtcctcaaggcctgcgggctcctcggcagcctgtacttcttcatctgctctctggacgtcctcagctccgccttccagctgctgggcagcaaagtggccggagacatcttcaaggacaacgtggtgctgtccaaccctgtggctggactggtcattggcgtgctggtcacagccctggtgcagagttccagcacgtcctcctccatcgtggtcagcatggtggctgctaagctgctgactgtccgggtgtctgtgcccatcatcatgggtgtcaacgtaggcacatccatcaccagcaccctggtctcaatggcgcagtcaggggaccgggatgaatttcagagggctttcagcggctcggcggtgcacgggatcttcaactggctcacagtgctggtcctgctgccactggagagcgccacggccctgctggagaggctaagtgagctagccctgggtgccgccagcctgacacccagggcgcaggcgcccgacatcctcaaggtgctgacgaagccgctcacacacctcatcgtgcagctggactccgacatgatcatgagcagtgccacaggcaacgccactaacagcagtctcattaagcactggtgcggcaccacggggcagccgacccaggagaacagcagctgtggcgccttcggcccgtgcacagagaagaacagcacagccccggcggacaggctgccctgccgccacctgtttgcgggcacggagctcacggacctggccgtgggctgcatcctgctggccggctccctgctggtgctctgcggctgcctggtcctcatagtcaagctgctcaactctgtgctgcgcggccgcgtggcccaggtcgtgaggacagtcatcaatgcggacttccccttcccgctgggctggctcggcggctacctggccgtcctcgcgggcgccggcctgaccttcgcactgcagagcagcagcgtcttcacggcggccgtcgtgcccctcatgggggtcggggtgatcagtctggaccgggcgtaccccctcttactgggctccaacatcggcaccactaccacagccctgctggctgccctggccagccccgcagacaggatgctcagcgccctgcaggtcgccctcatccacttcttcttcaacctggccggcatcctgctgtggtacctggtgcctgcactgcggctgcccatcccgctggccaggcacttcggggtggtgaccgcccgttaccgctgggtggctggggtctacctgctgctcggattcctgctgctgcccctggcggccttcgggctctccctggcagggggcatggtgctggccgctgtcgggggtcccctggtggggctggtgctcctcgtcatcctggttactgtcctgcagcggcgccggccggcctggctgcctgtccgcctgcgctcctgggcctggctccccgtctggctccattctctggagccctgggaccgcctggtgacccgctgctgcccctgcaacgtctgcagccccccgaaggccaccaccaaagaggcctactgctacgagaaccctgagatcttggcctcccagcagttgtgacgggcagttgctgcgcagaccgccccaccctccccggctgggagggctctggagggccctggagggggggtccccgcggcagctgacctccggtcacctgcttccccttctgtgcaaataaaccaggctgttatctgg

SEQ ID NO: 1012 - DNA, 2248 bp, Homo sapiens
aacacatcaaaacggaaaaggaaatgtaagcagtgtttgccgtccaaagttcacatcaacaattccttattaggaaggcaattctgagcctttcctcctgcatctgggagctgccagcaacccagttccaggagagaaaatagcttgacacctcctgcggcccatggagtcctcccgttgggacaaggaccccccaggagagagaagaccccagcagagtcaacactggagggccagagaccatggtgcccggggctgtggaccacgccagcccacagccactgcaagccccagaccggggctgtggataacgccagcccacggcagccacacgccccagaccaacacgagaagaacgcaggccgacaacatcttcatctatgaatcctggctgatccaccatggaacccagatgtcctcagttctgcctcagcccccacttgtgagaggtccgtggcataacacaaactccccctgggattcgtgggcctcacgggggaagctgagggtgtgtccatgcaggaccccgaggctacacagctctggctgtttctcttccaaagccggcactgccctctctccatctctcccggtgccagggctcaggccccagcccccgtttctgcagaagcccctttccatcctagcccctgccacccctcctgctcttgtctctcccacacctcccaaactctctcctggccagctctcgccacactcagtcaatgtccactgggggcctcaggggcacctccacctgcccaggtctgggaccaccgtcctccacgcatatctacagaccctgtcctcacctgcatcacaccaatgatggcgtcacagcgtgggttccggtcaccagtcggcctcccccaccaacgtggactccttacaagcagagccaccaacgtggacacgatcccatcaggaaccacctacttttgcatccccagcactgtgctcaggtccagggaggccccagcaaactgtggaacaaccaaactcgtgactgaatgaacaagtatgttaagtcgttaagtaaaaatagcagaagacttagtagaatgtatgagtaacaattacaattatatgaaaatccgtatccacgtgaaggtattatgcaaaaaaagcttaactttgtttcagtgcctttccagttaaatgttgttaagcagtatttcccccaaaaggtgcatcttttataaaacaagaacgcaaggctctgaggccaactttgaacatttatttgagtgaattcacgtcccccaaattttccgtatcccaaaatctggacttttgctaaatggtgcccttagcacaggagtctctccaaggaagtggcctgagctgagagggggcctggcatcgcccacccaggtcatcagtcatcatcagcagcagctgcggcatgagagagatggtgtggggcgaaaccaatggggaaactacaaaagaaaccacctgctactgcaaacggcctcgctgtactcagggagtcggttccaggaccccatggacaccaaatccaggcacactcacgccccacaagtggacctgccgaacctgcgtgtacagagtcggccctccgacacacgtttcacatggcaggaacactgtattttctccctgagtttggttgaaaaaattcacatataagttgacccacaaagctcaagcttgtgtggtacaagagtcaactgtatgcaattgacactgattcctaccaacgatatccaaatcttagcatgagcagcacgataaacagaatgagcaaaattcaaaaactaaagcagcgtttttcctgcaagtgggcgcactgcgtatcccctgcgggaaagaccacgctggctgctgaccaaactccactggcatcttcctccatcctgagggcatcttcctcggcatcttcctccatcgacagcagcctgggctcacctcccagcccgaggctgagaactgagttccagtcccggggtggggtggcgggggggcgcactgtgcaccctcccagctctcctccaccccttccctcaggctggcccaagaatagcctggacaatcacctgctggggacaccgggctgcccctcctccgcccacagcctcaggccacctgtctcatccgtgaccgagaaacggagctgcagtgggaggcgggacatgctgggatctacccatggccaggccaagctgcgccaatcactcaagcttcactttgatcacttgctctaccaaataaaacagaacaaaat

SEQ ID NO: 1013 - DNA, 1998 bp, Homo sapiens
gtggctttgtctcccgcgaagaggagatggcggagtcgttgaggtctccgcgccgctccctgtacaaactggtgggctcgccgccttggaaagaggctttccggcagagatgcctggagagaatgagaaacagccgggacaggctcctaaacaggtaccgccaggctggaagcagtgggccagggaattctcagaacagctttctagttcaagaggtgatggaagaagagtggaatgctttgcagtcagtggagaattgtccagaagacttggctcagctggaggagctgatagacatggctgtgctggaggaaattcaacaggagctgatcaaccaaggtacaacctgagaatcacaagcggtgtggtggtgtgtcagtgtggcctgtccatcccatctcattcttctgagttgacagagcagaagcttcgtgcctgtttagagggtagtataaatgagcacagtgcacattgtccccacacacctgaattttcagtcactggaggaacagaagaaaagtccagtcttctcatgagctgtctggtaagcgtctcctgggacccactctgtggtaagagggacctgtggttggttttattcccaccttgatagaaataatgacctataaacaggtaagtgtttaatgcagtttattatctgaggaatttacctgcatagaaaagtgaaggtaacaagtcatttagactcaaaggccagtcagaaagaagggaagaggcagcatgggatcacggcaagaggattggtctgggagttaggacgcctggctccacacctgctcttctttgatcagtagtagtggttttggattcagctggtcatttcatagtcataagacccagataggccatgctggcaccacttttgcggaaggaaacagggcagaagcatagcagggcagcattaggtttgtctgtcagtggagtttttacagaggtccaagggctattcgctaacctgagtgacaactgaggtgtgagggccaggaacacaagtgggtaagggaaccacctgtcttagaagcgtgctataggaaccaatatctcttataatccatgtcctttccatatatgtgtatgtatgtatgtacatgtgtatatatatcacacaaacacacataaaaccaatatgatacgtattattattgcttttagatcccaggcagggggagccttgggattaggagcacactgtacttcaggaagttcatagccatggctttctactgggaatttagaattccttcatggccctgtcattccaaatgcagttaacctacagaggtcatttttattataagcagcattgcctggtaacagccatttcacctttatcaagtttcttccataggtattctactcattcattaaaaaaaaaatgaattgaggactcattaacattgagaaatacacatctctcacagagctcaagccttgggttggtaataagagaacagaataaacaggcagtaccctggagagctgtacaaggagggcttatgggagttcagaggagggtgatctcctttatggtgacaccttcctggaggaggcatttaacttggccttgaagcatggaatcgatctggacagacatggagatctggtgagttgtgggggtagagcttaagtggaagatccccacatagaagaacaaggcagagaagcaggaaactggagtatatacaaagagcatcttgttctacttagctggagcattaggttcatgagggagaggatagttcctgttaggaataggaaacagattcagagaagtgatgtaatctggccaaaattttactactaataagcgatagagctggtgttagaccccaggtctttgtggttccagtgcccctgctgtttcctgctccaggctcaggccttggtggaaggatgccattttccatcagcttgtatggaaagagacatagcaggtgaaagtttaaataaaacccctcactacttcctgttgactac

SEQ ID NO: 1014 - DNA, 2095 bp, Homo sapiens
attactgagaacagggcactgcatgcatgggacaggatgctttcatggagcccttcggtgacacacttggggtctttcagtgcaaaatatacctccttctcttcggtgcttgctcggggctgaaggtgacagtgccatcacacactgtccatggcgtcagaggtcaggccctctacctacccgtccactatggcttccacactccagcatcagacatccagatcatatggctatttgagagaccccacacaatgcccaaatacttactgggctctgtgaataagtctgtggttcctgacttggaataccaacacaagttcaccatgatgccacccaatgcatctctgcttatcaacccactgcagttccctgatgaaggcaattacatcgtgaaggtcaacattcagggaaatggaactctatctgccagtcagaagatacaagtcacggttgatgatcctgtcacaaagccagtggtgcagattcatcctccctctggggctgtggagtatgtggggaacatgaccctgacatgccatgtggaagggggcactcggctagcttaccaatggctaaaaaatgggagacctgtccacaccagctccacctactccttttctccccaaaacaatacccttcatattgctccagtaaccaaggaagacattgggaattacagctgcctggtgaggaaccctgtcagtgaaatggaaagtgatatcattatgcccatcatatattatggaccttatggacttcaagtgaattctgataaagggctaaaagtaggggaagtgtttactgttgaccttggagaggccatcctatttgattgttctgctgattctcatccccccaacacctactcctggattaggaggactgacaatactacatatatcattaagcatgggcctcgcttagaagttgcatctgagaaagtagcccagaagacaatggactatgtgtgctgtgcttacaacaacataaccggcaggcaagatgaaactcatttcacagttatcatcacttccgtaggactggagaagcttgcacagaaaggaaaatcattgtcacctttagcaagtataactggaatatcactatttttgattatatccatgtgtcttctcttcctatggaaaaaatatcaaccctacaaagttataaaacagaaactagaaggcaggccagaaacagaatacaggaaagctcaaacattttcaggccatgaagatgctctggatgacttcggaatatatgaatttgttgcttttccagatgtttctggtgtttccaggatcccaagcaggtctgttccagcctctgattgtgtatcggggcaagatttgcacagtacagtgtatgaagttattcagcacatccctgcccagcagcaagaccatccagagtgaactttcatgggctaaacagtacattcgagtgaaattctgaagaaacattttaaggaaaaacagtggaaaagtatattaatctggaatcagtgaagaaaccaagaccaacacctcttactcattattcctttacatgcagaatagaggcatttatgcaaattgaactgcaggtttttcagcatatacacaatgtcttgtgcaacagaaaaacatgttggggaaatattcctcagtggagagtcgttctcatgctgacggggagaacgaaagtgacaggggtttcctcataagttttgtatgaaatatctctacaaacctcaattagttctactctacactttcactatcatcaacactgagactatcctgtctcacctacaaatgtggaaactttacattgttcgatttttcagcagactttgttttattaaatttttattagtgttaagaatgctaaatttatgtttcaattttatttccaaatttctatcttgttatttgtacaacaaagtaataaggatggttgtcacaaaaacaaaactatgccttctcttttttttcaatcaccagtagtatttttgagaagacttgtgaacacttaaggaaatgactattaaagtcttatttttatttttttcaaggaaagatggattcaaataaattattctgtttttgctttt

SEQ ID NO: 1015 - DNA, 1986 bp, Homo sapiens
cagccagtggcccgtgcagtacgtgaacgggttgctgccatccagcgaaagcgtgagaagctgcgtaaagcaagggaattggaggcactcccaccagagccaggacctccaccagcaactgtgcccatggcccccggtccccccagtgtcttcccccctgagcctgaggagccagaggcagaccagcaccagcccttccttttccgccacgccagctactcatctaccacttcggattgcgagactgatggctacctcagctcctccggcttcctggatgcctcagaccctgcccttcagccccctgggggggtgccatccagcctggctgagtcccatctctgcctgccctcggcttttgccctatccattccacgttctggccctggaagtgacttttcccccggggacagctatgcctcagatgcagcttcaggccttagcgatgtgggagaagggatgggacaaatgaggagacccccagggaggaatctccggcgcagaccccgatcccggctgcgggtcactagtgtctcagaccagaatgacagagtggttgagtgccagctacagacccataacagcaagatggtgaccttccgatttgatctggatggggacagcccggaagagattgcagctgccatggtatataacgagttcattctgccttcggagcgagatggatttctcagacggattcgggagattatccagcgagtggagaccctgttgaagagagacactggccccatggaggctgctgaagacaccctaagcccccaggaggagccagcaccattacctgccctgcccgtccccctcccagacccatccaatgaagagctccagagcagcacctccctggagcacaggagctggacagccttctccacctcctcatcttctcctggaactcctttgtctcctggaaacccattttcccctggaacccccatttccccaggtcccatcttccccatcacttctcccccatgtcatcccagcccctccccattctcccccatttcttcccaggtctcctcaaatccctctccacaccccaccagctctccacttccattctcctccagcacacccgagtttccggtcccactctctcagtgtccctggagttctctccccacgacttctccacctacgttctctcccacttgttctcaggtcactcttagttcccctttctttcctccgtgcccctccacttcttccttcccctccaccacagcagcccctctcctttctctggctagtgccttctcactggctgtgatgactgtggcccagtccctgctgtccccctcacctgggctcctttcccagtctcctccagcccctcctagtcccctccctagcctgccccttccccctcccgttgctcctggtggccaggaaagcccttcaccccacacagctgaggtggagagtgaggcctcaccacctcctgctcggcccctcccaggggaagccaggctggcgcccatctctgaagagggaaagccgcagcttgttgggcgtttccaagtgacttcatccaaggaaccggctgagcctcttcccttgcagccaacatcccccactctctctggttctccaaaaccttcaacccctcagctcacttcagagagctcagatacagaggacagtgctggaggcgggccagagaccagggaagctctggctgagagcgaccgtgcagctgagggtctgggggctggagttgaggaggaaggagatgatgggaaggaaccccaagttgggggcagcccccaacccctgagccatcccagcccagtgtggatgaactactcctacagcagcctgtgtttgagcagcgaggagtcagaaagcagtggggaagatgaggagttctgggctgagctgcagagtcttcggcagaaaccctttcatgccctccgtgcatcctcaggcacttgtcagaggtggaaacactacagacactac

SEQ ID NO: 1016 - DNA, 2664 bp, Homo sapiens
agagcaggatggcggcgcgggacagtgacagcgaagaagatctggtcagctatgggaccgggctggagcctctggaagaaggtgaaagaccaaagaaaccaatccctcttcaggatcagactgtcagagatgaaaaaggaaggtataaacgattccacggggcctttagtggaggtttctctgctggatacttcaatactgttggctcaaaagaaggatggacaccctctacctttgtgtcttcacgacagaacagagcagacaaatctgttcttggtcctgaagattttatggatgaagaggatcttagtgaatttgggatagcacctaaagcgattgtcaccacagacgattttgcctccaaaaccaaagacagaatacgagaaaaggctaggcagttggccgctgctactgcccctattcctggagccaccctccttgatgacctcataacgccagcaaaattatctgttggtttcgaattgctaagaaaaatgggttggaaagaaggacaaggagttggtcctcgagtaaagagacggccacgccgacagaaacctgatcctggagtcaaaatctatggctgtgcattaccccctggaagctcggaaggatctgagggtgaagatgatgactacttgcctgataatgtgacctttgcacccaaagatgtcacacctgtggatttcacacctaaagataatgtgcatggtctagcttacaagggcctggatccccaccaggcactgtttggaacttcgggagaacattttaatcttttcagtggtggttctgagagagctggcgatcttggagaaattggactgaataaaggaagaaaattgggaatttcaggccaggcttttggtgtaggtgccctggaagaggaagatgatgatatctatgccacagaaactctatccaagtatgacactgttctgaaggacgaggagcctggagacggactctatggctggacagcacccaggcagtataaaaaccagaaagaatcagagaaagaccttcggtacgttggcaaaattttggatggattttccttggcttctaaacctttatcttctaagaaaatctatccacctccagagctgccaagagactatcgaccagtgcattatttcagacccatggtggccgccacctccgagaactcacacttactgcaggtattatcagagtcagctggaaaggcaacgcctgacccagggacacacagtaagcaccaactgaatgcctccaaacgggctgagttgcttggagagacgcctattcaaggttcagctacttcagtgttagaatttctgtcccaaaaagacaaagagagaatcaaagaaatgaagcaggcaactgacctgaaagcagctcagctcaaggccaggagtctggcccagaacgctcagagcagcagagcccagctctcccctgcagcggctgctgggcactgctcttggaacatggcattaggtggtgggacggccaccttaaaagccagcaacttcaagcctttcgccaaagatccggaaaagcaaaagcgatacgacgagttcttagtacacatgaaacagggtcagaaagatgctctggaacgctgtctggaccccagcatgacagagtgggagcgaggccgtgagcgggatgagtttgcccgggcggccctgctgtacgcatcttcccattcgaccttgtcctccaggttcactcacgccaaggaggaggatgactcagatcaggttgaagtccctcgagaccaagagaatgatgtcggggataagcagtcggctgtgaagatgaagatgtttgggaagctcacccgagacacgtttgagtggcaccctgacaagcttctatgtaagagatttaatgtccctgacccttatccagattcaactttagttggcttaccaagagtgaagcgtgacaagtactcagtcttcaactttctgacgctcccagagacagcttccttgcccaccactcaagcatcaagtgaaaaagtatcacagcaccgaggtcccgacaaatcaagaaaaccatccagatgggatacctctaaacacgaaaagaaagaagattccattagtgaatttttaagtttggctagatcaaaagccgagccacctaaacaacagtccagccccttagtaaacaaagaggaagagcatgcaccagaattatccgcaaatcagaccgtcaacaaagatgtggacgcacaggctgaaggagaagggagccgcccatccatggacttattcagggccatctttgccagttcctcagatgaaaagtcctcatcctccgaggatgagcaaggtgacagtgaagatgatcaggcaggctctggggaggccaacttccaaagctcccaagacactgacttgggggaaacatcatctgtggctcacgctcttgtgccagcaccccaggagccgccaccttccttcccgatacaaaagatgcagatagatgaaagagaagagttcggcccgcggctgcctcccgtcttctgccccaatgctcgtcagacacttgaggttcctcaaaaagagaaacataaaaagaacaaagacaagcacaaggccaagaaagagcacaggcggaagaaagagaagaaaaagaaacacaggaagcacaaacacaaaggcaagc

SEQ ID NO: 1017 - DNA, 2553 bp, Homo sapiens
ggggaaagactccgccgttcctttaaggaaccaggccgaaggcgggaagggagaggtgacggggccatcgggactgctaaaactgtatccagagcgtacccaggcggcccagggacccgggcgggcgcgggggatacggcgggaaaggaatgcaagagctgcggcttcacctgcgacagagaacctggcggctcctgcaacctcctcctcctcctgcgccgcctgcgcttggcgctgcaaaccgctgcaaaagccactgctgggaacgcggcgcaacccagagcccgctctttaagcgcggctgttagcaccccgggaggcagcgtagggatggggttgagatggaatgaaggtaatactttgtcttgagccaggggcaactaggatgcacaaaccccctctgcaaacagccagtgtacacaccctgcaaggaaggcgcgccacaggctgcaaagggagacacaggttcctccagcagcagtgggccatgggcaccgagcggggacacggggacgctgtagtggctctggggcctcaccctgcacttgcgtccgtccacggtctcctcctcaaagccttctccgaccttgaagttgatctcagtggtgcgcaccgtggtggatgtcttgatgtagaactgatccccgtcctggcggatctccacgtgcggcttggacgcagccgctacggccactttcctcagcatggcgttcacacctgcgcagggtgcaccacaggcttgggtcacggggcctcgccgccagtctcgggaccggtcgggcactggtcataccctaactttagaaaggggccttaaaattgatccactcgtttccctgccctcgcccttgttttcgagatgagagactgaggcacagagagggtaagtgactttccccgagttgcacagtgaattcgtggcagagcctggtcccaaatttgagtctccaaatttaagtccctgatcctccttgctctccagtaatctctcctcgctatgatctagcacgagataaagtccgcaccatcgaggagggcgccaaacattcagcaaacgttcgctgaacgcgtgggttccgggatctctaccagcttctccgagacccggtgcgcctgggagacaaggcgatctattgccccggggactccctcctgcctgggctccccaacttccaccccctccaggaccggggcacttccgggaccagggcacctccgggccgcatctccccgtcggggcgcgccctctgcaccagcttacccagtgccttgagcagctcgtcgaaattctcgctgctgcgcatcttccaggtgccggcgaagttgggcatggtggcggtggcggcggcggcaggtacggacagcggcggcgcagcgggcacactctgagctcgcaaggcggagactggcgctttgcgcccagcgctgcgcgccttgagtcactaggagagcgcccccaaccccgccgggcttctggccccgccccgccggccctgcccccgctcccccgcagcccctactcggtatgcgctcaactcccagcccagttgtgcctcagcctccagaggtgcgggcacccgctctccaactgaggagcctccacctccctcaggacacccacatcccgctttaaaatgggtggtgggagagggttagctgaaacaagatgggcttggaggggataactgttgaagctgggcggtgtggacttgggttatgattctacttttctctctacttttgaatatgtttgaaaatatccataacataaacttaaagtggatagcgagcggggccatcaggggatgggacccactctttttttcacctccggtcgtacctactgggtgtgcccagatggtgtcccttccctcccagtccgggatcctattctgaaaccctctccccgcatccccacgccccccacaggacccatggggagtgagtggcaggaaaccgcaacccccatcaacaccagcttgggcactgaggcgcgaatccacgagctgcgggtcctccgcgttccgagtgcaggagggggccagacctttgtcagggctcaggacaaactgtgggtcgagaggcatggactgaatcagctccagaatctgggctaggtgcggcctgttttgcaaaagcgtgaggctttgcactcttcgggcaggctgtgagggccaaggggaggaagtcttctccctttgctcccaaataacctaaacatcacgacctaaagtcccctcggtgtttccactaagggagtacaaacacttcactattacccttgtagctcttctctgtacattttccttccagctttttcccactattttaccatctgcacacctcagccaaactgtacaattcaggattctagaacgtgccatgcattttattatctctaagtttttgcccatgccatggcttcttccttgaatgcccctttcctcatcgggttaatcaaatcttgcccattcacgaaagcccatctttatgctctctcttttgtgaaattcagtttcctaataaactgtgattatttttctctgaattgac

SEQ ID NO: 1018 - DNA, 2907 bp, Homo sapiens
ttatgacacattccatactgtggctgacatgatgtatttctgccagatgctggcagttgtggaaactatcaatgcagcaattggagtcactacgtcaccggtgctgccttctctgatccaggtattgaatagttaagctgaagggtgggtaatggaaggtcccattatttgtctagtgggtatgtgtattagtccattttcatgctgctcataaagacatacctgagactgggcagtttacaaaagaaagaggtttaattggacttacagttccatgtggctgggaaggtctcacgatcatggtggagggcgaaaggcacttcttacgtggtggcggcaagagagaatgaggaagaagcaaaagcagaaactcctgataaacccatcagatctcgtgagacttattcactatcctgagaatagcatgggaaagaccggccgcactgattcatttacctccccctaggtccctgccacaacacgtgggaatcctgggagatacaattaaagttgaaatttgaatggggacacagccaaaccatatcattctagccgtggcccctccaaatctcataccctcacatttcaaaaccaatcatgccttctcaacagtcccccaaagtcttatttcagcattaaccccaaagtccacagtccaaagtctcatctgagacaaggcaagtcccttctgcctttgagcctgtaaaatcaaagcacactagttacttcctagatacaaggggagtactggcattgggtaaatacagccgttccaaatgggagaaattggccaaaataaaggggttacagtgcccatgcaagtctgaaatccagtggggcggtcaaactttaaagctccaaaatgatctcctttgactccaggtctcacatccaggtcacgctgatgcaaaaggtgggttcccatggtcttaggcagctccactcctgtgactttgcagggagcagcctccctcctggctgctttcaccggctggcattgagtgtctgcagcttttccaggtgcatggtgcaagctgtcagtggatctaccactttggggtctggaggatggcggcctcttctcacagctccactaggcagtgccccagtagggattctgtgtgggggctccaaccccatgtttcccttcctcactgccctagcagaggttctccatgagggccccatccctgcagcaaacttttgcctgggcatccaggcatttccatacatcttctgaaatctgggcggaggtttccaaacctcaattcttgacttctctgcacccacaggctcaccaccacgtggaagctgccaaggcttggggcttgcaccctctgaagccacagcctgagctatacattggcccctctcagccaaggctggagcagctgggacacagggcaccaaatccctaggttgcacacagcacagggaccctgggcctccgcgcctgtgatgggagggactgccatgaaggcctctgacatggtctggttacattttccccatggtcttggggattacattggggattacgttaggctccttgctacttgtgcaaatttctgcagccagcttgaggttctcctcaaaaaatgggtttttcttttctactgaatcatcaggctgcaaattttccaaacttttatgctgtttctcttttaaaacggaatgcttttaacagcacccaagtcacctcttgaatgcttttctgcttagaaatttctcctgccagataccctaaatcatctctctcaagttcagagttctacagatctctagggcaggggcaaaatgctgccagtctctttgctaaaatataacaagagtcacctttgctccagttcacctttgcttccaagaggttcttcatctccatctgagactacctcagcctggactttattgttcatatcactatcagcatttttgtcgaagccattcaacaaatctctacgaggttccaaacttacctacattttcctatcttcttctgagccctccaaactgttccaacctctgtctgttacccagttccaaggtcacttccacattttcgggtatcttttcagcaacatccaactttactggtaccaatttactgtattagtccgttttcccactgctgataaagacatacctgaaaccaggccgtttacaaaagaaagaggtttaattggatttacagttccatgtggcgggggaaggtctcacaattgtggtgcagggcgaaaggcacttcttacatggcggtggcaagagagaatgaggaagaaacaaaagcggaaacccctgataagcccgccagatcttgtgagacttatttactaacatgggaatagcacgggaagaccagcccccatgattcagttacctccccctgggtcccttccacaacatgtgggaattctaggagatacaattcaagctgacatttgaatggggacacagccaaaccatatctgtatgttacattttgctaagaagtctcaattagtaaaaacacctatttgtacaggaatagcattattttacctgaacaagaaagaacatttaaaaccccagggttatttaccaaagtagacttttactatttcaggtctttttcattttttataatatccttatgaaatcacgaagttataaagagctttaagactagggaaatttgactcttaggcaggagctgaaaaacctaccttcagtctccttagttagaaatgtatgtggtctcctcccacctaattggaagcgccaccctagcaatatcaaccattaaccttccctctacacttatcatcttcacaattctaattctactgactatcctagaaatcgctgtcgccttaatccaagcctacgttttcacacttctagtaagcctctacctgcacgacaacacat

SEQ ID NO: 1019 - DNA, 2455 bp, Homo sapiens
agtaagtgcagtaggtaggccaagataactattaagtatgtcctaacaaggtagctgcttgaaaaaaataatgcacataaattaaaaaaaaaaaaactattttcactcattcttaacttctcgtatggatgtactaacgggaggcctgtgcctgttgggctgtccacagctactcaaaccttgagattagattggacgctatctaatctcatttcctgttacacaataacttctgcatggcacttgcttttaatcatgacaactgccatacactcagctttacaaaatcatgtcattgtggaaaggaagttccctccatctaacattcaaatttaactatcctgagctggtagtttgcaaggtgtccaacagatgtcactgtgtttccttcgcaaattctctaaaatagtctgctgtgtcccggggcatagtagatattcaagaaatggtggctatgagttttatcacaattctctcctactgggtgagcagctgtttgcaagactaaaattcgggcgaggcacaggcttccccttggtcttagcagctagcacaagacgagtgtcccttcagccagtctcagagctctttggcaattcaactgacccttgtccttcagtccagacaatgccccagggcccacctgcattcaaactcggactgttctccttcccacccctattatcttttcaactttatggacagtacatgcaattttctcattcattttctcatttaacatctaacagcttcatgatatccccattttacagataaggaaaccaaggctttaagaggatagggaccctaatcggctaaggcagaattaggatttgaacccagatccccatgatgccagaatctaagccttgaccaaatatgtgttactattacttttgttgttgttgttgttctgggtaactccaaccctctgctcgttggccttgtcacctcagtgctgattttgcagatgaagagactaaggttccgaggtgctagagcacagtggttaggaacacacactctagagccagagtgcctgggtttgagcctcgttctgccgtttactagccgtatggccttgggcaacttgcttaacttctctttgcctcagttcctcttctcttgggttgttaggagaatgaatgaggtgatatccacagtgtccaacaccctgcaagcggccaggtgtggtggatcacacctgcaatcccagcactttgggaggccgaggcaggtggatcatttgaggtcaggagttcgagaccagtctggccaacatggcgaaacctcatttctactaaaaatacaaaaattagccgggcgtggtggcaaacaactgtaatccgagctactagggaggctgaggcagaagaatcgcttgaacccaggagacagaggttgcagtgagccaagattgcaccactgcactccagcctgggcgacagagtgagaccctgcctcaaaaactaaaaataaaaaatgaacagtgtccaacaccttgaaagcattccgcatgactgaacgatcactgttacgtgattaccaacatgacgaccccacttctcttggccaaactgagttctcttctcttgtaaaaacttctgcatatgaagtcacccattccatttgactctttagccctcatcctggcattcaagggcatggacgactcaaccccactctctagccagcctgacctctccattcccttctctggcgtagaggccactcccaccacctgcccttaccccctgcccacttttgtcagcctgtactgtgttgaagctcccaggagagacaactgcagtcatcactttccactgtgttcagtgatgtcagttcggcccagctggaggtattcacatcatggaaacagaccatcagatttggtgtgtgtgtgttttattttgctttttcagagagccagctgttaaacactagccaacaccccattgatgctgttccttctacctgaaacacctcgcattgccggtgagctctaaagacaaaaggacctgggtctgcatttcccaaaggcaagactctggtatcacctgcatattattttcccatatttgagcaccactgccttttgcattatttacttagcagttttgctcctgtcaactcacttttttaaaactaaacttattttaaaaagaaaagttttggccgggagcggtggctcatgcctgtaatcccagcactttgggaggccgaggtgggcagatcacctgaggtcgggagttcgagaccagcctgaccaacatggagaaactccgtctctactaaaaatacaaaattagctgggcgtggtggcgcatgcctgtaatcctagctactcgggaggctgtggcaggagaattgcttgaacccaggaggcgggggttgcagtgagtcgagatcgccccattgtactccagcctggggaacaagaacgaaactccgtctc

SEQ ID NO: 1020 - DNA, 2300 bp, Homo sapiens
ctctgccaggctcacgggacagctgcacctctcagcgtctccagctccaggacgcggtcgtcccaactccttccgagtggaaagagtgtaaaacttttgtccgtgcgcgggtggagctcagtaggaccacggcgcgtcctgccccggcttccccagcctcccagcagggttagctgcggtcagcgcactttccacttgggactcccggccagaaatttctcgggaatggagcggtcacagtgtggcagcagagaccgaggcgttagcggccgacctcacttggcccctgggctagtggtggctgcccctccgcccccgtccccggcgttgccggtaccatcggggatgcaggttcccccagcgttcctgcggccgcccagcctctttctgcgagcagcggccgcggccgccgccgccgctgccgccacctcgggaagcggaggctgcccgccggctcccgggctggagagcggggtaggcgcggtgggctgcggctacccgcggacgcccaagtgcgcccgctgtcgtaaccatggtgtggtgtcagcgctcaagggccacaagcgcttctgccgctggcgggactgcgcgtgtgccaagtgcaccctgatcgccgagcgccagcgcgtcatggccgcccaggtggcgctgcgcaggcagcaggcgcaggaggagagcgaagctcgggggctacagaggctcctgtgctcggggctctcctggccccccggtggtcgggcatccgggggcggcggcagagccgagaatccacagtccacgggcggccctgcggcgggggctgcgctgggactgggtgccttgagacaggccagtggttccgcgacccccgctttcgaatttttccagcaagattatcctgaggaaaaacaagaacaaaaagagagtaaatgtgagtcatgccagaatggacaagaagaactgatctccaaatcccatcagctttacctaggatcatcttctaggtctaatggtgtcattgggaaacaaagtatcgggtcatctatttcagaatactccaacaagcctgatagtatcctgtctcctcatcctggagagcaatcaggaggtgaagagagtcccaggtccttatcatcctctgatctggaatcaggaaatgaaagtgaatgggtcaaagacttgacttcgaccaaggcaagccttccgacagtgtcctcaagaccaagagatcctcttgatatccttactaagattttcccaaattacaggcgcagccggctagaaggcattctacggttctgcaaaggggatgtggtccaagccattgaacaggttttaaatggcaaagaacacaagccagacaacaggaacctagcaaactcagaagaactggaaaacacagcctttcagagagcttcaagttttagtcttgctggaattggttttggaactctaggtaataaatcagctttctctcctcttcaaactacttctgcttcttatggaggtgattcaagtctctacggcgtaaatcctagagtaggtatcagtccattaaggctggcatattcttctgcaggaagagggttatctggttttatgtcaccctacctaacacctgggttagtaccaaccttaccttttcggccagctttggattatgccttttcagggatgattagagattcttcctacctttccagtaaagactcaataacttgtggcagactgtacttcagaccaaatcaggacaatccgtaatgtatatgcccattctctctttctggagtttttccagcatacaatacatgcacgtgcacacacatacacacacatccattaatatacttcagtaagtatgtgagtggattatgaggtcttaaaatgctgggttttttttttcaagcaatataataggtcttagatctgaaaactcttcattaggatttatcaagtgaaagaagtaaatctgaacattatatgtgccttgaataaagctatttcaggaaatatttaatgaattttctccctaaattatcatttgtaaacatttttattttaaaactagtttttattttattgaaaagtggaatttttagtgataaaatacatttgtaagtgtaaagcaatacagcataatagaatagaatataaaccgaaaggaagaactgaacaattaaggcaattctatataattaccatttcaaaactgtttcttctattcctggttcataggaaagaaaaaagttattcaaagtatttttaaagcatttgatttgcagatgggtgattcgtaataaataaaacatttgagcattttg

SEQ ID NO: 1021 - DNA, 1676 bp, Homo sapiens
aggagagaaaatagcttgacacctcctgcggcccatggagtcctcccgttgggacaaggaccccccaggagagagaagaccccagcagagtcaacactggaggtcctgcggggtgggtggtgctggggaggccacacggggagggctgttccctgttcccttcccctcaggagacagctggcccgaggtgacacagcactggatgcgatttcagggccagagaccatggtgcccggggctgtggaccacgccagcccacagccactgcaagccccagaccggggctgtggataacgccagcccacggcagccacacgccccagaccaacacgagaagaacgcaggccgacaacatcttcatctatggagcctggcctgtcccccgtggctccacagcataccgcacatcaaaggcacgattctctccgaagccctcagtggcttcctagtatctgacagaagaaccaaaactgtggcaggcctgcgatggctgtggttgaggaaagaggccacacccacagccagcagaaccacactcagcagcagcctagccccacgtggaagaggcgtgaacactctcgggagaggtggatgtacgctaatggttctcagctccgacctctgtgattaacagaacatgctgattggttttatctgaacgtcacacaaaagggtttctatgtccaggaaagactctaaacactctggaccctgctggggcagatggtgaccgtgacccagtgataccactctccagtgggcagcctggtctgcagagggggagatccctggggcagccctacctcagcatgggtgagtttctgttgcaattctatgtccagtgtaaataaactgtggaaaactgggagatggtacaagaaagcaaggatgccaactaaatgaatagaaagatctacaagggaaggctgagatcagctgaaataggattgggaaagtaaaggcctggctggaacttcgtaatggcttttgaggctcgggaacagggacagtagctgccctgtccatcccaggagagaacagacggacatggctggaaagcacttccctgactaaaagtgtctttaaaaagggagatctcagaatctcctcccctggaatgctttaacccttcatggaacacagcagaaattccacagccctgcatcccaggaagcagggacaggacagcagcttccagcacacagaagcatttagaggcataagtagctacgcaaagacagcaggagccgtgcctcgaaaaggctgagatgtctgagaaataaagttgtacgcggatttacgcctgggcaggttgaaatgcgtgtgccatgacagatccggaagcttgtctactcgaaggtccacatccaggtatgtttcacagtcatcacaactagattttcagaaatttaaaactcctaatgaagaaacacaaacctgcacgtctcacgccaccacttaaggcagcggctctcaagcaggggcgattctactgggaggagggatgctgatggcaccagagggtgggaagcagggatctgacgcttagcaccgcaggtgccaaggacggcctcctccccacaagggctccgggaggccacaccagagggtgggaggcaggggtgacgctcagcactgcaggcaccgaggacagcctcctcccaggaggaaaaaac

SEQ ID NO: 1022 - DNA, 2404 bp, Homo sapiens
gtgatgggatggccctgtgcaggacgccgacacgaaaagatgaagagttcaatccgtgctgtctgaactcacagtgtagcaggcgagatagacgggaagatcggtagggtgggagatgccggaaaggcttcccgtgagactggataagaaatcaaaaatctggtgaaattgccggcaagagggagttaaggacattccaggcagaggcaagatgaagccagatactcctctatgaagttaaatgactggttcagtgttaacactgctagtgagcgacagagatggaatttgaacgcacacctgtctgactccacctcgtgttccttccacatggccagcaagctctgctgtcccacctcgcacttctgggaggtggctactccctctttccacccccttttctggatcttgacaagggattctaccctgccccagctgtcaaagcctgcagcagctgccaaaaaacctcaacacaggcatactttggacctacatcatgtgttgatgtcacagatgctgtaccaggcatttgactccttgacctaaagccaggattcctagccaacatggcgaaaccctgtctctactaaaaataacaaaaattagctgggcatggtgataggcacctgtaatcccagctacttgggaggctgaggcaggagaattacttgaacccaggaagcgaaggctgcagtgagcagagattgtgcctctgcactacagcctgggctatggagtaagactctgtctcaaaaaaaaaaaaaaaaaaaaatagtgagggggatgcatgcccacacaaaggaatcctgatagaggaacaatggcttggtccgtttcccctcctgtgtagcactgtgataaaggaaagcctttcagattcctaagatgaggacgcagcatcctgggccactgtcactaatacaaatttgcctctggagggactctacggaagataattcccctgaaatttggagagttgaattaagctaggactgattctggctggaatttgtggtggctacgtaccctagagggcctcaaggaaacccacggttcaagacagccctgacagattctggagtctagaacagaaatggatttgaacatgggcaaggccaaccacccagttcacggcctgtgtacagcaaagattacgttacagcctgagagctaagcctggaagctctttcatccatccgtttgtccatctatccatccatctgctcatccatccctccatctgctcaacaaacgttagagaatcaatccttgtgtcagatactggggctgccctcaaggagcttttatagagttcagggtacagccaggtgggggagacagatcactataaaaacctaccactataatccaaaggacaagagcaaaaatagtaaagaggagagaagacccaaatttgcctggtgggtcagagagggctttctagaagaggtaaaaaatcttcggggctatcacttcaccttgcctggtggataaagggaggactttccagatacagtggacagaatgtgcagaggcaggagccatgagtggcagaggcaggggagggactgcagagacaggttggagccaaagcacgtggcactggagccatagccaaaggaacaaactgtgagacctgggacttgaatttggaggtggtgaaaagtgacaaggtcttcacagaagagtgattttttcaacttagggaaggctgaccccagaccaatgctgccaaagtgtggtctgtgggctgttagcagttcgtgacgatgtaagtacaggaattgagattaagcatttagaacacctacagcactttgatagtcattttactttttaaattttgagctggcattttatatgcctggtttttttttgtttttgtttttttattttttttgagacagtctcgctctgtcgcccaggctggagtgcagtggcgcgatctctgctcactgcaagctccgcctcccgggttcacgccattctcctgcctcatcctcccaagtagctgggactgcaggcgcctgccgcctcgcccagctaattttttgtatttttaatagagacggggtttcaccatgttagccaggatggtctcaatctcctgatctcgtgatctgcccgccttggcctcccaaaatgctgggattacaggtgtgagccaccacgcccagccttattctctttttctaatagttgcactttatcatattttacaaatgtgtgagtctgctatggattagaaattaataagagattttgccacagatagtttgagaagcccagcactgccactcaacaaatgctggtgcattcagatggtgaaatattctgcagctattaaaggagttaaaactgcctccacttacctggaggcccatctgtgacacctttttaggtt

SEQ ID NO: 1023 - DNA, 1903 bp, Homo sapiens
aacggctagcctgaggagctgctgcgacagtccactacctttttcgagagtgactcccgttgtcccaaggcttcccagagcgaacctgtgcggctgcaggcaccggcgcgtcgagtttccggcgtccggaaggaccgagctcttctcgcggatccagtgttccgtttccagcccccaatctcagagcggagccgacagagagcagggaaccggcatggccaaagccgcggcgatcggcatcgacctgggcaccacctactcctgcgtgggggtgttccaacacggcaagggggagcgcaacgtgctcatctttgacctgggcgggggcaccttcgacgtgtccatcctgacgatcgacgacggcatcttcgaggtgaaggccacggccggggacacccacctgggtggggaggactttgacaacaggctggtgaaccacttcgtggaggagttcaagagaaaacacaagaaggacatcagccagaacaagcgagccgtgaggcggctgcgcaccgcctgcgagagggccaagaggaccctgtcgtccagcacccaggccagcctggagatcgactccctgtttgagggcatcgacttctacacgtccatcaccagggcgaggttcgaggagctgtgctccgacctgttccgaagcaccctggagcccgtggagaaggctctgcgcgacgccaagctggacaaggcccagattcacgacctggtcctggtcgggggctccacccgcatccccaaggtgcagaagctgctgcaggacttcttcaacgggcgcgacctgaacaagagcatcaaccccgacgaggctgtggcctacggggcggcggtgcaggcggccatcctgatgggggacaagtccgagaacgtgcaggacctgctgctgctggacgtggctcccctgtcgctggggctggagacggccggaggcgtgatgactgccctgatcaagcgcaactccaccatccccaccaagcagacgcagatcttcaccacctactccgacaaccaacccggggtgctgatccaggtgtacgagggcgagagggccatgacgaaagacaacaatctgttggggcgcttcgagctgagcggcatccctccggcccccaggggcgtgccccagatcgaggtgaccttcgacatcgatgccaacggcatcctgaacgtcacggccacggacaagagcgccggcaaggccaacaagatcaccatcaccaacgacaagggccgcctgagcaaggaggagatcgagcgcatggtgcaggaggcggagaagtacaaagcggaggacgaggtgcagcgcgagagggtgtcagccaagaacgccctggagtcctacgccttcaacatgaagagcgccgtggaggatgaggggctcaagggcaagatcagcgaggcggacaagaagaaggtgctggacaagtgtcaagaggtcatctcgtggctggacgccaacaccttggccgagaaggacgagtttgagcacaagaggaaggagctggagcaggtgtgtaaccccatcatcagcggactgtaccagggtgccggtggtcccgggcctgggggcttcggggctcagggtcccaagggagggtctgggtcaggccccaccattgaggaggtagattaggggcctttccaagattgctgtttttgttttggagcttcaagactttgcatttcctagtatttctgtttgtcagttctcaatttcctgtgtttgcaatgttgaaattttttggtgaagtactgaacttgctttttttccggtttctacatgcagagatgaatttatactgccatcttacgactatttcttctttttaatacacttaactcaggccattttttaagttggttacttcaaagtaaataaactttaaaattc

SEQ ID NO: 1024 - DNA, 1911 bp, Homo sapiens
ataaccatgaacttccatatctgtcataggaaagaggttggcctcagcagcaatgagggataattctttcaagaaaggaatgaagagagaagttagatggaaaagagatttttaaggtcaaaagaagcagctgaagaacatgtgtaggacagccttaggagttactacacttcaagacctgggtgtctgctggaggaaggaacatgaccctgcggagatgttaagggttgggagagctgagcttggaggctggaagcccagctgggaggctattgttaaagaggttgctgcagcaactggtcacacagtagtgttggtagaccagacagaggacatcctggcaaaatccaaaaagggaattgaggaaagccttaggaaagtggcaaagaagaagtttgcagaaaaccctaaggccggcgatgaatttgtggagaagaccctgagcaccatagcgaccagcacggatgcagcctccgttgtccacagcacagacttggtggtggaagccatcgtggagaatctgaaggtgaaaaacgagctcttcaaaaggctggacaagtttgctgctgaacatacaatctttgccagcaacacttcctccttgcagattacaagcatagctaatgccaccaccagacaagaccgattcgctggcctccatttcttcaacccagtgcctgtcatgaaacttgtggaggtcattaaaacaccaatgaccagccagaagacatttgaatctttggtagactttagcaaagccctaggaaagcatcctgtttcttgcaaggacactcctgggtttattgtgaaccgcctcctggttccatacctcatggaagcaatcaggctgtatgaacgaggtgacgcatccaaagaagacattgacactgctatgaaattaggagccggttaccccatgggcccatttgagcttctagattatgtcggactggatactacgaagttcatcgtggatgggtggcatgaaatggatgcagagaacccattacatcagcccagcccatccttaaataagctggtagcagagaacaagttcggcaagaagactggagaaggattttacaaatacaagtgatgtgcagcttctccggctctgagaagaacacctgagagcgctttccagccagtgccccgagtgcctgtgggaatgctctttggtcagacattccctcacacagtacagtttaataaatgtgcattttgattgtaatctatcgaagtgattattacaccagttacagcagtaatagattctccattaagaaataattcccttttttagtctgttcatttctgtgtattttctaaacagctttacacccttggtgccttggagcaaacatgttttttgaaccttgtcatttttgtgaagaattgcctagattccttctctcatcaacgggaaagtacttcctctgagagtgcgagtgcaccatgctcactgttgctgcgtgggagagtcacaagccactggcaagcaagtggtatagtctgtgaagcactgcagcgagcagcacctggatcttgcctttataagaacattttactacctgcagctttgagtcttgccctacattttgggcatgacataagatgtgtctttattcagctcgtcgtgaagatgctgctgctgaatgggtcagcatatctctgtttgcatggtttgcaggaggtcggttttcatggtcattcagttccacagatctgaatgattactgtctgtctgtgtcttttttccatgagaaatcactgttgcaaattgcctataaattgactctactaaaataacaatgtttcagtctgaaaatttgaattgaaaaaaatgtataatataaaattgtaatacactcaaatgattataaaagtaaaagttggtaatttaggcagaac

SEQ ID NO: 1025 - DNA, 3031 bp, Homo sapiens
agcagtcggcggacatggcgaccgcgctgctggcgggagagaagctgcgggagctgatcctgccgggcgcgcaggacgacaaggcgggcgcgcttgccgcgctgcttctgcagctgaagctggagctgccgttcgaccgggtggtcaccatcggcaccgtgctggtgcccatcctgctggtcaccctggtcttcaccaagaacttcgcagaggaacccatttactgttacaccccgcacaacttcacgcgcgaccaggcgctgtacgcccgcggctactgctggacggagctgcgggacgcgctgcccggcgtggacgccagcctgtggccgtcgctgtttgagcacaagttcctgccctacgcgctgctggccttcgccgccatcatgtacgtgcccgcgctgggctgggagttcctggcctccacgcgcctcacctccgagctcaacttcctgctgcaggagatcgacaactgttaccaccgggcggccgagggccgcgcgcccaagatcgagaagcagatccagtccaagggcccgggcatcacggagcgcgagaagcgcgagatcatcgagaacgcggagaaggagaagagcccggagcagaacctgttcgagaagtacctggagcgccgcggccgcagcaacttcctggccaagctgtacctggcgcggcacgtgctgatcctgctgctgagcgccgtgcccatctcctacctgtgcacctactacgccacgcagaagcagaacgagttcacctgcgcgctgggcgcgtccccggacggggcggcaggtgcggggcccgcggtgcgcgtgagctgcaagctcccgtccgtgcaactgcagcgcatcatcgcgggcgtggacatcgtgctgctgtgcgtcatgaacctcatcatcctcgtcaacctcatccacctcttcatcttccgcaagagcaacttcatcttcgacaagctgcacaaggtgggcatcaagacgcgccggcagtggcgccgctcgcagttctgcgacatcaacatcctggccatgttctgcaacgagaaccgcgaccacatcaagtcgctcaaccggctggacttcatcaccaacgagagcgacctcatgtacgacaacgtggtccggcagctgctggcggcgctggcgcagtccaaccacgacgccacccccacggtgcgcgactcgggggtgcagaccgtggaccccagcgccaaccccgccgagcccgacggcgccgccgagccgcccgtggtcaagcggccgcgcaagaagatgaagtggatccccaccagcaacccgcttccgcagcccttcaaggagccgctggccatcatgcgcgtggagaacagcaaggcggagaagccgaagcccgcgcgcaggaagacggccacggacacgctgatcgcgccgctgctggaccgctccgcccaccactacaagggcggagggggcgacccgggccccggccccgcccctgcccccgccccgccgcccgcccccgacaagaagcacgcgcgccacttctccctggacgtgcacccctacatcctcggcaccaagaaggccaaggccgaggcggtgcccgccgccctgcccgcctcccggagccaggaggggggcttcctgtcccaggcggaggactgtgggctaggcctggccccggcgcccatcaaagatgctccgctccccgagaaggaaatcccgtaccccacagagccagcccgggcagggcttccctcggggggcccgttccacgtccgctcacctcccgccgcccctgctgtggcccctctgacaccagccagcctgggcaaggcggagcccctcaccatcctgagccgaaacgccacacacccgctgctgcacatcaacacgctgtacgaggcccgggaggaggaggacgggggcccccgcctgccgcaggacgtgggggacctcatcgccatccctgccccacagcagatcctcatcgccaccttcgacgagccgagaacggtcgtgagtactgtggagttttgagggatggcaccgtccaggctgccgagagcccctctgcctgtgtcgtgtggcctggccagcctcccggtggacaccagccctgcgtggacgtggcctgtgcttcgcccgcactgcgcgcatccccaacctctgtccgcatgcctggggccttcgcccccacgtgctcgacaggggaacccgcccggacggcatcgccaggcactggctggggtggggaaaggtggcccagtggagccggtggccaggaaggctgaagcccgcttcccatgctcctgcatcaggtgcccagccgtgggtgggggccctgaggtgaagagtttatttttttagtccgtttcgtcctggccccgggctgtggcgagacagcccaactcccccagcccagctcccccagcccagagccagggaagaggaaggtggggccagtcccaccagtggggtggccacgcccatggggtcacatgctcaggggtcaccccctgcagggacctgatgccctcgggtgggagggaccgaggtccaccctcgggtcaaaggtcaacgtgcactttctccttgtcgcctgacagacgttttattttactaagactgctgtaccgaacaagcatatttatcatcaggagacaggatgggtttaaagcaggatggtgtgtgtgtgaacgggcatgagcagaggtgagcgtgagcgagcgggtgtgtatgtacgagtgtgcacgtgtgtgcgtgtgcacagagggtgtggtgccagcttgagtgggagtgtgtgagtgtgagcaggcgggcgagtgcgtgagtgcacgccagcgcgtggcccatgtatgaggagtgaaggggcccaacgcaataaccacgtcccccacccgggccccccgccgcggctgaggccacatggcttcctgtgggagccccggccggcacccggctggtcccaccctaaatacctcagccatggagaccatgtcatgcagaattaacaaggtagcaccgagcatatcaataaatattattctgat

SEQ ID NO: 1026 - DNA, 2190 bp, Homo sapiens
ggcaccgcgagcacgccagctctctggcaggacccctgcagtccccctggctgtgccaggtaaccaaccgtcttggtttgtccaggacgtttctttatcccaggaaactcctctaccccaggcacacggggacagtgggtcactctatttctgtggatggccgtgaaagttttcactaactcaaggggcagccctgaacacccatttgtgctcacaggttggccaagagcagcttagaggatctcccaaggatgaaagaatgtcaagccatgatggaaaatgccccttccaatcagctgccttcacaagcagggatcagagcaactccccggggatccccaatccacgcccttctagtccaacccccctcaatgagagaggcaggcagatctcacccagcactaggacaccaggaggccaggtaactttctgcagcttttccatagaagccctggtcccacctccttggctctaccccaggaacctcccggcctgggcttctgggctgggacgtgctgaggtcatcccagacaggagggagggctggctgaaatccacaaactgcagagcagctctctgatggtgtcccacacagaaaatgttaaggatttcaagagccctcccagaccagtgatgtgtccctccggctccccttgcctgtggggaatcgggtctgagtcacttgatgagtaggcactggagccgttacccaggatgctgcggccctagccctccatgcagcccatcttccctcatttgggtggaggcacacatttggggcaaaggccccttcttggcatcaaggaacaccagctacaaaccaagtctagcacagtgtttagaggctctgccctgaggttctgctccggagaaaccttcacagtagagaccttggggtgtgtgctttgggactccctcagtctctcactgtgctgtgtccttgcagcggggccgaggtagcaccctgctctgtcacttcctgctcaagctggaggacccaggcggcagggcatcatgcccagctggcatctgctgtctgtcttttctagggaaagcatctctggctcaccatgtaacatctggcttggagcaagtgggtgttctgcacaccaggcagctgcacctcactggatctagtgttgctgcgagtgacctcacttcagagcccctctagcagagtggggcggaagtcctgatggttggtgtccatgaggtggaagctgcttttatacttaaaactcagatcacaacaggaaatgtgtcagtaacaatggaactccatccaatgggaaagttcctggtactgaaggggtccactggacactcagaaaagaagttcaggggccaacttcttagctggaatcctggccagatgaggaccctctccggggaagggagaggactgacttagtggaaggtggtgaagtgaggagagtttaggggaaccttcccccagtggaacagatctcaagtttaccctaaacctgccatttctggaaaatctgtaaagaggaaacagcctgtctcagctgtactctcatgatacaggtcatttgaaatgaaccaagaaataaaacatgaaaatccaaccatggagaaggtggtatggctgggttttgtttggtccccttgtccttatacgttctaaagtttccagactggctttgtcactttgtgaactcgtcatgtgtgaaaaccaatctttgcatatagggaacttcctcgggccacactttaagaaccaagtaagaggctctcaagactccagcagagtcgggaggccatggcagcgccttagaggagctggaacctgcacccacctgtgtcggtggggggggcctcctttccccatagactctgccctccctctgtgcagatggaagtggcaggggagggtgaccagcttgtgacaagaagactgaagggtccagagtccatgctcacggaacagcaccaaagaaaagcactatgtggaaagattgttttattttctaataatgataatatggctggaatggcttcttaagatgtatatattttttaaaatggcagttccccattgcagcatcacctacttgtatgtctttctgcctctgtatatgttctcccagaaacccccatgtaaatcaaatgccctaggatgcttccatcctggtcccatgtatctggaatctaataaataaggaaagg

SEQ ID NO: 1027 - DNA, 2528 bp, Homo sapiens
gagtgctagccagccctgggaggctccgctgccagaagggacgtcaaggggcctgcgatggagcctgcagccccgggtcgcgtccctccctgagcgcccccgtcggcggccatgctgccccgagggcgcccccgggcgctgggggccgccgcgctgttgctgctgctgctgctgctcggattcctcctgttcggtggggacctggggtgtgagcgccgcgagcctggcgggcgagcgggggccccgggatgcttccccggcccgctcatgccacgtgtccccccagacgggaggctgcggagagccgccgccctcgacggagacccgggggccggccccggggaccacaaccgctccgactgcggcccgcagccgccgccgccgcccaagtgcgagctcttgcatgtggccatcgtgtgtgcggggcataactccagccgagacgtcatcaccctggtgaagtccatgctcttctacaggaaaaatccactgcacctccacttggtgactgacgccgtggccagaaacatcctggagacgctcttccacacatggatggtgcctgctgtccgtgtcagcttttatcatgccgaccagctcaagccccgggtctcctggatccccaacaagcactactccggcctctatgggctaatgaagctggtgctgcccagtgccttgcctgctgagctggcccgcgtcattgtcctggacacggatgtcaccttcgcctctgacatctcggagctctgggccctctttgctcacttttctgacacgcaggcgatcggtcttgtggagaaccagagtgactggtacctgggcaacctctggaagaaccacaggccctggcctgccttgggccggggatttaacacaggtgtgatcctgctgcggctggaccggctccggcaggctggctgggagcagatgtggaggctgacagccaggcgggagctccttagcctgcctgccacctcactggctgaccaggacatcttcaacgctgtgatcaaggagcacccggggctagtgcagcgtctgccttgtgtctggaatgtgcagctgtcagatcacacactggccgagcgctgctactctgaggcgtctgacctcaaggtgatccactggaactcaccaaagaagcttcgggtgaagaacaagcatgtggaattcttccgcaatttctacctgaccttcctggagtacgatgggaacctgctgcggagagagctctttgtgtgccccagccagcccccacctggtgctgagcagttgcagcaggccctggcacaactggacgaggaagacccctgctttgagttccggcagcagcagctcactgtgcaccgtgtgcatgtcactttcctgccccatgaaccgccacccccccggcctcacgatgtcacccttgtggcccagctgtccatggaccggctgcagatgttggaagccctgtgcaggcactggcctggccccatgagcctggccttgtacctgacagacgcagaagctcagcagttcctgcatttcgtcgaggcctcaccagtgcttgctgcccggcaggacgtggcctaccatgtggtgtaccgtgaggggcccctataccccgtcaaccagcttcgcaacgtggccttggcccaggccctcacgccttacgtcttcctcagtgacattgacttcctgcctgcctattctctctacgactacctcagggcctccattgagcagctggggctgggcagccggcgcaaggcagcactggtggtgccggcatttgagaccctgcgctaccgcttcagcttcccccattccaaggtggagctgttggccttgctggatgcgggcactctctacaccttcaggtaccacgagtggccccgaggccacgcacccacagactatgcccgctggcgggaggctcaggccccgtaccgtgtgcaatgggcggccaactatgaaccctacgtggtggtgccacgagactgtccccgctatgatcctcgctttgtgggcttcggctggaacaaagtggcccacattgtggagctggatgcccaggaatatgagctcctggtgctgcccgaggccttcaccatccatctgccccacgctccaagcctggacatctcccgcttccgctccagccccacctatcgtgactgcctccaggccctcaaggacgaattccaccaggacttgtcccgccaccatggggctgctgccctcaaatacctcccagccctgcagcagccccagagccctgcccgaggctgaggctgggccggcgctgcccctcatcttagcattgggcagacaccagggcaacctgccctccgccatccctgctatttaaattatttaaggtctctgggaagggctggggcagagcatctgtggggtggggtcttccccttgctgctattgtatggctggggactggtctctctctgccccagccagtttggggctggttcccccatcttgaattgtttatccctttttcataattaaagttttaaaacatc

SEQ ID NO: 1028 - DNA, 2715 bp, Homo sapiens
aagatgctgaaacaagaggaaatgggtttacattgaatggacagagagagagttcaggaggcctacgagtagactggctggcttggcgggtaatgtacttaaatgaaattaaacccagcacaaagaaagagaaggaggctgaggctgaggctgggaaaggccaggctgtggaggaccagggctggtctcaaactcctgacatcgggtgatccgcctgcctcggcctcccaaggtgctgggattacagacttgagccactgcacccagctcctgatcatgaggaagtgtttgcccctctggaggacacagcaacaaggaccatcttggaagcagagacctggccctcaccagacaccatacctgccggcaccttgatcttgaacttctcagcctccagaagtgtttcccaaggccctgtcactgggccaggcacacagcagatgctcagtaaacactcctggaatgaatggagaacatattccacaagcatgctttgagcattgtttatgccaggaattgacttcaaacagaatccggaggagccccttatggtcccgctgccacaaacaaggcccagagagcgcaactctgcccagcccagcaccaggtttttggcctccccgccggcccgaggcacatcggcttcgatgtgccaggcggtgggcgaggaagtggaggttccagctcggcaaagcttaggctgaggctgaggatgggctagagtcaagtctacgtgtgcagccttactcagggagacgcctctgcgctgcaacctcatgcccgggagggcaaggctgggctagggcgggggatcgcgaggggcttggctgggaagaggactgcaggagaggtgtcccaactctcccctcgctcgccaggcacacagcacgcgcctactcggtgctggctgcatagaagcccagggagctcgggccgatctcccagtctggttgccaccagactgggtggcaggagcttctagacctggaggctggctcagtcgtgtggtcacgacgggcgggggagtggaagggcgctggcgcgtggtttcggcagccgacttggcgaggccgcggctggcgggaaccacggatgggggaggcgcccatgcaccgaccccacctgggccactgggaaaccgaggtagtccctcctggcactggggtcgcccccacacacctccccagaaggagatgtagggtctgtttctgaactgagacccgcccccgagtagggcgcacactcagcagagaccctccacacccaagcccctgggaggggatcttttttgcacacctccctcccacttatgccccctctcaaccctgcatagacctttctcaaaaaggcgcccgttggttcccataaccctccccctcccccaggatggagacccctgatgggagataggggtggtgagagggggcgggcgcaaatgaagatgcgcgcgaccaggaccacctcttgctgtcacccgccacgtccccagcatctggaccgcgtcccccggcccgccacgcgcgcacacacacacacacgcgcacacacacacgctcacactcaccctgcgcgcagaccccgcccgcggccccgccccggcccctgcgggcgccccctctggcgttcccgggcggcgggaggctgcggcttcgggcagatttgattttcccgcagcccgggcgccccggagccgaagcccgagccgaggaggtggcgctcgcagccgcgtctcagccccgtcgccgccggcgccaagacccagggagaggcggcgcagcccgggcgctcgggctccgcgctgccggcgccccgccacccccgccgccagcgccccatccggcgcctcccgctcctcacgcccctctccctgtcttctgcatccagaccgcacggaacctcctggacaaagacatgttttccaagtccgacccactgtgcgtcatgtatacccaagggatggagaacaagcagtggcgggagtttgggcgcaccgaagtcatcgacaacacgctcaatcctgacttcgtgcgcaagttcattgtggattactttttcgaggagaagcagaacctccgttttgatctatacgacgttgactctaagagtcctgatttatccaaacacgatttcctgggccaggccttctgcacccttggagagattgtggggtcccctgggagccgcctggaaaagcccctcacgataggcgcattcagcctgaattccaggacgggcaaacccatgccagctgtgtccaacggaagtggtctttggatggaaagtttgagaaccactggtctggaagcctccggtggtgtcccaggaaagaaatgtggcaccatcatcctgtccgctgaggagctcagcaactgtagggatgtcgccaccatgcagttctgtgccaacaagctggacaagaaagatttctttgggaaatctgaccccttcttggtattctacagaagcaacgaggatggaacgttcaccatttgccacaagaccgaggtcatgaagaacaccctaaatccagtctggcaaactttctccattcccgtgagagccctctgcaacggcgactacgatcggaccatcaaggtggaggtgtatgactgggatcgggacggcagccatgacttcattggggagttcaccaccagttaccgggagctggcccgtgggcagagccaattcaacatctatgaggtggtaaacccg

SEQ ID NO: 1029 - DNA, 1920 bp, Homo sapiens
atttcctgccggtgcctagggccgacggggacgctggcactggtggggagctgttggggggtcccgcatctagggctctcctttcctgcctccggcccccgcgaggggcgcgcgcctctccccgccctccagcagtcctggtagggcccgggcgcgtccgcgctctgcagcgggaggtcctcgtcgcctctcgtctccagccagcaccaagaggatggtggcccttggcctcctggtgcagagcatcagtcccacgctgggagtgtggagaggtgcgtgggaagcaagccattgaggaagtggggccaacagagaggtcagcagccccttagccctcacgcttccaaggaacagaacgatggagaagcctgcaggcagaaaaaagaagactccgaccccaagggaggaggcagacgtgcagaagagcgcgctcagagaggagaaggtgtccggggacagaaagccacctgagaggcccactgtgcccaggaagccccgcacagagccctgcctgagtcctgaagacgaagagcacgtctttgatgccttcgacgcttcatttaaagatgactttgagggggttcccgtgttcattccttttcagaggaagaaaccctatgagtgcagtgagtgtgggcggatctttaagcacaagacagaccacattcgccatcagagggtccacactggagagaagcccttcaagtgtgcgcagtgcgggaaggccttccggcacagctctgacgtcaccaaacaccagaggactcacacgggagagaagcccttcaaatgcggggagtgcgggaaagcctttaactgcggctccaatctcctgaaacatcagaagacgcacaccggggagaagccctacgaatgcacgcactgtgggaaagcctttgcctacagctcctgtctcatccgccatcagaaacgccaccctcggaagaagccctgagccggggccatctgcggactcgggccctgcggtgcgagcctcgccggacacctgctccgtggctccctcgtgtcccgcgtctgatgggggcgcagggccgtgcgcactgtgttccgtgccctggggacccccggaaaagcagcccagtcagatgtgggaacgtgccagcgagggagagacctttccactgcagagagtctctctgatcaagacaccgcagtgatggagaagccaccagaggctccttgcagccacagagcatttaccaagttcccgatggcgaacggggctcagcaccagagaccagggagtattcactgccatccattggacgtgtttgggtcacctcagagcacccagcaggagaggctcctggtgtagtgggcagcccagcacttcccgctgctgcctgcctgtgatgtccactctgcttaagcctttcatctgccgctgaaggccccagtctggactctctgccctctgggtccccgagctctgcagcgagccctgggaccactcatccctgcccagccagcttcagtgcccggggccgcttgtccctgcccggcctctgtgccccaactgtgcttggtcctctggcttctctcctcctgctggagtgccagtccctgagctcagacccccgtccccggaactgggccacaccacgtgccctcttggcccagccttcctcccagagaggcggcctgacttacctggatggacttgggacaaaggttcctcaggaccttggacaccaccacctgctgagcttcccgtcccagccatgcagtggggcccctggggtgccctcggcagcttcggtccagcctgcatctgcccctcggccttccgacgtgggcggtgggccccagccccacagaccagcccagcattcaggctggtagagcagatcacccccaaagcaagaagttccagatgaaatatgcataagaagcagcctc

SEQ ID NO: 1030 - DNA, 1873 bp, Homo sapiens
cgtttccggcggcgtcgcgcgtttgcgagcctcgggtggtcctcagggagggtctctcggccagaacacgtggatgcccacccaccactgagcctcatggaggtggtaacatttggcgatgtggctgtgcacttctctcgggaggagtggcagtgtctggaccctggccagagggccctctacagggaagtgatgctggagaaccacagcagtgtggctggactagcaggattcctggttttcaagcctgagctgatctctcggctggagcagggagaagagccatgggtcctcgacctgcagggagcagaggggacagaggcaccaaggacctccaagacaggctttctgggccgcccaaccatgggacaagagccaaggcacccacatgcacctcctgcaactcctgttcctggccttccaaaacactgctcacaaagactgaccctgcctcctcctgggctctcgtcatctcctcttggccacttcctggttcatgatcaggacagaaggaggggaacgtcagccatatggatggtctgaaaattccagattctgtgctaaccataatgctgtgttcttttcactaacagcaaccagccaaaaaggggctggggtgcaagcttcattctgcttcagcacctggattctctctggattgacatggtcctaagtcaggggctggcaaaccattcgtagctttttacatttctgaatggttggggagaaaataagagacttgtgacatttgaaaactatgttaaaatcgaatttgactgtgcacagtgtccctgggcttggtgatgcccaagcgtcttcatggagcctctggcggctttcttgctgcagcagtgtttaccacaccagccaagtcaccttgaacttggaaaatgacttcatgccctccagccactgaaggattatttttcctctcagcccttagtggtttctttacctaaatgtcacggtacaactgagaataaggcagctgggtcagttcaatagaagtaaacctaaagtccaacaatccaggttagatattagccacggagggatgggaggaggagtcttctttttttttgagacggaatctcgctctgtccctcaggctgaagtgcagtggtgcggtctcggctcactgcaagctccgccacctgggttcacgccattctcctgcctcggcctcccgagtagctgggactacaggtgcctgctaccacgcccggctaatttttttgtatttttaatagagacggggtttcactgtgttagccagctggtctcgatcttctgacctcgtgatccgcccgcctcggcctccctgggtgctgggatgacaggcgtgagccaccatgccgagctgaggaggagtcctcttctagctgcacgatgtggaaatgacacatcatgtccatggggcagcttgctgagagccaagggtgtgagcacatgacttaaattcaagctactgcacagctttgagatctgagtatcacatggaagcatccaggtggcccctggcacacaggctggtggttcttttgtggagagggagagaagaggggctgctcatggggtagtgcaggtgctagaatatcctgttaacctgttcacactgcactgcaattcgggcttcggtaagctcatctaaagagtttccaggccaggcacggtggctcacgcctgtaattccagcactttgagaggccggggaaggatcacgtgaccccaggagttcggagaccacagtgagctgtgatcgcaccactgcactctagcctgggtgacagagtgaggccctgtctccacaatatataaataaaaacattttgggtttctgttttggagacaataaattaaatctataacctag

SEQ ID NO: 1031 - DNA, 2019 bp, Homo sapiens
agattttccagcggatcccccggtggcctcatgtcgcgcagtggaaccgatcctcagcaacgccagcaggcgtcagaggcggacgccgcagcagcaaccttccgggcaaacgaccatcagcatatccgctacaacccgctgcaggatgagtgggtgctggtgtcagctcaccgcatgaagcggccctggcagggtcaagtggagccccagcttctgaagacagtgccccgccatgaccctctcaaccctctgtgtcctggggccatccgagccaacggagagatctttgaaaacaaaggtgccatgatgggctgttctaacccccacccccactgccaggtatgggccagcagtttcctgccagatattgcccagcgtgaggagcgatctcagcaggcctataagagtcagcatggagagcccctgctaatggagtacagccgccaggagctactcaggaaggtgggagagagccaagccctgtgtccccaaggagtccctaactttcttatcccatgagagaggtgtgtaaaggagaaagctagaggtgaactagtagagagagacttgctaggaggccttagcaataatccagtaatctaaaggaaagatgatggtgacttagactcgggtggttagtggtagaggtggtgagaagacatcagatcctgggcacattcttttcttctgcttcccttgcctatttgctgaccacactccggctcctatgtcaccttgatgacttcctatccattctgtcttcctaggaacgtctggtcctaaccagtgagcactggttagtactggtccccttctgggcaacatggccctaccagacactgctgctgccccgtcggcatgtgcggcggctacctgagctgacccctgctgagcgtgatgatctagcctccatcatgaagaagctcttgaccaagtatgacaacctctttgagacgtcctttccctactccatgggctggcatggtgaggcttttcaagtacctatatttagccccaacactatttctgggctcctggggctcagcctagtgaactgcaacctcaaaggagcaagccttgaaacagttgctgggggaagtggccagagtagagatgctgggactgagggtggagcagcaaacttggtgaaactacatctccaatgtgctttctaatctcctgccagctcttctcaagcaggggatcctgggagatgtagttttcagatacctggttgggtttgggagtaggtgctaacctggataactgtaaaagggctctctctccccactgtctctcttctttctgtcaggggctcccacaggatcagaggctggggccaactggaaccattggcagctgcacgctcattactaccctccgctcctgcgctctgccactgtccggaaattcatggttggctacgaaatgcttgctcaggctcagagggacctcacccctgagcaggtcaggactcagaacagtctggcgtctccagactctcacatgcagtatgtgcaggcacctgatacttctgttgcccttgtgctccagtcattgcacaaggcagaaaacagctctggcaggaagggactgccaaagttaggagccctagggcctggaaggagagtatggtcctcagatcccccttctctcctgcttcctccagggaacccaacagtcatgaccctgatagtttcccataacaacctgggcattccttgggactcaggagctgctaaactctttcatcccctggtggcttcagcagtccttatcaccagcctcacaatcccacaggcccacccccagtgggcctgtggcattcatatttcatattcatatttcaaaccacaatatccagcaaaatgtctcctgagcacccagaactccataccatcggccgggtgtggtggctcatgccttaatcccagcactttgggaggtcaagatgggaggattgcttgagcccagaagttcgagactagcctgggaaacataggaagccctcgtctctac

SEQ ID NO: 1032 - DNA, 2370 bp, Homo sapiens
gcaaatcttcaggggccgtccaggactacagagctgtttcaccctaccttggcttcaatctcttcccccatgctcgaaggtgcggagctgtacttcaacgtggaccatggctacctggagggcctggttcgaggatgcaaggccagcctcctgacccagcaagactatatcaacctggtccagtgtgagaccctagaagacctgaaaattcatctccagactactgattatggtaactttttggctaatcacacaaatcctcttactgtttccaaaattgacactgagatgaggaaaagactatgtggagaatttgagtatttccggaatcattccctggagcccctcagcacatttctcacctatatgacgtgcagttatatgatagacaatgtgattctgctgatgaatggtgcattgcagaaaaaatctgtgaaagaaattctggggaagtgccaccccttgggccgtttcacagaaatggaagctgtcaacattgcagagacaccttcagatctctttaatgccattctgatcgaaacgccattagctccattcttccaagactgcatgtctgaaaatgctctagatgaactgaatattgaattgctacgcaataaactatacaagtcttaccttgaggcattctataaattctgtaagaatcatggtgatgtcacagcagaagttatgtgtcccattcttgagtttgaggccgacagacgtgcttttatcatcactcttaactcctttggcactgaattgagcaaagaagaccgagagaccctctatccaaccttcggcaaactctatcctgaggggttgcggctgttggctcaagcagaagactttgaccagatgaagaacgtagcggatcattacggagtatacaaacctttatttgaagctgtaggtggcagtgggggaaagacattggaggacgtgttttacgagcgtgaggtacaaatgaatgtgctggcattcaacagacagttccactacggtgtgttttatgcatatgtaaagctgaaggaacaggaaattagaaatattgtgtggatagcagaatgtatttcacagaggcatcgaactaaaatcaacagttacattccaattttataacccaagtaaggttctcaaatgtagaaaattataaatgttaaaaggaagttattgaagaaaataaaagaaattatgttatattatctagactacacaaaagtaagccacactatatcttcatgagttgcaaatccatggaaacacagtaaaccagccctgaaacaaagcatttccttgttttcagtggtattagatcttgtttccacatgtctgtctcattcttcactgggccttacaggttagttttaattaactctatggtatttttcttattcttgtttgatcatgttaaaaattggacctaataaaagtattttattcttgcttttccatgcttctctacaggtccaaatactgaatgtctcctttactttttctcttttaaatttttttctagacagggtctcactctgtcacctaggctacagtgcagtggtgtgatcacagctcactgcagcctcgacttcccaggctcaagtgatcctcccagctctcagcctccaaagtagctggcactacaagtgtacacccccacacaaggctaagttttgtattttttgtagagacagggtttcaacatattatccaggctggtgtcgaattcctgggctccagggatccacagtcccccttggcctcccaaagtgttgggattacatgcatgagccactgtgctgggcttcatttacattttaactgtctgttccttgcctagattcacagaaatccaaagctgtatgtagtcaacatggttcacaagtgttggaaaatgtgttttttgttttgttttgttttgtttcgttttgttttgagacagagtttccctctgtcgcccaggctagagtgcaatggcgtgatctcggctcactgcaacctccacctcccagattcaagcaactctctgcctcagcctcccgagtagctgggattacaagcacccaccactacactcagctaattttttgtatttttagtagagccggggtttcaccatcttggccaggctgatcttgaactcctgagctcatgatccacccgcctcagcctcccaaagtgctgggattacaggccccttgttcagccactgcacctggccccttattttgtttttgttttctaatatactttgatgtaatcagcttgagaaagcaacacaatttcaaatcctatcttctagatgcaagcagtgttaaatttgttaataaatttgcttttcacacctttctttaaataaaaggtatatctctc

SEQ ID NO: 1033 - DNA, 2402 bp, Homo sapiens
caacagagtgtcccgggactcaggcctctgatcaagttacccccagaggatcagagaggggttgacgaaggagaagcattcagagggcactggcttctggacagcaatgagtgcccgggccacgcggccccgaagccggcgagggaggcatgctccacccggtgaactggatcccgtggctgagagttcagaggaggtcgaggcagccagtgggagctccaagcccagctttgccccacctccggtgagctccgggctggagcagctgggccccatggaggaggtcagtggccaaggcctaggaagcaggactgacaagaagatggatgggggctctggcagggaactggcctcagcccccgaagtgccccacaaacctgcagtggaagcccaccaagccccagaagcagccctacagtacaaggagactgtgccccctgggaatggggcccccgatgtgtttcagaccctccagcacactctgagctccctggaggcagcggctgcagcctggcgccaccagccccccagccattctgggccgatggagttcgaaggcacaagcgaagggggagcaggttcccttgggaagcaggaaggggcagggagctgccagcgagaggcagctcgcctggccgagaggaatgcctggctccggctggccctgagtagccgagaggatgagctggtccgcacgcaggcctccctggaggccatccgagctgagaaggagacgctgcagaaagaggttcaagagctgcaggattccctcttgaggctggagccctgcccacatctttcccacaaccaagcaggtggctcaggcagtggttctagcagctctgaggcagacagggaaccctgggagactcaggactccttctccctggctcaccccctgcttcggcgcctccgcagccattccagcacccagatccttgggtctcttcccaaccagcccctcagtcctgagatgcacatcatggaagcccagatggagcaactccgggggagcattgagaagctcaaatgctttaatcgtctgctatcagctgtgctccagggatacaagggccgctgtgaaggcctcagcatgcagctaggccagcgggaggctgaggccacagcattgcatctggccttgcagtacagagtcttgctctgtcacccaggctggagtgcagtggtgccatcttggctcactgcaacctccgcctccccagttcaagtgattctcctgcctcagcctcctgagtagctggaactacagtgaacactgcgaagaggcatacagggttctgcttgctctgcgggaggccgactcaggagcaggagacgaagcccccatgagtgacctgcaagcagctgaaaaggaagcatggaggctgctggcacaagaggaggctgccatggatgcaggagcacagcagaatccacagccaagccctgaaggcagcagtgtggataagcccaccccacaggaagtggctttccagctccgaagctatgtccagcgtctccaggagcgccgttctctagtgaagattctctcagagcctggccccaccttggcacccatgcccactgtgccccgtgcagaagccatggtgcaggccattctggggacccaggctggcccagctcttccccgactggagaagacacaaattcagcaggacctggtggccgcaagggaggccctggcggacctgatgcttcggctgcagctggtgcggcgtgagaagcggggcctagagctgcgggaggctgccctccgagccctgggtccagctcacatgctcctgctggagcagctgcggtgggaacgggcggagctccaggctggtggggcaaacagcagtggcggacatagcagcggaggtggcagcagcggggacgaggaagagtggtatcagggccttcctgctgtccctggtggcaccagtggcattgatggtggccaggtgggcagagcctgggacccagagaagttagcccaggaactggcagcatcgctcaccaggacactggacctgcaggagcagctgcagtctctgcgcagggagctggaacaggtggctcagaaggggcgagccagacggtctcagagtgccgagctgaacagggatttatgcaaagcccacagcgccctggtcctggccttccgaggagcccaccggaagcaggaagagcaacgccggaagttggagcagcagatggcacttatggaggctcagcaggccgaggaggtggcggtgctcgaagccactgcaagggccctggggaagcccaggcctcccctcccgcctccccagcttggggacacctttctgtaggccccttacccagccatgtctggacatgccagacagctgtggcatgtcataaactgtcctggagtg

SEQ ID NO: 1034 - DNA, 2837 bp, Homo sapiens
atgcacttgggtagaagaaccagctgtgcagtgtcaagacccttccctcagagaccttatcagtaaaatggcgggtggactcggggatgcccgaagacttttccggaccacgattttccgatgctggacacatatttaaacatgaaggaatagacttgcgacttttaagcgcaaacaatgggtggaaatggacagaaactgcctccgtgcccacttgcagcggactacgtagccctggcagacaggcaattgcttcaaacaagcgccctccaagggcgtaagctagaggggcccgggcgggcgctttcccgtggaccctcccacctcgcgggtagaggaagtccttcagttcaggcacaaccctgagcgtcccccgcagtctccaactccggcgccagtcaggttgtggggtgggggcggcggagggcggagagcgcaggcgcagagtccgcgcggcggcgcccctctccctccgcagtactccgggcagcgcccgcctcgattttcccaggcgagggcacgcccgcgtcagtcgcctccggggcaccttcctcgccacgacacgcaggtaaccgggccccgggagccggtcggcggcggcggactgggaccttgatcctgcctgcccggccgcccgacaagggaatgagagcggaccccgaactccacacacccgcgtttagccgccacacctaaggggcacaacagtctttttgggtaagggccgggctgggggcgacgcgccccgcccgctttgcagacttcggggtgctctgcacgacgcctgaaaggccgcggggcccgcatttctctgtgctgccctcctggagaaccgggacacggggacgggagggccagcatcggctacggcccggtttcccgtttctttccgctgtcgcgtgtctgggccctcctgcagcgtccatgatgaaggccaggggctgttgctttcctctcgcccagtggccaacccaagcaaggggtgagtcactgtggcgtcatatgggatcaatttcaaatacaagttttaaaaaaggctggatgattttagaaatatggccaagaatttgtattttccattactctcttgtctcatgtccatgactcttgaacgccagtctgtgggcgctgagattttcgtggtacatcgacggtttgtagacatcttttcccaagggaagacgagggcaagggttagtggaggaagggcctcgtcacggccgagagtggcggagaaggctcagggcaagtccgcacagcctccagcagccacggggaggaaaaggcgaatctttcctcacagtgctctgggcgctgtagaatttctacgccacgtgcacccatttggcctcatttgagaggaggagagggaagaagggtcgcgcgggccggcaggaaagagactcgtgttgcggcggatgaaggctcagcgcggacctgcatctcgggccaggttttctttcacccggctccgcgaggagcgaggcggaaagctcgggtccgagtgttgatcgaggacctggagatagtaaccccccacgtccagagtgctgggggtgggtccagagggctgggggtaggtccagagggctgggggtagctccggaggagcgatcttcctccgcgggaaaggacttggctcaggcttgcctatgtccgtggtgctgaagtgcctcgcgcgccctcgtcgactgacttcctgggccgcggcctgcgttgcccttctactctgcacctttgccaaaaatagcccatctccatggctggtggccagagtggagcaggcccaacactgaaactcttttcagacaagttgaggctggtttcctgaacataacccgaaagcaaatgtggcttgccttggagatttaaagctcttcaatgatgtagctcaaaatgaaagttctttcaatccaacaactttgcagagatgctgatccctctcccaggtgaatcctggccaggcctttctgacaatcctgggataccctggggccagtatagagttcaagggcagaccagactgggggaggggttcctgagggacctggaaccagcatcaccagcacagtcagaattgcaacctagtggcaaagataactgtgagaacaatctcaaaggtggggccaggacagaaatggtagaataaatagcagagcttgtgatggttattataggatgggacaaaactcaaggagcagttgtagaatgcagttcaggaccaagtcattatttttgtttaatcaacttttattaaatgtgctctgggtgccaggaacgcaaatatgaatgagagctctcttgccattatggaattcacaaaggagactgtgacttggcatgttccctttagatggtgcctggatttgttggaggagtggacatggcagcttaaatgagccctcttgggctgtgcacaacccagaaatttcgaggtgtgccagtgtgtctgtctagtatcattgtgggaggatgtagagtcattctatgattgtttctgacatctctgtagctctgagtcttcttagaaggagcactttaaaaatcagagttctgggccaggcatggtggctcatgcctgtaatcccagcactttgggaggccaaggtgggcggatcatgaggtcaggagatcaagaccatcctggctaacacggtgaaaccccgtctctactaaaaatacaaaaaattagccaggtgtggtggtggccgcctgtagtcccagctactcgggaggctgaggcaggagaatggcgtgaacccgggaggcggagcttgcagtgagccgagatcgcgccactgcactccaggctgggtgacagtgcgagactctgtctc

SEQ ID NO: 1035 - DNA, 1882 bp, Homo sapiens
agtgcttccctacctcatcgccgtctcccctcacggtacttcagcccactgtccccaccgttcctggggctcgccaggcgccctctcccccgcccgctgcccggtgcagcgctctcccgacgcccgcgtggctttcttccaggtctttgctcaaatgtcagcttacaaggtcttctctgctgccctcctgctccgtggcactgattccctcccgatgcactgtcaggtcagctgcgcagcaaagggatttttggacccgcagcagcgcctgacacacagcaggcattccctcagcgctgcggaatacaggcagacccggggctcagggcgctgtctgggcctcactgggacccgtggggtcagacagaggctgaggtctgtgggttgtggccttgtttccaggatgctccacgggctgacggcccaggcgcctctcgggtgcggagaaggcaggaaacctaacccctgcttccaaatttaatcagtagaaacggtatcatcacccagcacaggccaggatcatttctgaggttagttctggcccaatcatgcatgcatttcttttttctttttttttttgggacggagtctcactctgtcacccaggctggggtgcagtggcccgatctcggctcgctgcaacctccgcctgccgagggttcaagcgattctcccgcctcggcctctcgagtagctgggactggaggcacccgccaccacaccggctaatttttgtgtttttggtggaaacggggtttcactatatttggccaggctggtcttgaactcctgacctcgtgatccgcccgcctcggcctcccagggtgctgggattacgggcatgagccaccgcgcccggcctcatgcgtgtatttctttcttcactcaacactcattgagcaactactgcacaccagaccctatgctgaatgcacgcagatacccccagtcccatgagattggacaggagcgtggaactcaagggtgactctggctctgcctggggaaagagagagagggcttccgaggggcagaccaagcccaggtggaccacgtcccaggcagaccaagcccaggtggaccacgtcccaggcagaccaagcccaggcggaccacgtcccaggcggaccacgtcccaggcggaccacgtcccaggcggaccaagcccaggcggaccacgtcccaggcggaccacgtcccaggcggaccaagcccaggtggaccacgtcccaggcggaccacgtcccaggcggaccaagcccaggtggaccacgtcccaggcggaccatgtcccaggcagaccacgtcccaggcagaccaagcccaggcggaccacgtcccaggcagaccacgtcccaggcggaccaagcccaggtggaccacgtcccaggcagaccaagcccaggcagaccacgtcccaggtagacctagtggttgtgtattcacttctcccaacccccctgggaagaaataactgcagctggccccattgcaccaatgaggaaactgaggcccagggaggaagccgattgcctgaggcggcagctttgggactggactgtggctgcctcctgaggaaggaaacagttcctccctccaccctcatcctggcaggggttgggccaccgttgcttcatcaagtgtcgtggagcctccgctctgtgccaggagcggggcctgtgccacaaacgtctgctgaaaccagccatccacccaacagtatcgagcaccatgatcggaagagtaaaggccccaaactgggccaggggcggtggctcgttcccgtaatcccagcactttggaaggctgaggcgggtggatcatttgaggtcaggagttcgaggctagtctggccaaaatggtgaaacccatctctactaac

SEQ ID NO: 1036 - DNA, 2456 bp, Homo sapiens
ttataatcactgtgaaaatcccatttattgttaggccctctttcttacaattatgggtttaacaaggcttcattctgctattgaatatatgatttcttccacagaaatcttagccagtatatatttgtttaaagaataaaagttactccttatggttgtattaggcatagaaattatttaattctctaaaaatgtaccaaggtattattagtttaaactcctttgtcccttcatattctaaaataaccatgaaggtaagccaggcgcttataaagcatagccaacgaagcttctatttccagtgtaacctaacgaagctgatcctacagaatgtgccccgggcctcactggagctgtgcaaacagcagcatctccagaagccatcaccatacctgcttcaccttagctcttcatgcacactgctcatatcagccctgggccctctcacaccaccagtgtgcagtgctcaacactggctgcacatttgccagggaagcttaaacaatctactcccaaagattctgctttcatcggtctaagtgttccttggcatcaggattttttaaggattttttgaagcctcccaggtgattctaatataaagtttgagacccccctgaagtcaatattatgaatcttctttgaccctaatacacaaatactggcacatttttctcttacacaaatgactgaattaatatagtgaggatagtattttcaataggaattgataaaatgccctatgacaaagggcagaaggtcattgcgggcacttaaaggactcagggctgcaactatttaccaactagtatggaatgatttcgacattttaacctagagctgtccaacagatccctccatggtgatgggattgttctatatgcgcactgtccagtatgacagcagccatcctaaatggctgttgggctgttcacctttgccaccatggaggaactgaagttttaagtttactcaattttgaggacagctgctccttgacttacaatggggttacatcccaataaacccattgtaagttgaaaatactgttaagtcaaaaatgcacttaatacatcttacttgcagaacatcatagcttagcctagcctaccttaaacatggagtctcgctctatcacccaggctggagtgcagtgatgcaatctcgtctcattgcaacctctgcccccgggttcaagcaattctcctgcctcagcctcccaggtggctgggactacaggtggattccaccacacccaactaactctttttttgtattttttggtagagatggggtttcactgtgttgatcaggctggtctcgaactcgtgacctcaggtgatccactcaccttggcttcccaaagttctggggttacaggtgtgagccaccacacccagatgaacttctgattaggcacaactatttccatctttgtctcacttgcattacatgtatgaaagcctgcttcttatcacttgtctttgcattttattttctcattttctaaatcattttttaaagtagaaaaatagaacaaaacattaaaattatttgcaattgcatcctaactgttcaaggtggcgttacggacaaaactgaactagctggtggctggtagaaggcatctctgtatgtttacatagtaaaaagtaatttttagctgaagtttgaaagcctaagattgattttaccacatatcatttagatgtatcgatatataatgtatacaagtaaaagttatgtaaaagttcagtgcattagccatattgaaatccctaatgtacttaaaatataatccatacaattgctctaaaataaatcgattatatgaaatcatcaacatcaaatggccataagacttctactctgtttcataccctggcattctgttggtctctggcattaattagctcaaaagttcttggttgttctaagcattacctggaaaacaatgacataattaggaataacaaaagataacttttccttaccaaaagttagcatagcatattatagcaacccatccctaaacaattggcactatgttactttgagtaatgaataaaaacgttaagtttgaattggtattcatgtttaatgttctgtatttaggagaagatgggcggctggcatatgaacaattggacaaatttcctcgagactgtgttaaagtcggaggtcgtcatggaactgaagttgccacagccttttaattacagattaactgcctaacagctgtcttaatatctggcccttttcatcaggatggtgctgtggtttgggctggaaattgtttagagcctgagagacacgacaactgaaataaaaatgtaggccaggtgcagtggctcatgcctgtaatcccagtactttgggaggccaacgcaggagaattgcttaagcccaggaggttcaagaccaacctgggcaacatagcaaggccctgtctctac

SEQ ID NO: 1037 - DNA, 3229 bp, Homo sapiens
atttttactgccagctttcaagttggaagagggaaattacgtttaaaggtcagcagatgacagatggattttcacaatttggaaataaaaacatgagtgaagggttcggaaggcaagtctctggtccattacacacttccagaaaaacttagtacccagagactcacattactgggagtgctatctactcacaagtgttgcactccattgagaaaaaaaaaaaaaccaggaagttgctgttctactgaggactgaccaagaagccatgaaataccttactgtgggagacttagaagattgcctactgaataaggtggacttgaggcgccagcagatttcccaggctgtggaggaggtgcagaaagtcgttcatcatttgaccacaaacatcagcaaccaagacattagatttcaagctgtgccttactctgacacgtacaatgaaaatattaaggttttggctcccagtcagttcctcgtcacagtcccaataaaaggcctggccgggtacagggaggccagggagcagcactggcggtactacacactgcagggcaccaggctgccctgcccgttgcgggaccctgagggtctgcagcagtggctggaggtggaacagtttatgaagagcctgtggcagtggcatgagacagatgtgaacatcgacggagacattgtgcctgccaaggtcctcctagtgttccggaagctggtggaaaatgcagttagaacctgtcacctctcaggtaaggtcagcctgctaggaaaccgctctgcagtttgggttgctgtggaaacatctgcatatcaggtggaactggagctggtccccgcagtggagatccccaccacctggtccaagaaagcccggtggcctcgatgtctgcagcgctggccttcccaagagagagtggagtgcatcaagtcgtttgggtttaacttgttggcctgttcaaattatcactggcagctgagcttcctccgtgctgagcaggtgttactggaacagctggatgaagatgggggctgccgtaggaagtgttttcaggtcatgaggcacctgaaggaggacatctggtgcccagggaacaggccggttatcacgtcccaccatctgcagactgtgctcttttggacctgcgagaaatatccccactttaaagactggcaggtcttcagcaaagcatttctgcgcctggtgaggaaactgcacaagtgcgtgagccagcacttcctgaaacactatttcgtccggaacagcaacctctttcagtgcgccaacccgactgaactggacactgtggcccaaaagctggccaccttcctgaagaacccccagatcggcccgccctgatggttgccccggcctgggaggctcttggacattttattctggcttaaccttgttctttggatggttcctcagtcaggtgccaggatcctgcctaggagaaaggccacgaatggcagcggaaattacatcaaaccagaaacacttcagcagggggaaaactgtgccccaggatgtctggcccaggcctccctggagcccagcaagcatttctgccctagctaattctcctggagacagctctcatcaggcttccccaggcacagatttggagctggtgacagttctgaacttagtttcccttgttcaggctgtgatcgtctcacagtgaaggtggagacagaacccctggaagtctggacatgagcctgctggccaatactgtgcccagcccactgatcatgggcacattctcctgccatttgtaaaatgggaatgttaacgtgcctacctctgagcagggctgtgtgcctatgaaactgtgctggcgccttttcaaggggaaggcattggatcaacacaaagtgttcctggttggttgagtagctggtgtttgcatcctggatcggtacccacagcactgacgcaaaattgcacctgatgagttagtgagcctgtgcttccttgctgccctccagcttccttagcatgtgggtcagtggctcctgatgttctgtctgcttccctggtattctctaagcagggaggggaatggttttgatgataagtgtaagtcaaagatgaaagtacaactcttggcctgatcccaaccatagccctctctttgcttcccatgccatgggccatggatggaacttccttatatatttatgtaaataacctagtactatgatctgcatggagtgaccttaggtgtctgtcactgctcagtgtgttcctttgctcacttcattcactcactcactcattgacaaataatgctcattaggcaccgggaacacagcaaagagcaaagtggatgaggacctccccctggggatgccacctaatggtggagacaagaaatgaacgacagataaacacgcacagttattacagatggaagcaagtgcttcaaaggaaataaacagaatgttgaagtagagtccacagaaaggtccccgaaggatgaaaatgcaaatagctgaaggggaaggaaaagtgaccaaaggcaggcatggtggggctggcatgagtcagagcacctggccttgtaaagccaggaaggaatcagtattttattctaagatcaaaggtgtgacatttggcctctccagaagcagaagagtatcacgatctgactgcattttaaacaattgttctggtaactgcatgaagaaggtctggggactcacacaggagctgggcactgagtgctcttgagccacccatttggaatttcacagaggcccacaaggcaacatattctgtgtggcacaaccgatcaggaattctaggagttctcggtgagatcaatggtttttttctggcgtttatgtaatgcttctcaactcaaggggctcctttattacttttgaatgtttttgcccaaatgtctataccaaagataaatttctaaagcatgaactactgattttgttttcatgaaaattcacatttgaaaatgaaaatgattacttttcaaaagtactgtaaacggcaggaaagatccaaaattgacaccctaacatcacaattaaaagaactagaaaagcaagagcaaacacattcaaaagctagcagaaggcaagaaataactaaaatcagagcagaactgaaggaaatagagacacaaaaaacccttcaaaaaattaatagatccaggagctggttttttgaaaggatcaacaaaattgatagaccgctagcaagactaat

SEQ ID NO: 1038 - DNA, 2642 bp, Homo sapiens
gtgaatcacattttctttcttctcggcaaaatggaccccgcgtctggggagggggaggggagagggtggggagggaggcggcggagacggggtttatttttcatcctggcttccccattcccgccgcatctgcgggcggccgcggcgaggagagcaggtccggggtgcggcggggagagctcggggcaggcgagtcgccccggccccgttcccgctcccgctcccgctccgagcccgcggcggcggcgcgcacctgccgcgggactgccccttcccagccgcctcgctgccttttcgaagcaccgccgaggatccgcggccgcgtccggccgagcccccagccgcgcggaggaccggcggcccagccgggcgtctcctgcgaggcccgcgctgttcgccgcgccggccagaagagatgtgcggctgggacggcgcatttttggccgagtgcgcgcgggcgttatgctgttcgcgcccccccgagtcgccccaaatgcgggatattgggtgggggggtgcggttggaaggcgctaagatggcgctgggcctggcctgtcgccagggctggtggcgcagttgctcggcgggcgccatctttctcgcggcgcgggcggcgccctccgaggacatctcgatgaccagggcgccgcgaggcccggggctagcgggagccgagagcagggtgctgaattctggagatgggactggggtcgcgcggccttctccttccccacgcccccagacccaaaagacgaggccgccggctcggagcgggaagggctggggccagcttcttcttcctaaccacttgtttgtgatggaagaagggggctgggggtcgagcctcgcggctgatgggttccctccctgaccccgcacccccactcctcccagtcgaaattggaggtgaggcgctcctgccattttctctcctgcggtctgagagtggacgtctttgtcttctctggcccggcgtgggggcagggcattgagccttttccttaattcttcagttattgaaagtagagtccaaccaggttacaaaactaaaaaaaggagtccaggacattgtctgtctgccttccggtagcatggttctctgtgggtaccctacgcttcgtttcttagttttactctaaaacaaccctgaggagacatttactagttgtcagattacgggaaggtgatgggttccagttttttgaaactttttttgttggctttcatattacttcaaatggcagtgaattaaaacagtttcttagaactctaatctgaaaagttaaatacgctttaaaacagtctgaaactcttctaaaaagcaaaactgcattattaaaagcatccatgtaagtatctgttggtagtatctattagagatgggggaggggtttaacttttacattattattgaaaagaggaggggaaaggtctataaagctctgatctctctagaagtccacatacatggaaagtaaatagttaatttctagtgtagaaaaataacaccgtggtgccagtaggtgtgtccttgtgtttataaatatacatagtggatgttttagaccatttaatgagacctattatatattgaatacctgctgtatgccaggaactgtgcctgatgctttgtataatttctattatatcagcccagaaatagtgattttatgatctgtctaccggggaatgaactaacgttcatagaagtatagtaattgttcgaggtcttgcagttttaagtagtaaagttgccattggatcacaaaagctgtattcttccccctacacctatggtttccaaatgtgagcatcagaattaatttgggagatgtttttaaatagagatttgtaacatcacctcttccaccatcatttgctagggccaactgggtcttttaataatgtgtcaggcactccaacttcttgatgttcaatattgacattctggcccaccctgcacccgctatatccaaagatctagtattccaaagctctccaggtgattccagtgacacagacacacgtttggactgtcttgtactatgctatgcactgttctgctcttttttgaattggaacatgagaattgaggtccatgtaattttgagtttcagtagttttttgctcacattagtctcatttttgtttttcctcttgtagctgccatttatcaaatcgaaattatttcctcagagaaaaaggtttaggtatcctaagactttaaaatctcagtacgtttttttttaaagtatgttgtctcattctattgagaagttatacaacatacaggcttctaggtctagccaggccatctagtttagtcaagacagctgtgtaacaaacgtagccttgaggcctggcacggtggctcatgcctgtaatcccagcacttttgaggctgaggcgggcggattgcctgaggtcgggagttagagaccagcctgtccagcgtggtgaaaccccgtctgtactaaaaatacaaaaaagctagccgagtgtggtggcaggtgcctgtggtcccagctacttgggaggctgaggcgagagaatcacttgagctggggaggcagaggttgcaggggcccgagaccccaccattgcactccagtccgggaaacaagaacgaaactcccatctc

SEQ ID NO: 1039 - DNA, 2322 bp, Homo sapiens
gtaggagttctggagctgctggctggagaggagggtggacgaagctctctctagaaagacatcctgagaggacttggcagaaaaaaaggagacagaaatgtcagacactgtgatggttaatactgagtgtcgattgattgaattgaaggatacaaagtgttgatcctggatgtgtctgtgagggtgttgtcaaaagagattaacatttgagtcggtgggctgggagaggcagacccacccttaatctgggtaggaaccacctaatccagcatgactagaatataagcaggcagaaaaatatgaaaagagagactggcctagcttcccagcctagatctttcttccgtactggatgcttcctgcacttgaacatcagactccaggttcttcagttttggaactcaaactggctctccttgcacctcagcctgcagatggcctattgtgggaccttgtgatcatgcctgaatatgcattggctgcgaaaagttcagggactttgcaccctgtggggtactcagatgtccagccgcactctctacattaatagtaggcaactggtgtccctgcagtggggccaccaggaagtgccggccaagtttaactttgctagtgatgtgttggatcactgggctgacatggagaaggctggcaagcgactcccaagcccagccctgtggtgggtgaatgggaaggggaaggaattaatgtggaatttcagagaactgagtgaaaacagccagcaggcagccaacgtcctctcgggagcctgtggcctgcagcgtggggatcgtgtggcagtggtgctgccccgagtgcctgagtggtggctggtgatcctgggctgcattcgagcaggtctcatctttatgcctggaaccatccagatgaaatccactgacatactgtataggttgcagatgtctaaggccaaggctattgttgctggggatgaagtcatccaagaagtggacacagtggcatctgaatgtccttctctgagaattaagctactggtgtctgagaaaagctgtgatgggtggctgaacttcaagaaactactaaatgaggcatccaccactcatcactgtgtggagactggaagccaggaagcatctgccatctacttcactagtgggaccagtggtcttcccaagatggcagaacattcctactcgagcctgggcctcaaggccaagatggatgctggttggacaggcctgcaagcctctgatataatgtggaccatatcagacacaggttggatactgaacatcttgtgctcacttatggaaccttgggcattaggagcatgcacatttgttcatctcttgccaaagtttgacccactggttattctaaagacactctccagttatccaatcaagagtatgatgggtgcccccattgtttaccggatgttgctacagcaggatctttccagttacaagttcccccatctacagaactgcgtcactgtaggggagtcccttcttccagaaactctggagaactggagggcccagacaggactggacatccgagaatcctatggccagacagaaacgggattaacttgcatggtttccaagacaatgaaaatcaaaccaggatacatgggaacggctgcttcctgttatgatgtacagatcatagatgataagggcaacgtcctgccccccggcacagaaggagacattggcatcagggtcaaacccatcaggcctataggcatcttctctggctatgtggacaatcccgacaagacagcagccaacattcgaggagacttttggctccttggagaccggggaatcaaagatgaagatgggtatttccagtttatgggacgggcagatgatatcattaactccagcgggtaccggattggaccctcggaggtagagaatgcactgatggagcaccctgctgtggttgagacggccgtgatcagcagcccagaccccgtccgaggagaggtggtgaaggcatttgtggtcctggcctcgcagttcctgtcccatgacccagaacagctcaccaaggagctgcagcagcatgtgaagtcagtgacagccccatacaagtacccaagaaagatagagtttgtcttgaacctgcccaagactgtcacagggaaaattcaacgagccaagcttcgagacaaggagtggaagatgtccggaaaagcccgtgcgcagtgagacatctaagagacattcatttggattcccctcttctttctctttcttttccctttgggcccttggccttcctatgatgatatgagattctttatggaagaacatgaatataagtttt

SEQ ID NO: 1040 - DNA, 2069 bp, Homo sapiens
agacaatgagagggaaaaggtgaagcttaaggggactctggaaaactcaacactcccgcagggtttcaaagaatccccaagaaatttcttttgagaagtcacaaaacaaaactaggcaaacagatgcctcggttttgtaagagattgtgagtagctttaggcagcaatgaaacctgactccgggccaggagtgcctagggtcggtccagcggagcgcgcattcagcgaggggtgttcggccggggccaggcggggcccaggcggggcccgctggcagctggttcccgccgccgcagagccgcaggggcgggaatggggactcgccgcgctgcctcgaggaggaatgattccagggaccccccggggttccgagagagctgggctggtccggaatgaattccccgttcctctggctgctggccccggacacaagaccctccgtctcctgccgagagaggctcccccagccgcctcgccacgccgcagcccgtccgcgcccgcgtccccgcttacttttcgtcgcagcgatgaggttcttcccgtccttaatgagctctttgatgaacttgttggtcctctcgagttccgcttcgtgagcgcggatcctctcccggaaccacgggctgtcgaggtagcagtcgctgaactccaggggctgcagccccatgacggcagcggtcgctgcgcggtgcgcacggccgcgcgctcctgcccgagccgagctccgaggccgctgccaggtgcggcgccgcgcgttcagggagcacagaggagctagcaggcccgggcgcgcggcgagcgcggcacggacatgtcccgtagagccgagtcctgcggcgcggaggagctgccaccgagaccagcgctagctgcggcgccccaatcccggcagcccccgccgagctctgagcgcccgcggccccgccccgcccggcccccgcgcggcagacactccccgaggcgccacccggccgggcccgcgctcccgctcgtccccttctctttcctccgccttccttcttcctcccttcccttccctggacgcctcttccttctcttccccacgcgcagctgcccctcctcttccttccgaggcgtcctggggctagaatttcgccccgcggctcccctccaccctgggcgctctcccctcccctttgcttgggctcccggggccggggtgactcacagtcggccccccgctgcacggaacccgaccgggaccgagaaggagcgtcttaattgcagtcgttagtccccgcaggcgggcgacataactctgaagtggctgccttgcaggagatgattaactcatttatctcatttatcctgggacgcccccaaccccgagctgggaacgaactcgcacagggggctcttttccttatcccggttcctttcccagtttaaagtgagatgcgtggtaaatctccgcttgagatcgaagccttacaatggcaagagcgttttcttggtggcccagcagctcctattacacttctctgcgtatccgcactaaataacttagttgaagagagagggctggctaaaccacagaaaagttgtttctgttgtgttcagcacattaaatttgctggggtaggtgaagacgatctttattattctaaaaataactaccggaaaacatgccaggtaacgtgtggttttcaccgcgtgggggtgacgatcaatgagaatttatgtcagtgccctcaaaaagcctattttgtgtgttatgaaacaactccagtgtgtcccaaaaaaagttaggcattttaaagtattaaaatgtataccttaggccggacgtggtagctcacgcctgtaatcccagcactttgggagacggaggcgggtagatcacctgaggtcaggagttggagaccagctggctaacatggtgaaaccccgtctctacttaaaatacaaaaagtacccgggtgcggtggcacgtgcctgtagtcccagctgaggcaggagaatcgcttgaacccaggaggcggaggttgcagtgagtcgtgatggtgccactgcactccagcctgggcgacagagcgagacaatgtctc

SEQ ID NO: 1041 - DNA, 2920 bp, Homo sapiens
atgtgagcatggtgacgtggtcacacagcaacagcaataaggagctgaagcaggagaactcagctttggcagagcagcttcaagttgtactgattgacaaggcagggatgcagtgtgacttggaggagctgaaaaagaaactggaactcactgagctcacgcttcaacaggtgatggagtggctgaagtatctgcaaatggagagagagcagtatgccgagtatctgcatggagagagtgccatgtggtggcagaggatgcgggagatgtcagagcaggtgcacacgttgagggaggagagagtgcacagcatgagtcgagtacaggagctggagacgatcttggctgaactaaggaaccagctgaacccctgcccccggagcctccagcagggccctccgaagtggagcagaagctacaagcagaggctgagcacctgtggaaggagctggagaatctggcaggacagcttcaagcccaagtggaagaaaatgagggcttgagtcacctgaaccaagagcaggaagaggttgctcaggttgttggagcaagaggagaagttgctggagcaagaggagaggttgctggagcaagaggagaggttgctggagcaagaggagaggctactggagctgcaggagagcctgctagagcagaagcggaaggccgcttcctttctcagctgaacccctactcccggagcccccagcagggccctccgaggtggaacagcagctacaagcagaggctgaacacctgcggaaggagctggagaatctggcaggacagctttaagcccaagtggaagaaaatgagggcttgagtcgcctgaacgaagagcaggaagaggttgctgagattgttggaacaagacgagaggttgttggagcaagaggagaggttgctggagcaagaggagaggttgctggagctgcaggagaggctgctagagcagaagcggaaggccgcttcctttctcagctgaacccctactcccggagcccccagcagggccctccgaggtggagcagcagctacaagcagaggctgaacacctgcggaaggagctggagaatctgacaggacagctttaagcccatgtgcaagaaaatgagggcttgagtcgcctgaaccaagagcaggaagaggttgctggagcaagaggagaggatgctggagcaagaggagaggctgctggagcttgagtggaaagccgagccttgagaggagcaggtggaggcgctcaggcataccgtgcggaacgaccgtaccaccatcaggcgcgcgctctcccagaaacacgaactgaagaaccagtgctgaggtcttctgcagcagtactatcagcagctgatctctgaggaggaggcactgcacaggcagttatttctgcagatccagctcgtggaccagctgcagcaccagagaaaagagtagcagagatggcctgccaagagttgcaggagacccaggaaagggagttgctgagggcaggtccccgagggggatgagacctggcaacatccatgccttctcattctctttcctgaccccttaggagcgcctggaagcagaaccagtagctacaggcccagagatggactggagagtgaggaggaggaggagccttggtccatgctgagcatcctggaggacctggagagctgggagaccatgatgagcctgactccccatgccccacctttgcttcctccctctctcctccctcccagacacccttatgctcttggtttttctgccttctgatttctttggaccctcaccccttccctgggagccagtggtcagacaccatttcacctgagaccaataggtgcaccctctgaggccccaagggaagggcttctctctactgccctggcccgttcatcctgtgtatccccctacaagaatgggcacctcctgcccgcaggtggcattttaaaacttggctttagccagtgccgaagaggagcaggcacagctacatgggcagctgaaggagcaaagggtgcactgccggcgcctgtcttacccggtggccttggcccagaaggagccagaggcagcagcctcagccccagggactgggggcgattctgtgtggggagacccaccggaccttgcaggggaccatggggaagctgcagagccgctttatggagctcatgcaggagaatgagcgggtggagaaactggaatgtcgctgcattcagctgtctggacaaacagacaccatcagtgagcgagaggaaagtacgtcacatcataccagagccagaggtcagtgctgaagacgtggaccgggagaatgagtacataagcaggctggctcaggacaaggaggagatgaaggtgaagctgctggagctggtgttgcagcttgtgggcgactgcaacaagtggcatggcagattcctggcagctgcccagaaccctgctgatgagcctgctccatgggacccagccccccaggagattggggctgccaacaagcagggtgatctcccacagtgtggagcctgaacaagaagaggctggggagggttttccccacgacagccccacggcacagcagatcatgcggctgcttcatgagatgcagaacccccaggagcgcccaggcttgggcagcaacccctgcatccccattttttactgagctcaggagagcaagatgaaggtaacaatcatctaaaagccagccactgtcagcaaagcctggagaaatgggaccagagagtctgcccctaccacgtccctgccaccccttcccagttacccctttacccttacagtagcaaaataagacccctatctagtgagggagacaggtgcagatgaggtgaagatcactgtcatctaaaagcaggccaccaaatttaaaaaaaaaaagttatgggaaaaaatttatgggatt

SEQ ID NO: 1042 - DNA, 2057 bp, Homo sapiens
aactctacctttctggcttcaggtgctatctagacctgaagtagcgggaagagcagaaaggatggggcagccatctctgacttggatgctgatggtggtggtggcctcttggttcatcacaactgcagccactgacacctcagaagcaagatggtgctctgaatgtcacagcaatgccacctgcacggaggatgaggccgttacgacgtgcacctgtcaggagggcttcaccggcgatggcctgacctgcgtggacctggatgagtgcgccattcctggagctcacaactgctccgccaacagcagctgcgtaaacacgccaggctccttctcctgcgggccggggttggactgcgtgcccgagggcgacgcgctcgtgtgcgcggatccgtgtcaggcgcaccgcaccctggacgagtactggcgcagcaccgagtacggggagggctacgcctgcgacacggacctgcgcggctggtaccgcttcgtgggccagggcggtgcgcgcatggccgagacctgcgtgccagtcctgcgctgcaacacggccgcccccatgtggctcaatggcacgcatccgtccagcgacgagggcatcgtgagccgcaaggcctgcgcgcactggagcggccactgctgcctgtgggatgcgtccgtccaggtgaaggcctgtgccggcggctactacgtctacaacctgacagcgccccccgagtgtcacctggcgtactgcacagaccccagctccgtggaggggacgtgtgaggagtgcagtatagacgaggactgcaaatcgaataatggcagatggcactgccagtgcaaacaggacttcaacatcactgatatctccctcctggagcacaggctggaatgtggggccaatgacatgaaggtgtcgctgggcaagtgccagctgaagagtctgggcttcgacaaggtcttcatgtacctgagtgacagccggtgctcgggcttcaatgacagagacaaccgggactgggtgtctgtagtgaccccagcccgggatggcccctgtgggacagtgttgacgaggaatgaaacccatgccacttacagcaacaccctctacctggcagatgagatcatcatccgtgacctcaacatcaaaatcaactttgcatgctcctaccccctggacatgaaagtcagcctgaagaccgccctacagccaatggtcagtgctctaaacatcagagtgggcgggaccggcatgttcaccgtgcggatggcgctcttccagaccccttcctacacgcagccctaccaaggctcctccgtgacactgtccactgaggcttttctctacgtgggcaccatgttggatgggggcgacctgtcccgatttgcactgctcatgaccaactgctatgccacacccagtagcaatgccacggaccccctgaagtacttcatcatccaggacagatgcccacacactagagactcaactatccaagtggtggagaatggggagtcctcccagggccgattttccgtccagatgttccggtttgctggaaactatgacctagtctacctgcactgtgaagtctatctctgtgacaccatgaatgaaaagtgcaagcctacctgctctgggaccagattccgaagtgggagtgtcatagatcaatcccgtgtcctgaacttgggtcccatcacacggaaaggtgtccaggccacagtctcaagggcttttagcagcttggggctcctgaaagtctggctgcctctgcttctctcggccaccttgaccctgacttttcagtgactgacagcggaaagccctgtgctccatggctgccatctcacctcctgctgggcagggggcatgatgcgggccagtgctccagccacagaaaagaaagttcatgctttgttcagcctgccttcttttctcccttttaatcctggctgtcgagaaacagcctgtgtctttaaatgctgctttttctcaaaatgggacttgtgacggtgtacctgaggcccccatctccttaaagagtgtggcaaaataatgatttttaaatctc

SEQ ID NO: 1043 - DNA, 2468 bp, Homo sapiens
aggtgaggcggggcgggtgtcgtcgcgctgggccgagcttacgactccagctgacccgctcgcggctgcccaatttcgttgaggctcaggacgagggacggggcggcaaattgtcacagaggtcgccgtagaccggtgtgcaaccgaaggtgaagagcgggaaggcgaggaccgaatcgcctctggtgtgcgttgtccgacaggaagtcccgaatgggctgtgagccgccggtggaggtgcccgggcaggtgcagagccacagcctgcgccccgtgagccgaggcgggtgatttatttggcataaaagtattctttcaaggatggcagaagctgttttgattgatctttttggtttgaaattgaactctcaaaaaaactgccatcagacattactgaagactttgaatgctgtccaataccaccatgctgccaaggccaagtttctctgtataatgtgttgcagtaacatcagctatgaaagggatggagaacaagataattgtgaaatagaaacaagcaatggattatcagctctcttggaagaatttgagattgttagctgtcccagcatggctgccactttgtataccattaaacagaaaattgatgaaaaaaatctgagcagcattaaggtaattgtacccaggcacaggaagacattaatgaaagcttttattgatcaactcttcaccgatgtttacaattttgaatttgaagatttgcaagtgacttttaggggagggctttttaaacagtccattgaaataaacgtaatcacagctcaagaactaagaggaattcagaatgaaatagaaacatttttgagaagtctgccagcactgagaggaaaattaactattatcacttcttctttgatcccagatattttcatacatggatttactacaagaacaggtgggatatcttatataccaactcttagctcattcaatctcttcagtagttccaaacggagagatcccaaggtagtggttcaagaaaatctgcgtaggttggcgaatgctgcaggatttaatgtggagaaattttaccgaataaagactcatcattccaatgacgtctggattatgggaagaaaggagcctgactcttatgatggaataaccacaaatcagagaggagtcacaatagcagctcttggtgcagactgtataccgatagtttttgcagatccagtcaaaaaagcatgtggggttgctcacgctggttggaaaggtactttgttgggtgttgctatggctacagtgaatgctatgatagcagaatatggctgcagtttggaagacattgttgttgtacttggaccttcagtaggaccttgctgttttactcttccaagggaatcagcagaggcatttcataatcttcatcctgcatgtgtacaactatttgattcaccaaatccctgtatcgacatccgtaaagccacaaggattcttctagaacagggaggaattcttccacagaatattcaggaccagaaccaagatctcaacctctgtacatcttgccatcctgacaagtttttctcccatgtccgagatggccttaattttggtacacagattggcttcatatcaattaaagaatgagatacttgactggatttttgtataactgcttcctgcctccttccaaactgactgcaagagagaaatttagctgtttgatttacttaaaaccaaatggattacaatggataattcatcttttgggtatatttttactattattcaaagccaaatgattttcatttaattgtaataataactgacaaaaatcagtatgttgtagctaatatgttttatgcatgagaattattcttaaagtttgttctccctgtttattacacagatcaggaatagatttgttcagttcagtatttattggataccctctattggtcaggcattgtgttaagcatatgtgaatcaaaatgaacacaactttttcctttgagtctgatacagtgaaggagataaacacttctacaacttaaatttaattttaatagcagtagaagagaacataaggaatagaggttaattttacccagaagcaggatagagaaaatattacagagaaaatcacatatcacatgggctcgaaagatgtagaggtttttgacaaatgaagaacaaccataacaggtagagggaacaccatgaaccagggcatgaaactgaaagtgcataacatattctagagagagaagggtgtgggcatgagttagggctggaaaaacaggttggaaacagataagtaagggtctcaaatgcaatgtcaaagagcttgcagtttattttccaggcaatgagtaggcagccaaaaaaaaaaagtaaggatgtgttttttttttttcccatggcatcatatttaagaggatggatttaaattgtgtgagaccaaagcatagagactagataagaggcgatcaaaatatttc

SEQ ID NO: 1044 - DNA, 1881 bp, Homo sapiens
cttccccaccccctgcacctgagccgcggcggcggctcctgagctcctgcgcgagtacccgatccaggtgtgcgcggacgctggcgctcccggggggctcggacccgcccccgactcgccgagccaggatatttttgttggtataaaattatggattgagaatacttttctttcatcacttgaaaattactgtgccactttcttttggtctccacagtttctgatgagaaatgtctggaaatctctccaggcaccctgctttggccctctagaatacagacagttcctgctctaagaggccatctgtggggctcagtctcccaacacctctgacacaggcagccatgccgcgcagcccaacatccagcgaggacgagatggcccagagcttctccgactactccgtggggtcggagtcagacagctccaaagaagagaccatctatgacacgatccgggccactgcggagaagccgggcggtgccaggacggaggagagccagggcaacacgctggtgatccgcgtggtcatccatgacctgcagcagacgaaatgcattcgatttaacccggatgccacagtgtgggttgcaaagcagcggatcctgtgtacattaacccagagtttgaaagatgtcctgaactacggcctgttccagccggccagcaatgggcgtgacggcaagttccttccctggagtttcgatacaagaagcgggtgtataaacaagccagtctcgatgagaaacagttggccaagctccacacgaagaccaatctgaagaaatgcatggatcacattcagcatcgcttggtggagaagatcaccaagatgctggaccgaggcctggatcccaatttccacgacccggagaccggagagacccccctgaccttagccgctcagctggacgactctgtggaggtcatcaaagctctcaaaaatggtggagctcacctggacttccgtgccaaagatgggatgaccgccctacacaaagctgcccgagcgaggaaccaagttgccctgaagacccttttagagcttggtgcatccccagattataaagacagttacggcctcaccccgctgtatcacacagccatcgtcggaggtgatccctactgctgcgagcttctcctgcacgaacacgccactgtgtgctgcaaagatgagaacggctggcacgagatccaccaggcctgcaggtacgggcacgtgcagcacctggagcacctgctgttctacggggcagacatgagtgcccagaatgcctcggggaacacggccttgcacatctgcgccctctacaaccaggacagctgtgcaagagtgcttctgtttcgaggcggaaataaggagttaaaaaactacaacagccagactccatttcagatggactctcactctgttgcgcagagtgcaatggcacgatcccggctcactgcaacctccacttcccgggttcaagcgattctcctgcctcagcctcccaagtagctgggattgcaggttcgtgccaccatgcctggctagtttttgtatttttggtggagatgggttttgctatgttggccagactggtctcgaactcttgaccttaggtggtctgcctgcctctgcctccgaaattgttgggattgcaggcatgagccttcatgtctgacccagtctattaagttttatcatgaatctatgttgtcatatccgatgtgtcttgataaaatatttatccaaaatccgatcctgcaactgtcaaagatgattatgtagatttcccctgcttatctgctaatgcgatgaattatatttgtcaattttcttatttctaaaataaactcacctagccatgaaaaaaaaaaaaaaaaaaaaaaaaaaag

SEQ ID NO: 1045 - DNA, 1957 bp, Homo sapiens
tttttttgctccaagacatggctgcagcttcccagggaggagcccaggggcatctccaacactcagcctttccctccggacccttttaaaagattcaacagcaccgtctctctccacttccatcctagaatgcagaatctgcaaagtgccttttgtaaagtttcttaagggacccatcccagccaaaatgaatcccagggaagaaaaagtaaaaataattacagaggagttcattgaaaatgatgaggatgcagacatgggaagacagaataagaactcaaaggttcgaagacagccaagaaagaaacagccaccaactgctgtccccaaggaaatggtgtccgaaaaatcccaccttggcaacccccaggagcctgtgcaggaggagcccaagacccgcctcctgagtatgacagtccggagaggcccacggagcttacctccaattccttcaacttccagaacaggctttgcagaattttccatgaggggacgcatgagggagaaattgcaagcagcgaggtccaaagcagaaagtgcattgctgcaggaaatccccactcctcggcccagacgcttacgaagtcccagtaagaaagaattggagactgaatttggcacagagccagggaaagaggtagaaaggactcaacaagaagttgactcccaaagttactcaagagtcaagttccatgattctgcacgaaaaatcaagcctaaaccccaggttccacctggcttcccttctgcagaagaggcctataacttctttactttcaactttgatcccgaaccagaaggatcagaggaaaaaccaaaagcaagacatagagcgggaactaatcaagaggaggaggaaggggaagaagaaccacctgcacaaggaggaggaaaggaaatggatgaggaagaactgcttaatggtgatgatgccgaggacttcctattgggcttagatcacgtggctgacgattttgtagcagtcagacctgcagattatgaaagcatccatgatcggctgcagatggaaagagaaatgctcttcatacccagtaggcagacagtccctacatataaaaagcttcctgagaatgtacagcccaggttcctggaagatgaaggcctttacaccggggtaaggccagaggtggcacgcaccaatcagaacatcatggagaacagattgctgatgcaggaccccgaaagaagatggtttggggatgacggcaggatcctagctctgccaaaccccatcaagccatttccttcaaggccgccagtactaacacaggagcagagcattaaggcagagcttgaaacactgtataaaaaggctgtaaaatacgttcacagtagtcagcatgtgatcagatctggagaccctcctggaaatttccaactggacattggtatttcagggttaatcttcactcatcatccctgttttagccgagagcatgttttggcagccaagctggcccagttatatgaccagtaccttgcaagacaccagagaaacaaggcgaaatttcttactgataagctccaagctttaagaaatgctgttcagactggccttgatccagaaaaacctcatcagtctctcgataccatccaaaaaaccatcaatgagtataaatctgaaattcgacaaacaagaaaattccgtgatgctgaacaagaaaaagatagaacattgcttaagactatcataaaagtttggaaagagatgaaatcccttcgagagttccagagatttacaaatactcccttgaaacttgttttgagaaaggaaaaagctgaccagaaagcagatgaagaagcatatgaagcagaaattcaagctgaaataagtgaactgttagaagagcacacggaggagtacgcacagaagatggaagaatacagaacgtcgttacaacagtggaaggcctggaggaaagtgcaaagggccaag

SEQ ID NO: 1046 - DNA, 1889 bp, Homo sapiens
acacaacctcaccagccacgggcaccccagtcttcagctacacccaagtctgggatgcaagggggccttagcagctggctgacccaggatgcccaaggtcaccattccctagactctaggcatcatgccacatgctgcacatgctgcgtctttgagtccttgcagccgtgtgaggcacggtatcattactcccgttttacagaggaagctactgaagctcagagagtacctgagcagccctggagaaggagtgtcacttttcctccatctctgccactgactggctggatgcacaggaagactgggtctccagacaggactgtaaagggcacgagggttgcttgtccttatcagaggtttcctgagcaccagcctttagagacagggaggaaggcaagagtgcgcctttgaggaacgcacaagcccaggagttccaacagggctgcagtggaggctaagttgcagcaggacttttgagcaagcatgcacacaggccagcaagagcaattggaggctatggtgccgtgctactcatatgggcagaagctgtccaaactggccatcctgaggatcgcctgtaactacatcctgtccctggcgcggctggctgaccttgactacagtgccgaccacagcaacctcagcttctccgagtgtgtgcagcgctgcacccgcaccctgcaggccgagggacgtgccaagaagcgcaaggagtgactggctgcaggcaagaccaaggccaccactgtgggccctccttccagtcaggcctgaggacaaggtgagctcgctgagtccagcctcgtggtcttctccaagatgccgccagatgcccagcctacagcctctcagggtcggatcggagcacgcctgcctccctctcccctccgccctcacccagccaatccgaggctgcttcgcactttgccctctgcctggtggggaggggagagctcagcccccgactcactcagaccccaaggcccactgtccagctgcagaaattcgttgccaaagattggacagagacaccgaaggaaatggggtggtgaaaccccacagcgaaaagccacaccgttgctctgtgacttttgctcctcctgttgcctgagccccatctcaagccaaagatgagtcagtggttctgctaggaactcatggaatggatgggcatttgatgacccctgggggtcatcttggccctctgacctggtgctctctctccactgggccttgtgctggctgagtgcaagacaagccttaggggctgtgagagggaggctggggtgcctgggcggggctgggagtgggacctgagatccctgcccactctctccccttcattggctgcccaggccactggccccagttctcagtgtcccttgggtccaggctccttgggccctaagcatcaccagaagggagtaagcagggagagaagcaatattactccctcccctacaccagggacttgccccagggcagctacctatgggtctttgcttccccagccagcctctcctcactgtgacccacccccatgggcccccgtcccaggcagccagcaccatgggcaggccctgccatggacagaaaaagagtttttctcttgttcagcctgcacgtggcctgaggaaggagtagaggctgggttggctggagccgtcctactgggcaagatggcgccccacttggagggcggtggtctgttacagggtgtgcaggggcagagaaggaagggaccaggggactgggccagtatgtggaggatggggcctgcgtgttcaaagccaaggcccgccccttccttgtgctcaaatggccaaagctgttcacgtctgtgctcaaccatctgcttcaaattgaagtaaaagccccaaaatgtcaag

SEQ ID NO: 1047 - DNA, 1857 bp, Homo sapiens
gtcagaccgtagcgacgcgggaagtccggacgcagtagctccctgaagcggaggcgaaggggagtttaagccccagcggcggcaatggcggagaggcccgaggacctaaacctgcccaatgccgtgatcaccaggatcatcaaggaggcgctcccggacggtgtcaacatctccaaggaggcccggagcgccatctcccgcgccgccagcgtcttcgtgctgtacgccacatcctgtgctaacaactttgcaatgaaaggaaagcggaagacgctgaatgccagtgatgtgctctcagccatggaagagatggagttccagcggttcgttaccccattgaaagaagaaggacaaagacaaaaaaacagactcggaagagcaagacaagagcagggatgaggacaatgatgaagacgaagaaaggctggaagaagaagaacagaatgaagaggaagaagtagacaactgaaaagggcgggagactgtggcaccttggaaggtaccacttgaaatgagacgtgctacgtgtttctgtgaagcttttccatgctgggcagagtagtctcaggcaaaagtgcctgaaaagatcagaataaaaactgactagaaataccgtcaaaaccagcacttaccaaactcagagcatctgagtagcagaatcctgttttgcttcatcaatctgaaggttatggccttttgacaagagggattctgaacgactaaattagtcagtttgctcgcttttgtttacttaaatgtatggttagatggtttttgatctgcagtcttccctagtcccccaaataagtaataataacttccatgctgcctgctgtgttccagatcacagaggcagccaaggctcaggaaaaactggggctttgcttatggtcagcctatgtttgattgcacagtctttgacaatagtagcttactaagactgctcagaatgagtaagctttaggaaactactaaaatgctgtgggagaataacaaaatccgttctctctcttcacttgacagaagcattaactgaattttgtttttcatagacccacttggcccaaaacctttctatattgcctgtagatgatcggcctgctggtgtggtagtaatctgatcacagatattcttaaatcagcagtgtggaatggtattagtcaaacatggtgccagtgtcttttacaaaaacagatggcatagtgtcagatgtaccttactctctgctactgtacagctttaggatttgtcatcacctcccggaaggtgtaaaaccccaggcttcctcttcttgtagtccatctcccagacttgtgactatggcttttcattcttcaattcatgacgagtgccaaacttgattttctctaggcacagctttctccctctgtgcctcctgcttcctttctctctcctgcctctcctctgctccccatcccactttctcatctgcctccttttctcacttctgtcagtctgtaagctttgataacctgcttaatactccaaagtgtgagttcctctgatctcttgattccttagttctaaaaattattttgtgaagccccttcacaaaaaaccttaagggaaatctgatggtgctcaggaatctaactctccctaaaccatcctctttaactgcttctaaaatatctctgttggcctttcttagcctttttctgtttccattcagtgctccaagcgctttttgtttctaagttgagtgcttggggtttgacaggtagtgacgtgtagtttgacactgttaacttgttaaatacagtgaaaagtttgtgagtgaagaatgctgagaagattgtaatgctttgtacaaataaaagtcttgttaaaaaatg

SEQ ID NO: 1048 - DNA, 2340 bp, Homo sapiens
aggctccgatggccggaggtaagggacacctggtgaggaggtaggtggaggcaccattacgagctctgaggagtgggtgctaggagacttctggaagcccggtcccaggcctgagccccaggccgtgcgggtggtttaatgaggaagccctgggacagcccgggggcggtgaggggtggatgctggactggggaggaaggaggaggaaggaggaccagggctggggtcaaggaggaacgccgaggagcgctgtggctggggcctggagaaatccgtggcccggaggagccccagacaggggcctgcgggagccagggctggcccctacacccagcccgcaccgctgttccctcccgccaccccaaccccagcactcagcccacgcctgctgtacctggtctctctctcagcctcgctccattgctatgccccacgtcccctgcacccaccacactcctctcccatcttgttttccaagggcagggacacatgcttattctgccgtgtgttgggttcaggtccccccatcctcgggctgcctgaccttctctccccaccccagccctgaacaggaaggagagtttcttgctcctctccctgcacaaccgcctgcgcagctgggtccagccccctgcggctgacatgcggaggctggtgagtacccgacccagctgggctctgccaggggggtggccggaggcgcggaccccagagggcggctcaggaggccacgcctgtccaggtgcccttccacttgaccagggtgggcaggcacagccagccaccttgtccctgagggacggaggccctggttgctgggggtctctgcagtttcttaaccccccaccctcagttcaggaggtcgggccccttggctcccactcgcctgaagggcaggaccttgggccttccctggcatcttgttgtcacagagaccaggagccacaggaggagccggatcccctcctccagggaaggggagcttcacgaggagccctgcaggatgggcggccgggccagggagggagaaggtcgtgctgggctggggaggggcttctgtgtggcaaggacccagcgcctcctcctgagcttatctgagccacgaggacgggccttgcccatgttctctgctcactcactcgtccacattttccacattttcagcaggggccgggggtcgggggtatagaattccccaccagcccggctggggctgcggggttgggactgtcatctggaggctcagaaacgctgcccccccttgtctgggaccccagcagccccagcccatgttagcaggccagggagccagggcagggtggtgggggcgggagggttccccatggctgcttcccatgaactcctccaaggcaggcggccacggtggcgaccttgagcactctagggtcagtttcccaagaggtgggggtggggtggctaaatgcggggggtcgcttctcccccattcccagccctgagtggctctgcctctcctcaggctcagaccctgggcaaccaggggtgctcccagctgtgacctccgtggttgggtactcctgcctgggaccccaggaggggctgcggtggtcgttggctggcagctggcaccctttccagggcccttttgtcaaagtcctagaaaacttcatttccgtaaaggtgcaaatggagctccatggctcagcctccctcgtggcccggccccgagcaccctccgggcctctagggctccagggcaccccctctttggacacagtggagactgaaggtcttgtgggggtggagggctgctgagggaccccggggagcccccagctcctggccccagccttcatcagaggtaaaaccccgatggacattagtgcaggatgaagttggcttggggtgcagccccgaggggcccccctccctgcatccactcagtgcttgtgagtcctatcctgcaggcacctccctgctccgtttacagatgagctcagggagtctcgggagatcaggggactgcaccaagtcacccaggggtggtgattgccaggcccacttgtttaagaagagggagggggctgggcacggtggctcacgcctgtaatcccagcactctggaaggctgacacaagcagatcacctaaggtcagcagtttgagaccagcaatggccaacagtgaaaccccgtctctactaaaaatacaaaaattagccaggcgtggtgtcacatggctgtaatcccagctgcttgggaggctgaggcaggagaattgcttgaacctgggaggcggaggttgcagtaagccgggatttctccactgcactccagcctgggcgacagggtgagactgtctc

SEQ ID NO: 1049 - DNA, 2369 bp, Homo sapiens
cattcaagatgcaacacaaaagtattacctctccgaagctctccctcatgcttggggcagttagtcatcccttcctgcgctcccacagcaccttggccgaggccctatctatcaatttacttcccaacccgtttggtaacgtcatgtctatccaccatgccccctgactcagtttctccctggggccgggcagacataggctaggagaatgctggcagaagatgcggaggcggcagcagggtgcggcaggggggaacttcccagtggggggctcctttccggaggacgtgtccccccaccaggactctggctatgcgccctcccccaggtacctgaggcggttccgggagatgaagccgcgggtccttcagcgctggagccgccaaatcctgcggggacttcatttcctacactcccgggttcctcccatcctgcaccgggatctcaagtgcgacaatgtctttatcacgggacctactggctctgtcaaaatcggggacctgggcctggccacgctcaagcgcgcctcctttgccaagagtgtcatcgggaccccggaattcatggcccccgagatgtacgaggaaaagtacgatgaggccgtggacgtgtacgcgttcggcatgtgcatgctggagatggccacctctgagtacccgtactccgagtgccagaatgccgcgcaaatctaccgcaaggtcacttcgggcagaaagccgaacagcttccacaaggtgaagatacccgaggtgaaggagatcattgaaggctgcatccgcacggataagaacgagaggttcaccatccaggacctcctggcccacgccttcttccgcgaggagcgcggtgtgcacgtggaactagcggaggaggacgacggcgagaagccgggcctcaagctctggctgcgcatggaggacgcgcggcgcggggggcgcccacgggacaaccaggccatcgagttcctgttccagctgggccgggacgcggccgaggaggtggcacaggagatggtggctctgggcttggtctgtgaagccgattaccagccagtggcccgtgcagtacgtgaacgggttgctgccatccagcgaaagcgtgagaagctgtgtaaagcaagggaattggaggcactcccaccagagccaggacctccaccagcaactgtgcccatggcccccggtccccccagtgtcttcccccctgagcctgaggagccagaggcagaccagcaccagcccttccttttccgccacgccagctactcatctaccacttcggattgcgagactgatggctacctcagctcctccggcttcctggatgcctcagaccctgcccttcagccccctgggggggtgccatccagcctggctgagtcccatctctgcctgccctcggcttttgccctatccattccacgttctggccctggaagtgacttttcccccggggacagctatgcctcagatgcagcttcaggccttagcgatgtgggagaagggatgggacaaatgaggagacccccagggaggaatctccggcgcagaccccgatcccggctgcgggtcactagtgtctcagaccagaatgacagagtggttgagtgccagctacagacccataacagcaagatggtgaccttccgatttgatctggatggggacagcccggaagagattgcagctgccatggtatataacgagttcattctgccttcggagcgagatggatttctcagacggattcgggagattatccagcgagtggagactctgttgaagagagacactggccccatggaggctgctgaagacaccctaagcccccaggaggagccagcaccattacctgccctgcccgtccccctcccagacccatccaatgaagagctccagagcagcacctccctggagcacaggagctggacagccttctccacctcctcatcttctcctggaactcctttgtctcctggaaacccattttcccctggaacccccatttccccaggccctggcatcatgcgaaggaactctctgagtggcagcagcaccggctcccaggagcagcgggcaagcaaggaggcgggccagagaccagggaagctctggctgagagcgaccgtgcagctgagggtctgggggctggagttgaggaggaaggagatgatgggaaggaaccccaagttgggggcagcccccaacccctgagccatcccagcccagtgtggatgaactactcctacagcagcctgtgtttgagcagcgaggagtcagaaagcagtggggaagatgaggagttctgggctgagctgcagagtcttcggcagaagcacttgtcagaggtggaaacactacagacactac

SEQ ID NO: 1050 - DNA, 3335 bp, Homo sapiens
actcgccctccagcttctgccctgcctgctgtgtgcggagccgtccagcgaccaccatggtgaggctcgtgctgcccaaccccggcctagacgcccggatcccgtccctggctgagctggagaccatcgagcaggaggaggccagctcccggccgaagtgggacaacaaggcgcagtacatgctcacctgcctgggcttctgcgtgggcctcggcaacgtgtggcgcttcccctacctgtgtcagagccacggaggaggagccttcatgatcccgttcctcatcctgctggtcctggagggcatccccctgctgtacctggagttcgccatcgggcagcggctgcggcggggcagcctgggcgtgtggagctccatccacccggccctgaagggcctaggagcctctgccctggagcgactgcccgctcaacgagaaccagacagggtatgtggacgagtgcgccaggagctcccctgtggactacttctggtaccgagagacgctcaacatctccacgtccatcagcgactcgggctccatccagtggtggatgctgctgtgcctggcctgcgcatggagcgtcctgtacatgtgcaccatccgcggcatcgagaccaccgggaaggccgtgtacatcacctccacgctgccctatgtcgtcctgaccatcttcctcatccgaggcctgacgctgatgggcgccaccaatggcatcgtcttcctcttcacgcccaacgtcacggagctggcccagccggacacctggctggacgcgggcgcacaggtcttcttctccttctccctggccttcgggggcctcatctccttctccagctacaactctgtgcacaacaactgcgagaaggactcggtgattgtgtccatcatcaacggcttcacatcggtgtatgtggccatcgtggtctactccgtcattgggttccgcgccacgcagcgctacgacgactgcttcagcacgtgagtggctgtcccaccatcctggtgccttgggctgcgcctccaggaagcctcccagcctccctggccccaggtggccgtcagcctcaatctgacccacaggaacatcctgaccctcatcaacgggttcgacctgcctgaaggcaacgtgacccaggagaactttgtggacatgcagcagcggtgcaacgcctccgaccccgcggcctacgcgcagctggtgttccagacctgcgacatcaacgccttcctctcagaggccgtggagggcacaggcctggccttcatcgtcttcaccgaggccatcaccaagatgccgttgtccccactgtggtctgtgctcttcttcattatgctcttctgcctggggctgtcatctatgtttgggaacatggagggcgtcgttgtgcctctgcaggacctcagagtcatccccccgaagtggcccaaggaggtgctcacaggcctcatctgcctggggacattcctcattggcttcatcttcacgctgaactccggccagtactggctctccctgctggacagctatgccggctccattcccctgctcatcatcgccttctgcgagatgttctctgtggtctacgtgtacggtgtggacaggttcaataaggacatcgagttcatgatcggccacaagcccaacatcttctggcaagtcacgtggcgcgtggtcagccccctgctcatgctgatcatcttcctcttcttcttcgtggtagaggtcagtcaggagctgacctacagcatctgggaccctggctacgaggaatttcccaaatcccagaagatctcctacccgaactgggtgtatgtggtggtggtgattgtggctggagtgccctccctcaccatccctggctatgccatctacaagctcatcaggaaccactgccagaagccaggggaccatcaggggctggtgagcacactgtccacagcctccatgaacggggacctgaagtactgagaaggcccatcccacggcgtgccatacactggtgtcagggaaggaggaaccagcaagacctgtggggtgggggccgggctgcacctgcatgtgtgtaagcgtgagtgtatgctcgtgtgtgagtgtgtgtattgtacacgcatgtgccatgtgtgcagatatgtatcgtgtgtgcatgtacatgcatgggcactgtgtgagtgtgcacgtgtatgcacacatatacgtgtgtgggtgtgtgtattgtatgtgcatgtgccatgtgtgcagatgtgtcatgttgtgtgtgtgcatgtacatgtatggacattgtgtgagtgtgcaagtgtgcatgcatatacatgtgtgcgatatttgctgcccgtgtgtgtgcatgtatatatagacatacatgcctatgttgtgtgtggtgtgcatatgtgtgaacacacacgtgtatacatgcatgcacatgtgcttgtacaatgggtgtccacatgcacgtgtatatgtatatctgtgagtgtatatacatgcatgcaattgtgtgtatgtgtgttctgtgtgtgcgtttgcaagtatatatgcacatgtgtatatgtacatgtatgcctgtgtgacgtgtgtatatgtgagcatgtgtacgtgtgtgtatacgtgtgttgtatatatgtgtgtgtctgtacctgtttgtgtatatgtgtgtgatgtgtgctcgtgtgtgtgcatattcaggcaggtgtgcatttgtgcatgccagtgtgtatgtatgtgcgcatatggacacgcatggacacgcatatggacacatatggacacacatatggacacgtgtggatatgtgtgcgtacacgtcgctgggacacatgcctgccactcggggcccagctgccctctgtgtttgtccttgccacagtcacggggtgcatgtgcagaggggagcagaccactggggacgtgctgtgccctgcacgtgcccgggggaagcggaagctgcagctggggtgggggcagcacctctatgcttcatctctgtgggtggcaggagacaaaagcacagggtactatcttggctcctgggagcgactcttgctacccacccccacccatccccttccccttggtgttgacctttgacctgggggttcccagagccctgtagccctcgacccggagcagcctctcggaagccggagtgggcagttgctggcgattctgagaaaacttggccgcatccaccggggccctgcctccagtcggccgctgccgagtctctgcgttctggccgcttcccggcttaatggatgccagccatttaatcattgctcctgccaccacaaatagatgagcagttaaataaaactcaacttggcataattcaaggc

SEQ ID NO: 1051 - DNA, 2578 bp, Homo sapiens
acggctcagatgtggcatcaggagtgaacaaagccgctcatctcgcagtatccctacctatgctcctgggaggagtctaccccagatacgctctgaccttcggcaagttacttatgttctccaagactcattttcttcatgtttggaatagtgataataatgcatattgatattatgaggaccgcatgaagcagtgaacgtaatctaagcagcacagtgtctacaacttaacatatagtcagattcgcccaaaatgaggacttccctgcaggcagtggcactctggggacagaaggcccctccccacagcatcactgccatcatgatcactgatgaccagcgaacgattgtgactggaagtcaagagggtcagctctgtctctggaatctctcacatgaactaaagatttcagcgaaagaactcctatttggtcattcagcttcggtaacatgtttggcaagagcaagggacttctctaaacagccctacattgttagtgctgctgaaaatggggagatgtgtgtttggaatgtcaccaatggacagtgcgtggagaaggctacacttccttacaggcacactgcaatctgttattaccactgctcgttccggatgacaggagaaggctggcttctttgttgtggagaatatcaagatgtccttataattgatgccaaaactttggctgttgttcacagttttagatcatctcagtttcctgactggatcaactgcatgtgcattgttcactccatgagaattcaagaagattctctcttggtggtatcagtagctggtgagctcaaagtatgggatctttcctcatctatcaacagcattcaggaaaagcaagatgtctatgaaaaagaatccaagtttcttgagtccttgaactgccagacaattcgattttgcacatatactgagagacttctattggtggtattttctaaatgttggaaggtttatgattattgtgatttttcccttctgctgactgaagttagtagaaatgggcagttctttgctggtggagaagtgattgctgctcacagaatcctcatctggacagaagatggtcacagttacatctatcagctgctgaacagtgggctttcaaaaagcatataccctgctgatggaagagtgcttaaagagaccatttatcctcatttactgtgctctacttctgtgcaggaaaataaggaacagagccgtccctttgttatgggctacatgaatgaaaggaaagagcctttttacaaggtacttttctctggagaagtctcaggaagaattactttgtggcacatccctgatgttcctgtatccaagtttgatggttctcctagagagataccagtaactgccacctggactcttcaagataattttgataagcatgatactatgtcacaaagtattattgactatttctctgggcttaaagatggggcaggaactgctgtagtcacttcatcagagtatattccaagtcttgataaactaatatgtggctgtgaagatgggacaattatcattacccaggctttgaatgctgccaaagcaagacttctggaaggtggttctttagtaaaagattctccccctcataaagttcttaaaggccaccaccaaagtgtcacttcattactctacccacatggtctctcttcgaaattagaccaaagttggatgttgtctggggacctggactcatgtgtgatcttgtgggatatctttactgaagaaattttgcataaattctttttggaagctggtccagtaacaagtcttttgatgtcaccagagaagtttaaactaaggggtgagcagataatttgctgtgtgtgcggtgaccattccgtggctctccttcaccttgagggaaagagttgcctcctgcatgcccggaagcacctttttcctgtgaggatgataaaatggcacccggttgagaattttttaattgttggatgtgcagatgactcagtttatatctgggaaattgaaacaggcactttggaaagacatgagacaggagaaagagcacgaattattcttaattgttgtgatgattcacagcttgtgaagtctgtacttcccattgcctcagagacacttaagcacaaaagtatagaacagagatcctccagcccctaccagcttgggccattaccttgccctggtctgcaggtggagtcttcatgtaaggttactgatgccaaattttgcccaagaccttttaatgtcttgcctgtgaagacaaaatggagtaacgttggctttcatattcttctatttgatctggaaaaccttgttgaacttttgctaccaactccactcagtgatgttgactcttccagttcattctatggtggtgaggtcctgagaagagccaagagcacagtggagaagaagacactgacactgagaaaaagtaaaactgcctgtggtcctctttcagcagaggcactagccaagcctattactgaaagcctggcccaaggagataataccatcaaattctcagaagaaaatgatggcattaaaaggcagaagaaaatgaagatctcc

SEQ ID NO: 1052 - DNA, 1868 bp, Homo sapiens
tttaaaaatgtttggttcacagccttcactggattacctattggagcaaacaaagtgtaaccatgtaaaacctgtgagcttgtattgatatctcatggctagagttccaagcgaatgggtctcatgagatctgatggttttgaaaatgggagttgccctgcacaagctctccttttgcctgctgccatccgcataagatgtgatttgctcctccttgccttccaccatgattgtgaggccttcccagcatgtggaaatttgcaggaatttagccaattcagaggtcttgttctccataatttggaattttccttcggatttgatcaagttggatagagttggtcaaacccaatgggaaaaagatgaaaacaacaagaaacagaaacaaacagcaacaacaacaacaacaaaaacaatgcatttaattaaatgaagatgagctcatgctggagtagggtggactctgaacccagtgggacaagcgtccttattaagaagagggaaatctggacacacacagagcagagaccgccgtgtgaagatggaggcagagatcggagagatgctgccacacgccacaaatgcctggggctcccagaaactacacggagcctcccccagcggcttcagcaggagcatggctcggccaacactttgatcttggtcttccagcctccagaacgttttcctaaaattcccttttccactggtgtgtggtgcaagatgaggcacattttccatggatggtgaacagagggaggagccttttgatcacaaccaggtcaccccacttctaagccactgtgcctccagccccacaagactaaggagagagagcgcagcgtggtggagagtgagctgtgctgggaccattgtttccgtaacctcgttttctgtgtccagctgacacaccttcaaagtggcatcaggtcctaaactgtagcttgcaatgtgcctgtttccagaaaccaaggtgaaagtgctttagagtcccttcccagcttttttctggaaatgcatgtttctctgaactctgagtcccaagaaaaatcacttgagacaccaagaaaatgggggaagtgctaaaattgtgtgggaattcaagcttaacaataaacatcaagacatttttgataaaaatgaatccactgacatcggggaggagcaagagaacagcacgctgacactgggtcagaggctaagaccgacatttctgggaaccactcccggaagggcacagaggagacgctttcagcctctcatcagccagcctggcctgtagctgctgcacgttatgagtgtgttcctggcatgactgcttctaacagcgaccatttcattaagtttttaagtgcctggtaattgcttggttatgaccggtgtctgctccatggcagcctcttcctgaagaaatgctgaggcagtgtcacgctggtgtctgtcctccttacagaatgcctgaacagttccattgactcaaagtgaagatcaaaagaaccaaatgacagcaatagccaagtgtaatcatcagtaaccctgtgttctatccacaggtaaaaaacaatcatcctcttcattatgggtttcaattttaaatgtaatacatttttagaaatgcctatttccttttataatctctttatataatctaggttattctggctcttaggtcttcatttagctactgaaaagatttgatctcaaatcaatgatctaaccacccatgaccatctcccacctctctccccgtacaccccccagcatgaattctgggaactcaggtaaaatgctttctggaaacctgcctgtattagtctgttgtcaagctgctaataaacacatacccgaaactgggtagtttataaagg

SEQ ID NO: 1053 - DNA, 2488 bp, Homo sapiens
aactcacacagttggattcctgtcaaaggagatcgtctctgctaatcaaacaccatcagtaggataactgcaaacatggaaaatggagaaaatgaaggaacaattaaaattattgcaccttcaccagtaaaaagctttaagaaagcaaagaatgaaaatagccctgatacccaaagaagcaaatctcatgcaccgtgggaagaaaatggcccccagagtggactctacaattctcccagtgatcgcactaagtcgccaaagttcccttacacgcgtcgccgaaacccctcctgtggaagtgacaatgattctgtacagcctgtgaggaggaggaaagcccatgacagtggtgaagattcagatcttaagcaaaggaggaggtcacgttcacgctgtaacaccagcagtggtagtgaatcagaaaattctaatagagaacaccggaaaaagagaaacagaatacggcaggagaatgatatggttgattcagcgcctcagtgggaagctgtattaaggagacaaaaggaaaaaaaccaagccgaccccaacagcaggcgatccagacacagatctcgttcgagaagccccgatatccaagcaaaagaagagttatggaagcacattcaaaaagaacttgtggatccatccggattgtccgaagaacaattaaaagagattccatacactaaaatagagacacaaggtgacccaatccgcatcaggcattctcattcgccacgaagttaccgccagtatcgcaggtcccagtgttcagatggggagcgatcagttctctcggaagtgaattcaaaaacagatcttgtaccaccacttccggtgacccattcttcggatgctcagggttctggggatgctacagttcatcaggtatgtgaccaccattgtgagcctgagtttcctcatttaaagggtgtccagacctccagacctagaaagggcagagaacttggaaatctgagtttgaacaaggcacttcagaaggtctctcataatacacttctggatgaagtgatattggggctgggattgcagactctgctttctccctgtttatacagggtcagcacatgaagtgatgtggacagagagccccacctccttggctgctgtggttggttcaggtattaacacgtgactcaagctgggccaattggagcccttgtctgggacttttctatattggagtcaatagggaaaattgctgttgcttctatgttcctggcactagaagaatagctgaggatggctgactttatctcttgtagagaaagcctgtctgcaatagtaagaatgaggccaacacaaagagagacagggaagataggggagaaatggtgatattgaggtctggatctcagtctgtctgacatcagtgctaatgaaccactccttttaaaatttaagttgatttgtatttgtcatttatatcctgactaatacagccttcagaaagagatattagaaaaagcactgtcatgaactattacttcattaacataaaaacagatcattttggtatgatgataataaaagtagcaacaatccattaagaatctactatatgttaggcactgcagtaagtgcattacatatttttttcatttaatcttcacaacaacctatgtagtacctgtatcagtttgctataactgtatggctaactgccctgaaactgagtggcttgaaacaataatttgtttaactcacaagtctttgtcttggttgggtaactgtggtctggaccaggctcaggtgatcataaatgggcttgctaacgagtctgcggtaagttggcagatttctaggacttactagtctagggtggcctcattcataggtgtagagtttggtcacctgggcacacaagagtggatattgcctctccagcaggctaaccctagctagtttcaagcaggtgccaaatgagtgagtggaggcatgtgaatcctctcatggctcactcttggcactggcacgcaactacttctgaagcattttctcggcccagtttcaaggaatgaggaaatagtctctattcttaatgagaggaactgaaaagtcaaggagagtggatatagaaaggcatggaaacaatgggaacacaactattctattatgaaaggtattatgtgcatacacttcaaaagttaagaaacttactcaaggtcataaagctagaaagcagcagagacaggatttgggccttaatcttctgaccgaaaatctcattctctttcaacacttctttctaatattgctgattgatctgtgcagtccagatgtcacagtgtaattagtttctaaaataaatctgttcttagattacttttgaatgacttctaagttattataaaaaagttctttgttgtaataaaggtattaactttccatgagtatattcttgacccacacccataagcatttttgctcatatttgtatccacaataaaatgaagttcatattttc

SEQ ID NO: 1054 - DNA, 2227 bp, Homo sapiens
ttggcgaggctctgggcaggtcctgaggcttttctctgctgttgtccggtgttggcgaggctctgggcaggtcctgagccattctgctttccactctgtggtctttcccttctgggagccctgggtttttggacatgttgagacaatggggcttgcgcaggtccagccgctgccgcgggggccctgtgttcaacgggggacactcagccctgcccaggccccgctgtagcctcagcccacccgagtggaagccacactggtcgcaccagatgccccgggctcctctgagtagtgaccacggcgggtctcattggcactgcctatccacccgtcacgtgtccttccctcccccgtggcccacccaccatgtccttccctcccctgtggcccacccgccatgtccctgcctcccacccgacatgccccttgagctgcctgggccctgctattgtccccactgcctgtgtgactctgcgcccccttccctaccctgccccaccctggttcagggagcgtccaggcccattctcatcctcagggccttccctggcccttgccactctgtgccgtgtcatgacctgaagctgcaggtgggcgcctcccccttccgtcatggctgtcccccttctgtgaggtgtcccagccgcctgattgccggagtcccagggtgctcggtgctgtcgtggagcctgggacattcactgtctgggattgattccagggttggagccacacctggtctggggcattcgctgtcctgggtcagagcccctcctggtctgggacattcgctgtctggggttggagccacacctggtctggggcatttgctgtccggggtcggagcctcacctggtgaagatacagaacatgctgctgccctaaccccgtgtggtgtgccccctgtccccgggtgtcgttcccatagccagcccttgtctcatctcgtctcatcctctagatgctgtgggccctgagggaaaggatcacagaggcgctgagccgggatggctacgtgtacaagtacgacctctccctccctgtggggcggctctacgacatcgtgactgacctgcgcgcccgcctcggcccgcacgccaagcacgtggtgggctatggccaccttggagatggtaacctgcacctcaatgtgacggcggaggccttcagcccctcgctcctggctgccctggagccccacgtgtacgagtggacggccgggcagcagggcagcgtcagcgcggggcacggagtgggcttcaggaagagggacgtcctgggctacagcaagccaccgggggccctgcagctcatgcagcagctcaaggccctgctggaccccaagggcatcctcaacccctacaagacgctgcccagccaggcctgacggccactcctgctgctgccaaggcccactgggggtcggcgggtggctctcgggcgggggtgttgcggtggctctgagggatgagccggcagtgggcaggggaccaggcacctggttgaagggactgggagcccgcactggggaactgccggacgcaggccctcgggcaggagcatctggcagagtggggggcgtggcaggcaccctcctttgcagggcgaggtggggcctctgcagccatcctggacaggccggggtggcggcagctttgcccacgtggaagcggggtgggtctcacttgcgtggtggcccctggccccatcttgcctgctgcggcctggggagcaggcgctgggtggtggttctgcctgcttgctgctcgttccccgggcatgcgtgggcagcggggggcatgcgtgggcagcagggggcgtgggcagcgggggcatgggcaggaccacgtgggccgtgatcgtgggttgccgagaggacctgagcgctgcggctctgctgaatggagccgggtccctcaggccgtggacgccctcgggaggggggtgactgtggcttgtgtctggacaggaatgtgtcatttcccacatcttctagagggctgccagctgggaagacagttatcagggcaagctgtgctctgagtttcgggttctgctcctacaaagaacgtgcggtgctgcgggcgagggccccggcacggacaagggccactgcagagtgtgtttctgctcgtcagctgccctgggcagcggatgggctgggcgatgcagctggatgcacatctcattctgtcatgaatgtccagtaaaaatctgaattggttgc

SEQ ID NO: 1055 - DNA, 2525 bp, Homo sapiens
agaacctcccctcccccgccggggcctgggcgcgcctgcccttcgctccccgacctcctgctgcagctctgggcccctcggccgctccctcccctcctcccttgctcaccccacggttggccgcggatctccagcacgccgccccagtcctcggcgtcccgcagcgcctgccagggtcgccgagcctcccctgcctcctggccgcctctgcagtgccgtcctcccggggctggctctctccccaggcccccgctttggccacccaggcactttccgccctgagcgtggcagctgctgccgggggtcctgggaccgcgggatgggaactcccacgcagcgtcccacaggctcctggccgccgcgagcccgcgcgactcgcacgagcatgtccacccgcagcgaggggccggtcactgctacggagcccgccagaaggcaaagccccagacagcaaatagggaggcggctggcacccagggaggccgaggcgggaggatcgctggagcccaggagttcgagacctgccttggcaacatactccctccagcgtgccaaatgctgctaatggacagccgctcctgccgctctgatgttgctagacctcctcagcactcagcccaaggcagccaggaagaatgaacgaatggtggttcagagggaaaggaggaagctgcgtggcatttcagagatacttattttaaaactgctggtggccatgtcttcttttcatatcagagctaatgagttttgatatgtgaacatttcttctccttcataggtaatgtgttgatttggcactttaatcttagaataatcatttctaaaaccaacccaactgcttttctttacaattttggccttagcaaacagatgagtccgttgacttgagcattgcttgggcactgtctgtgtgcaggtcaggcaggggatgctggtggctgggaaacatagaggatggaggtgtcttgggtgtacatgaaggggtggggtcaagtccacagggggtcggcccctggcagcagtcctggagggcttcgtggaggaagggagaattgagtgagaaagtggtccccaggtaagagggaagagcatccagggagaggagactgcttctgggaagaccagaggcatcacctcgcaggggctggtatggtggtggctcaggtgggaggaagagagacctcagggaaaataacaggttccattgacaggaggcctgctctggtggggaggcaggctggtggtggagtcatggctgcaggccagggagatgcctgaccaacaggtgtgttggccagggcccctgtagcaaaaacacggagctgaggacctcatggcagggaccccatgcagagggagccgcgggtggcatggggatagtcacctggctctcctgctctcggcctcctgcagctcccctcactccctgccctgccacacaaggtcaaacccaccaggaggcagaaggcgaagggcgaggtcccagggtgaggagcagggaggagatggtggcagcagggaaggtgatgcctgctgcagagtgagacctgggactgccaaacacacagtgacgggagctgaggaggcctgccgggggaggaagacagtggctggcagtgacaggaagggagggtcagcatggggcggcagtcccagagctcagggctccctgccaggccagcctttgtggcctgtggggtggaggtggcaattgctgtcatgtcataaacacgtcaagcttacaatgaaatctccagtgtggcttgggagcaaatacatgtgcaggtgtttgagtatctgtgctcttacctaacctcagggagcaggaaaacgaaagcttatcatgtaaacacatcagcagcagggcttatgtgtgtctccacactggaacccccaagacaagagactggaggcagagttgatttccaagcccagagtgctgggcagcctttgggttttatgtctgcttgcttggagctcagtgatagaaatctaggccccagaagaggaaaggactgtcctgcataaccagcacacccggggaatgcttcaggtgcagctagatccaggcatcctcaaatagtgtgattaggactccactttcctttgtcaccttggcttggctcttccctgctctgtgttgttttcagacgaggtggggccccagcagctctggtcctcctgacatcctagagaagagccagcccttccctcctggggtctacaccgtcccctaagggacctcagactgggctgatggaaggtctcaagcaggccatgtgaagggcactgcacaggaaacacagaaacgggaatcctataaggtcagcagagctctgagccctttgttcttgggcctgtttttatgatcctccctctacatgtagctcacacttccctgcttctgtgcaggcaccaggtgagggggttgtcatggcctcctgccactcttgaggctgtcagatattacctgtgctgtccctgcattctcaagctccaaattgtcaactaagaaatggtcactt

SEQ ID NO: 1056 - DNA, 2859 bp, Homo sapiens
attctggagtccagagccactgcctttgctccagccgctgccgccgcaccacctctccttctctgcctctgaccctccttctcgctgctccccctgcccagctgctcctcccacctggccatgaccaaagcccctgctggcaccctggcccagctctgagtcctgggaccctcggtcctctctcctgggccatggccaactcaggcctccagctcctgggctacttcttggccctgggtggctgggtgggcatcattgctagcacagccctgccacagtggaagcagtcttcctacgcaggcgacgccatcatcactgccgtgggcccctatgaagggctctggatgtcctgcgcctcccagagcactgggcaagtgcagtgcaagctctacgactcgctgctcgccctggacggtcacatccaatcagcgcgggccctgatggtggtggccgtgctcctgggcttcgtggccatggtcctcagcgtagttggcatgaagtgtacgcgggtgggagacagcaaccccattgccaagggccgtgttgccatcgccgggggagccctcttcatcctggcaggcctctgcactttgactgctgtctcgtggtatgccaccctggtgacccaggagttcttcaacccaagcacacctgtcaatgccaggtatgaatttggcccagccctgttcgtgggctgggcctcagctggcctggccgtgctgggcggctccttcctctgctgcacatgcccggagccagagagacccaacagcagcccacagccctatcggcctggaccctctgctgctgcccgagaaccagttgttaaattgcccgcctccgccaagggccccctgggtgtgtaatgtccagtccccagccaggctctgtcccctgccatacctagactgtgtgtttcatatttttttggaaagagaagtgaacatccagccccaatcatggtatcattcggtctgtcctcagcgtggcttggacggggcctgtgtcagagtggtcagtgctgacccctggggctcttgggcagaaagatgaggagacagaggtccagggtgggttacatagcacatccagggctgagcaagaaataattcagaggtcctaccctctgtctagggacccccctcccaagcctggccttggccttggcacaaagtcctccttgataggagatcccactcactcctggaggctgcccctgaggcttggcccagctctaggagcagtccccagggtcagggagcccctggtgtggaaagaggccccaaggtagtaaaccctgcccctgttactgtgctccagagacctcctaagggaagggacagttcctggaaggccctccagctggatgctggggatcagcgataggtgaggggacacagtgtaggagctccccatgtagaaaagggaatgtggggagggcgttaggagcttgcaggcattaggactgtcctgagcaaggtctgcagcccccagctctgctcaccccgaatcctgccccttgtttccacacctaccattcctcctctcctgatccccagcatccagctgaggtccaaggtctttgtcctagaatcagagtggggaggggacagcctggggctgcccagagactgtgggtggagctgcctgctgcactcagcagtgcggtcagagaagggcttttggtcttgaagtccaggtaccatccccccttagcatacagggggaagggcctgagaggaatgtaaggaaaccagcccagatcagtcccaaggccagagtcctttgtcctacatctccctgaaccagagtgtgccctgcccctcatgctcagacctctcccaccccaaaccctctcccgggactcagtctccctggccactgcgtatcaggcttctggggaaagcatccatcacagaacctccccttccctgccacgcaccttccttggccagctccattctggcctcctccaccacctgccttgtgaccacatctcccaccacgtccccagatctcaagaacgcagctcagcttctccttcgagcttgactctgagagggaaagtgacggaaaccaagtcagatgagatgactgccatgtacactgcagtcaagggcagggaggggaggaatgacacaaatggcagggagctgctgggggactgacccctcggcgcctggcctggccggtgctgcacatccaccggggcacaacagggacttgtccagcctctggtcagaggatgtggccacctgaccctaaataggttccccagagtcctgcccctctaatgaatgagaactgcaggagtttctcctctgggtgcctgaagctatagtgcaatggttcccaaccctgcatgcacattcgaatcacctgggggcacaatgcctaggctccaaccccagacactcttatttcattggtctgggtggacctggcatcagaagtcatgtagctcctcaggggactgtagtgtgtggtcagcactgagggctcctctatgaggcctcaagcccaggtgactctgtgaggtctgcagagggagaaaagaacccacaagggaagaggtggaggtcaggcacggtggctcacgcttgtaatcccagcactttgggaggccgaggtgggtagatacctgaagtcaggagttcgagactagcctggccaatatggtaaaaccccgtgtctattaaaaatacaaaaattagctggctgtggtggtgggcacctgtaatcccagctactcgggaggctgaggcaggagaatcgcttgaactcgggaggtggaggttgcagtcagccaagatcgtgccactgcacaccatcctggatgacagagcaagactccatcac

SEQ ID NO: 1057 - DNA, 2297 bp, Homo sapiens
aatgttcaggctttattccttcacgtatttttttctgccctccacctcctttgggagcaccccttaccgttggttaggctcctgcacctcacccacgccacactcggggtttgatccagtgatcttctctctctcagtgctccccgccacactcggcgttcgccccagtgatcttctctgtctgtgctccacgccacactcggtgttcgccccagtgatcttctctctcggtgctccccgccacactcggtgttcgccccagtgatcttctctctcggtgctccccgccacactcggtgttcgccccagtgatcttctctctcggtgctccccgccacactcggtgttcgccccagtgatcttctctgtctgtgctccacgccacactcggtgttcgccccagtgatcttctctctcggtgctccccgccacactcggtgttcgccccagtgatcttctctctcggtgctctccgccacactcggtgttcgccccagtgatcttctctctcggtgctccccgccacactcggtgttcgccccagtgatcttctttctctcggtgctccccgtcacactcggtgttcgccccagtgatcttctctctcggtgctccccgccacactcggtgttcgccccagtgatcttctctctcggtgctccccgccacactcggtgttcgccccagtgatctctctcggtgctccccgccacactcggtgttcgccccagtgatcttctttctctcggtgctccccgccacactcggtgtttgccctagtgatcttctctctcggtgctccccgcgacactcggtgtttgccccagtgatcttctctctcggtgctccccgccacactcggtgtttgccccagtgatcttctctctcggtgctccctgccacactcagtgtttttgctcatgtttgagttgttgacatgccgtttctctgagttcacagatcttctgaatgcctgttcttctgtgaatcccacccagtgtgattttcgtctcacacagcgtcatcttcatctctagaggttcattccagtgtcttttcctagcttccgtgtttttagtttttgaccgtggggaggaactgagttacacgatttcatgtctccatctactaattttgccttctgtgtcaattctgggtagcttttgattgacttttttttctcctatgtaatcatattttcttatttacatgcccaggaatttttttcaatatactttttatttttgaaaaattttaggtttacagcaaagttgtaggtcgggtgtggtggctcacgcctgtagtcccagcactgtaggaagccaaggtgggaggattgcttgagcccaggagtttgagaccagactgggcaacgtaaggagacctcatctctactaaaagtaaaaaaaaaaaaattagccagacgtagtggcgtgtatctgtcatcccagccactcagaaggctgaggtgggaggattgcctgagccctggaggctgtcgtaccactgcactccagcactgtaatgcattgctgtcctatttattttttgctcaaattgttccaccttccatgcctgagaatatttgatgggatgctggacattgtgaattttacctcattatgtgctggataattgtatattcctgtaagtcatcttgggctttgttctgggatccacatagttcctcggaacctttttgcccctttcagctgttgcttttaggatttgtgagacaggctggagcttggttcagttttgggttcatcattccccgggctgtggcagtgccttccagaaccttcttcccagggctgcggacagggatctggctgggcagtggcaccattccagacctgtgtgagcccgggacctgccggctcttctttgtgtggatgacgtcctgtccgctaaacctccaagggggtccccggctcatcgcagggctcctgctctatgcagcctccttcagccccatcttctcaggtgcaaatattttccagtgatccttattcccagtcagagacacacatgcagcattcaggcttttttgtcatctcgtgggcttttttgtgacgtgtgtgtgttcgacagcaccacagggaaacgcaaatcttgcttattttctattccgtgtcgattttcaagacattaaaaatcaacctcatggaggctgggcgtggtggctcacgcttataatcccagtactttgggaggccaaggcgggcagatcacgaggtcaggagttcaagaccagcctgaccaacagagcaagactccgtctcaaaaaaaaaaag

SEQ ID NO: 1058 - DNA, 3057 bp, Homo sapiens
attgactgagactgtgtttgggaaggaggctgagtgactactggactggatattgactctaactcttattcccaagcttatatccttaatcacctaaagatcagagtgtgaagaaacaaacctgtgacagatctgtggttgaggtttagactacgggaggagtatattacctgactttctttgtaacttgtaccatgactggggcagagattgagcctagtgcccaggccaagcctgaaaagaaggctggggaagaggttatcgctgggcctgagagagagaatgatgtccctctggtggtcagacccaaggttaggacccaggcaactactggggcaaggcccaaaactgagaccaagtctgtgcctgcggcaaggcccaaaactgaggcccaagcaatgtctggggcaaggcccaaaactgaggtccaagtaatgggtggtgcaagacccaaaacggaggctcaaggaatcacaggggccaggcccaaaaccgatgccagggcagtaggtggcgctcgttctaaaactgatgccaaggcaatccctggagcaaggcccaaggatgaggcccaggcatgggcccagagtgaatttgactgaagcagtgtcacaggcagaaggagtgtcccagactaatgccgttgcttggccactggccactgctgagtctggatcagttactaaatctaagggcctgtctatggatagagaactagtcaatgtggatgctgaaacctttcctggcacccagggtcagaaaggaatccagccctggtttggaccaggggaggagactaatatggggtcttggtactattccaggcccagggccagagaggaggcctctaatgagtctgggttctggtcagcagatgagacctctacagcgtcttctttctggactggagaagagacaagtgtcagatcatggcccagggaagagtccaataccaggtccaggcacagggctaaacatcagactaatcccaggtccaggcccagatccaagcaagaagcctatgttgattcctggtctggatctgaggatgaggccagcaacccattctccttctgggttggagaaaataccaataacttgttcaggcccagagtcagggaggaggcaaatatcaggtccaagctcaggacaaatagagaagattgttttgaatctgagtctgaagatgagttctataagcagtcctgggttttgcctggagaagaggccaatagtagattcaggcacagagacaaagaagatcctaatactgccttgaaactcagggcccagaaagatgttgacagtgatagggtcaaacaagaacccaggtttgaggaggaagtcattattgggtcctggttctgggcagaaaaagaggccagtttggagggtggagcttcagcaatctgtgaatctgagccaggaactgaggagggggccattggcggatccgcgtactgggctgaggaaaagtccagtttgggggctgtggccagagaagaggccaagccggagtctgaagaagaggccatatttgggtcctggttctgggacagagatgaggcctgctttgacctaaatccctgtcctgtgtacaaggtcagtgataggttcagagatgcagctgaggagcttaatgcatcctccaggccccaaacctgggacgaggtcactgttgaattcaaacctggtctttttcatggggttggcttccgatccacaagcccctttggaattcccgaagaggcttctgaaatgcttgaggcaaagcccaagaacctggaacttagcccagaaggagaagagcaggaatctttgcttcagcctgatcagcctagtcctgagttcacatttcagtatgatccttcctaccggtcagtccgggaaattcgagagcatcttagggccagggagagtgcagagtctgagagttggtcctgcagctgcatacaatgtgagctgaaaattggttctgaagagtttgaagaattccttttattaatggacaaaattcgggatccttttattcatgaaatatctaaaattgcaatgggtatgagaagtgcttctcaatttacccgagatttcattcgagattcaggtgttgtctcacttattgaaaccttgcttaattatccatcctctagagttaggacaagttttttggaaaatatgattcacatggctccaccttatccaaatctaaacatgattgagacattcatatgtcaagtgtgtgaggaaacccttgcacatagtgtggattcccttgagcagctgactggaataaggatgcttagacacctcactatgactattgactatcacacactgattgccaactatatgtccgggtttctctccttattaaccacagccaatgcgagaacgaagtttcacgttctgaaaatgctattgaatttgtctgaaaatcctgctgtggcaaaaaaaactattcagtgccaaagctctttcaatatttgtgggtctctttaacatagaagagacaaatgataatattcaaattgttattaaaatgtttcagaatatcagtaacattataaaaagtggaaagatgtccttaattgatgatgatttcagtcttgagccgcttatttctgcatttcgtgaatttgaggagttagctaagcaactacaagcccaaatagacaaccaaaatgatcctgaggtgggacaacaaagttaatatgattaaccacctgccgctggtcagccttatgttcccaaagagcccttagtagtgctttggtgttcacagtctgtttttttgttgtaacttatattttttaatgctgatgttaactttgtcagactcttgttttgagctggatcattttgtggatgccaaatgaatatcaaaactgaaaacacatttgttgatatttgtcttgctgtccagattgcggtatttttcagtattaagttttcaatgaactgtgtcacctaagtaagctgccctgctattcgttgtttaaatatatggttctctatttgagtctgtgttttcaataaagttctatgttaaaattggat

SEQ ID NO: 1059 - DNA, 1567 bp, Homo sapiens
agacactctccaaaaagcagagacagcaggaagaggggagtggaggcagcccattcacctggggaaatgactgggttgtcgatggacggtggcggcagccccaagggggacgtggacccgttctactatggtaagcctgggcccctgcgcacccttcctgagccctcaggaccccttccaccaagcagcggcctctcccagccccaggtccatgctctgtgccccttatctcccctggttaccacgggctgctgcgggcaggctgcggggagagacagctgctgggagagaccacccatcccgctcctcttgccctctctttccggagactatgagaccgttcgcaatgggggcctgatcttcgctggactggccttcatcgtggggctcctcatcctcctcagtaagtggggtggcctccagggaaggggtgctgaccagggcacctctcttctcaaggccgctgagcaggctggctttcgggagttgccaagggaggggtgagcctccccaccacgccccccactgcaggatgtgggaatgggtgcccggtggggtgccaggctcgctgggagcacagtgtgaggttcctgcttgctcaagtgcaccctccagtgggcccgggaggagccgcagaagtgagagcaaacccacggggtaactgggtaaccggagggccagacagggggactaggccccccgctgctaaccatggtcccaaactcatttgttaaatagggatgatcccacctgcctcacaagattagggctagcatccaaagacatggcagtcaggacagcgctctgagaacggtccagtgcagactcggagtgttctgggggagacaaagagagttatgtatcctcaagccccgaggggcacacagcaggagcttaataactgcacattgacttgttttggtccaacccaaagaaaaatacacagaaaacacaacccatggaaagaagatacagcaagcacacctgtgggctctggacttctaatgcacgtgtgccactgccaccccaccccaaggctcgggccacagtcctgcgggtctccccattttcccgtgttgcccatggcagctctctctacgtgtgccactgccagcccaccccaaggctcgggccacagtcctgcaggtctccccattttcacatgttgcccgtggcagctcccggagggcagtgccgggtggcagctgatcacataggcacaggaggcaggtggcctaagcaaggggctccactttggagttgctgccatccttctccaggtgttcatcgggcagctgtgctgggggcaccatgatggcccagtctctgctgctactctcgatatgccaacagaccaccgtggatctgctccagtaaatatttgctgactgactgactgacttaggttcttaaatgcctatggtccagccttatataaagagagagaaggctgggcgtggtggctcatgcctgtaatgccggcatattaggaggccaaggcaggaggatctcttgagaccaggagtttaagaccagcctggtcaatacagtgagacccgatctatac

SEQ ID NO: 1060 - DNA, 2673 bp, Homo sapiens
attgtctgtcacccagtagcacatgggcacttgagggacagagagctttgccctattttgttgctggctgaatccccaggccctgggacagggctggcacacagcaggggttcagtgaccagatgggcagggcaaacacatgtgcattgactccagggtacctctggctagaaaggaggcaaatatgtcacttggagacaaactgtcatttatggcagaagagtccacagtagcttggataggagtgtggggcaaaagttaggcagcccagacattgcacgccagccttggcccctggcccgctgcccgccagctcagacatgctccctggaggaggagggggacagccctttgtaaactcataaagggcagctagctatggccacagttgctctaggaggcagcatgaggcccataaaccccacctctgacagctttacagggcttggtgtgagtatgccagagatgccatgcatagtgccatcagagttcccaagtaccaaccagcaagggtggaagagctcttacacacaaatctgccaggctgtcattttccgaggtggccatcaggtcacccggcttcccagcatctgggttccctgactccctgtgctgctgcctcttctctaagagtgttggattcatgggccgggggtggggggcagccttccaggccaggaggggctccctaattcctccccagcttggtgtgcagtccttggagccttaatataattatgataactggcacttatcatgtgccagtcatcataaaaaacacgttacatagctgtccattttataaatgaggaaactgaggctcagaggggtaacttgcccaggattatacagcgagcagctagcaggtgtcagagctgactgttgctcaaaataccatgctcttagccacatgccccatttgagtctcagcttccaactctgacccctgcttggtggttgtccaaggaccactgagaggccccatgacagatgatggacagaatgggagcaggacccaggagcctgggcccaggcaggaagaagccaagggtcaagggctccacctgctggtgctgtgtacaacccacagccagccaagcccaggaagctcctgacagttttgacctgggcacacttggccagtatgccttggacaaaaggttcgggggcacaggccaggatttctctgagggtcgcttccagatcccttcccaggaaacaccggtgctggctcgcctgctcaagaactgctccctaagactgtccatcttccctcctggtcagaaaacacgttgttatccaaacacacccctcgcttccccacctctagatctctactcatgctgtttcctgtgcctggcatatcatctactctccttgtgcgccaaaatcctactcatgctttagagcccaactcagatgtcacttcctccctggtgccttcactatgtggaatgtatccactgtcattgaatttcatttattcatttgctcatcatagagacccctgggccaggctgtgaccatttccccttcacatgcctctggtttgtctcctgtttcagtcctgccttgtggttttcacacagctgatgctcaataaatgcgtgctgagcaaactcacaaggctggggtgttcaggtctgatcatgtgcgtgtgcgcaggtggctgcacttacagagagacgcctgaagagggcagcacactggggcgctaacttggagagtgaggccgcgtgatttgttagaggaggaagccggagggcggagggagggccagcccctccccctcaactcgggctccagacgtagtttgagtcccctgtgcccccactttgctgggtgaccttgggctttggggttggttccaggagccactcagccaggccagcccgcctggcggacgccattcccaggagatgaccaggccctggacagccgacacttggaagactgccacgtcctgcctccgcaggagccgcagctccccggggctgcagggaagtggtggctgggctgggggggtggggggtgagcccgcggggactccaggctccaggtgcccacaccatcccgggggtgggcagtcagggccaagaacgcacagtaaacccccagcacacacaagcgcacacacgcacatgctgacagcactcgcatttttaagatggggaaatagaggctcagagggggcatgcgcgttcctgcccctcaggatcaccagcctgcccccaggagaaaagggaagggaacaaggctgatggctggttccaccaactgggcgcccgggctcagggtgaatgtggggggctgtgacccctgagacgttggatctgcctccctggtatggtttggatgtttgtcctctccgaatctctcactgaaacgtgactcccagtgttagaagtggggcctggtggggggtgtttgggtcatgggacagaccctcatcagtggctctttgcagtaatgactgaggtctggttgttgaaaagagcctggcacctccctccccgacttgcccccgtctcaccatgtgatgcgccggatccccttccccgtttaccatgcgtaaaagcttcctggggcctcaccagaggcacatgccggtgccatgcttcctacacagcctgtagaacaccaagtcaaataaacgccttttctttataaatt

SEQ ID NO: 1061 - DNA, 2341 bp, Homo sapiens
actgactggcccccgagcccggggcatctgagaaacctcctgcgaatggctacagaggaaattttcaggtgcgagagatctgaagaaagttctggaacccgcgcctggaccggtttggaccctcagtggaaacacatcaaagagaaggaaaaccagctggggaaggatcctggcagcggtggctcagggtgctgggcggaggccccgtttttcaccaaccgacggctgggagagcccgtgccacccactgtgccctgagacccgcacaggacggcgactcacagatgccttttgctgccctgcccgggtcctggcacggcgcgaggtgcgtcaggccaggcagccacgcaaaggccccggctcctggcttctgccatctattctgtcctgcaactctatcctggagcctcccatcccttcaaaagctgcaggaagaggcctgcaggcaagagaagaggactgcaggagtgagcaatttaagaaatggaaggccgaggttttccaatctaattaacagcatgacaagccaggatgggctgctgacccgcgtggagccttgcacagccagaaacgcggtgtcctgctccgctcctgagacgccagggctgtcactgcaacacagcccccaacacttccacacgggcggactctggctctccaggcaccgcagtgccctctccttcccttcccagctctcctgaggcctgtggttctgggagtctctgccccgtgcaagcgtgaccgtggccctcctcccatgtccagccgcaccaggccctgggatcccagatctggcttcacctttgcaaggggctcaaagcaagcacctatgggggtgggggcggcaaagccatctggccaaggtcccttctctagagtgcctgtctgtccgtctgtccttgaggagcctgaggagtgcagggcaggacaggcaggcaccagctgacccggtaccgggcagggaccagtgcaggacctcgaggcagggctgggtggggtgggggtggccagagtctcctggctcggagcagacacgggtgagtggcacagaccgtcctcacaccctcctgggacagaggtaggaatccgtgaccaggacagacacaggcaggactgggagaggcagagcaggtgcctgagcttggccacgcacagcttccaatgaggttgggccatccacagctccccaaggttccccgccactgttcaccccaccccagcacagccgagagctgtggtttctcctcccatggagtcctgcatggctgcccactgcaggcccagcccaagggcaccgccttctccaggctgccttccctgcacatgccacacctccagccccagaaggttctgaggaggggaggagctggggcccccactcgccctcctgttgccaggatacaggcccaggaaaaaatgccacagtgctggattaatgtctagacaacgtgacctttcccctggttctctagatataattgggacccaaattgtccggtgtcatgagctgacagcagggatgaaggaggggtctgttctcggtgccccgaggggactccgggagagggagagggcagcccactacctgcgtgggggctgcagggggacgagccagggtcgcccacaaaggcgctttctgtggaggggacgtcacctcttccatcagcgatgacgcagctctgagatcacagtgtcctcgcagtggctcccgttaactccctgctgcccgtcctgccaggctggtgccacgagaccctcggggctgggccgtgggacaggtgcctgcccagccctgcaaacacatccagcaggtgtcgagggctgccaagcacagacttctgctgccagccatgcacagtgccagctgcgacagcaacgcctctgccaggagactcggaggagaccggccctgacgctcctgtcggggggagctgctgcacactcaggcaggatgcaggggtcctgagggggaccctcggctcacccacggctcccgtggccggtctggtcctggtatttatctcaacttcattgttgtccagaagctgctttttattatttgtgaccgtgaaaggatggaaacaaattcctgttttgagtcaaagctacctgcgtccaccgggccacagagcggggacacggccgtaatgtggagtcagtaagccaaggttgtgagaagattctcaggaggggggtccagggagggagaactgagggctggggttccgggggacattttactttttattccaggcagcgctgtactggctggggcctcaaatgctgaataatgctcctgttggacttcagtaattttaaaaaataaaactgtttaaaaatc

SEQ ID NO: 1062 - DNA, 2435 bp, Homo sapiens
tcggactctgagcaggtgcctccttgctgccgcagccaggaaaccagaacagctgttggcagtaaccctgaccctccccatttccccagcttgggcagcgaaccgaagagctccccagctggactcattgcagcagccgacggcagctgtgccggtggtgagccttctccatggcaggacagtaaaccccgtgagcatccaggactggggcaactagaacctccccactgtcactacgtggctcccttgcaaggcagcagtgacatgaaccagagctgggtcttcacccgtgtgataggggtcagcagagaagaggctggggctctcgaggctgcctccgatgttgacctgaccctgcatcagcaggagggcgcccccaactcctcctataccttctcatccatagcccgcgtccgaatggaggagaatttcatacagaaggcggagggggttgagccccggctcaagggcaaggtgtacgactactatgtggaatctacctctcaggccatcttccagggcaggctggctcccaggacagcagccctgactgaggttccatcccctaggccaccgccagggtccctgggaacaggggcagcctcgggaggccaagccggtgacacaaagggtgcagccgaaagagccgcctccccgcagccagggccgtggccctccacccgaggcttcagccggaaggagagccttctgcagatagcggagaacccagagctgcagctgcagccagatggcttccggctccccgctccaccctgcccagacccgggcgccctgcctggcttaggcagaagcagccgggagccccatgtgcagccggtggccgggaccaatttcttccatatcccgctcacccctgcttcagccccacaggtccgcctggatctgggcaattgctatgaggtgctgaccttggccaagaggcagaacctggaggccctgaaagaggcggcctacaaggtgatgagcgaaaactacctgcaggtgctgcgcagcccggacatctacgggtgcctgagcggggcagagcgcgagctgatcctgcagcgccggctccggggccgccagtacctggtggtggctgacgtgtgccccaaggaagactccggcggcctctgttgctatgacgatgagcaggatgtctggcgcccgctggctcgcatgccccccgaggccgtgtcccggggctgtgccatctgcagtctcttcaattatctcttcgtggtgtccggctgccaggggcccgggcaccagccctccagccgcgtcttctgctacaacccgctcacggggatctggagcgaggtgtgcccgctgaaccaggcccggccgcactgccggctggtggccctggacgggcacctgtatgccatcggcggagagtgtctgaactcggtggagcgttacgacccccgcctggaccgctgggactttgccccgccgctccccagtgacacgttcgccctggcgcacacggccacggtgcgtgccaaggaaatcttcgtcaccggcggctcgctgcgcttcctgctgttccgcttctctgcgcaggagcagcgctggtgggccggccccaccgggggcagcaaggaccgcacggccgagatggtggcggtcaacggctttctctaccgctttgacctcaaccgcagcctgggcatcgccgtgtaccgctgcagcgccagcacccggctctggtacgagtgcgccacgtaccggacgccttacccggatgccttccagtgcgccgtggtggacaacctcatctactgcgtgggacgccggagcaccctctgcttcctagcagactctgtctcacccaggtttgtgcccaaggagctgcggagtttcccggccccgcagggcaccctcctgcccaccgtcctgaccttgcccacccccgatttgcctcagaccagggtctagcagtccctcaactgagctcctcatgcaaagctgggggccaccgggctccactgccagccgtccctctgggggccatttctaggcaatcaggcaacccaggaatgtggccatcaagaggtgaattccggtcctttctcctcccctagctggggagagagggatcttagatgagtcttacccttcatgggctgcagaggccccactgcagaaaagaggaccaggagctggtgttccaaggcagaaggcattcatgtcttcagggatgaccgcccttgcttcaactctgaattcttggggggatacaccgggaccccaccaaagcttagggggcatagtctttttgcaatcacaattctaggagccagttgaccccagcagcccctcgctagttgctctggagaggggttggctctctgagccatcagtgccccttcctaaacatcagccactgggccccacctccacagttcccagaagcaccgggacacacc

SEQ ID NO: 1063 - DNA, 1998 bp, Homo sapiens
ctactcatggcgcctgccctggttggcgatgtgttaccaacgtctggcctgtcccagcccaaggctccgcgtggcgaccaggcccagcactgggaggctgtgcagagcgtggcgtttactgcttattgctactctgcagaggttggcaacatctgacccgctctactggcaggaaacaggctcgggggcattgggaaaacgatcaaggccacttggctggacactggcggagcctcgcactcaaacctgtcgggcctcaactccgtgccaggccaacaagttgccctgggcagttcaagctggggataagggggatggggagcaggaagacagcagcaaggatgcgatcccgaaggaactttcctcctcagactgctccatgtccatgtggggcaggtcgctgaagagttcgaaaccgtgctcagcaccgcgtttggggcatgtgagaccgagaggctttgggaaactgacgccgctgtgagaacgagtttagcggagtctatggacgctgcgagcttgtggccacaagagggcgccccggagcacggcccagtccccgcccccgctggatggggcccggcctcttcccagcgttcctcctccggccccaggtcaccgccagcacgcgcctgcttcccgtctgcgcgagtccacgcagctccccaggtctggggcactccaaggaagcagcagcccctgcccctattggggagctggcccctggcagcttcctggcggctgtggtggatgccttggagctgggccccccggttgtgatcagtccatcactgagtggcatgtactccctgcccttcctcacggcccctggctcccagctcccgggctttgtgccagtggcccccatctgcactgacaaaatcaatgctgccaactatgccagtgtgaagactccagctctgattgtatatggagaccaggaccccatgggtcagaccagctttgagcacctgaagcagctgcccaaccaccgggtgctgatcatgaagggggcggggcacccctgttacctggacaaaccagaggagtggcatacagggctgctggacttcctgcaggggctccagtgaagcccagcactgctgcagggggtgggctgcctgcctgctctgagctctctcttgcacgctctctcttctctcccaggctctggctcatgcacatgcaacaggtgcgtctgtctatatgtctgggttcttgtcttttgtggtctgtttgtcttttctacctctttctcttgcagtgatagactgagggggtaaaatcaagagaaaaaactctcaggaatcaaggaacataatcctgtggagggtaatccattacatgagcttctcctgttcttccactttcctgcctggctttcactccttcccctgctctgcccagcctttccctcccacccactcctccttctgcaaatgccctgaaggccagcccttaccccaacacccacttccccacctccttaggccccagatacatacatgcccacatgcacgcttacatgtttagagccatccttgtttccaaatatgacccttcgcttgagggcaactgcataggtacatctaactctggactggcatgcacattgtcatgtgcagctttgcatatacacacatgcatacatgagcctccacacaagcacttgcacacatgtggactcctaaccatgctaacctcactggctgggaaggtggggaccccatgggccagcccttgcaggaggcccttttgcaaggcttagggtgtggccagccctgaaagctacttggacacaggtttcagctggccccagcccagaagtgacccccagaaagggagggccaccgctttgccccctgcttttacccttccttctgggtgctctacacctcaggttaccaggcctgaggcatctcagccaagcttgtttcctgctctgaggcttgtggggtgggagccagagtggaggtcggtgaaataaagtgatgcaattag

SEQ ID NO: 1064 - DNA, 2367 bp, Homo sapiens
agacacaaaatcagccagggggagcccacattggagggcagtccacaatggaaggcttcttggaggaggagatgattgagctgcttctactaagatgagtatctcagagtcctcaacgtgggtgtggccgaggtgaagaaatccttcctggggcccttgtccccgtcctgtaagatggtgcagatgatgaggcagtttctgtaccgggtcctgcccgaggactcctacaaggtcaccacggggaagctccatgtgagcctcacccgcttaacggacggggaaaatgtggtggtttcagagttcacgtccaaggaggagctcattgaggccctatactgcagctgcttcgtcccggtgtactgtggcctcatccccccgacttaccgcggtgtgaggtacatcgatgggggcttcacgggcatgcagccctgtgccttctggaccgacgccatcaccatctccaccttcagtgggcagcaggacatctgtccccgggactgcccggccatcttccacgacttccgcatgttcaactgctccttccagttctccctggagaacatcgccaggatgacccacgcattgttccccccggacctggtgatcctgcacgattactactaccgagggtacgaggatgcagttttgtacttgaggcggctgaatgctgtttatcttaattcttcctccaagagagtgattttcccccgggtggaagtgtactgccagatagaactcgcccttggcaatgagtgccctgaacgcagtcaaccaagccttcgagcacggcaggccagtctggaaggagccacacaacctcacaaggagtgggttcccaaaggggatggaaggggcagccatggtccgcctgtgtcccaacctgtgcagacacttgaattcacatgcgagtcacctgtttcagcaccagtctctccacttgagcagccacctgcacagccactggcctcttcaactccactttctctaagtggcatgccacctgtatcattcccagctgtgcacaagccacccagctccacacctggttcatcactgcccaccccaccacctggactgtcacctctgtcacctcagcagcaggtacaaccgtctggatcaccagccagatccctacactctcaggcacccacttcacacaggccatccctggggccttcaactgtgggggcacctcaaacactgccccgaagttctctttcagccttccctgctcagccacctgtggaggaactaggccaagaacagccccaagctgtagctcttcttgtctcttcaaaaccaaaaagcgccgtgcctctggttcatgtgaaggaaaccgtcagcaagccttatgtaacggagagccctgctgaagactcaaactgggtgaataaggtcttcaagaagaacaagcaaaagacaagtggcaccagaaaaggcttcccaagacattcgggatccaaaaaaccaagcagcaaagtgcagtgagcatgtctaatgttccttaaatcccacggagaggagcagctttgggaactgtgttcagagagattccgaggaatagaggagagtgtaagggagtagggggtgcagtgggagattgggctttggaacagacacatccgacataaaattcctgctctgccacagctccactcagggatcatggttgggacacttgctctccctgagcctccatttcctgtaaaatggggatgataccacttcataaagttgtgagagttaaatgtgatcgatgatgtaaattgcttcatagaatgcagaatgtgtaatagctcacaataagtaggtattatgtttacatattatgtttgtatttatgctacttaaatacaaaactggacaggccaggcatggtggctcatgcctgtaatcccagcactttgggaggctgaggtaggtggaaaacctgaggtcaggagttcaagaacagcctgaccaacatggtgaaactccatctctactaaaaatacaaaaattaaccaggcttgatggtgtgcacctgtaatctcagctactcgggaggctgaggcaagagaatcgcttgaacccaggaggcagaggttgcagtgcaccaagactgcgccattgcactccagcccgggcaacaagagcgaaaccccatctcgaaaaaaaacaaaacaaaactagacaagtgagtgcctacgtgacactcaaatgttgccagcatacagttaagggccctagtcaatgtaggcctgcttcttatagctttttgactatattatgctgtctttgacttagtcagtcaacacttattgagcacctactaagtgccaaacactctcctggactctggcaaaataaaaaatgaattaaaactct

SEQ ID NO: 1065 - DNA, 1803 bp, Homo sapiens
gaaataaaacaaaagcatattcaatggaaggtcactctcaatcttacaccagtctctgggcccagagacagccctgggctgctcctatgggtttttccagcctgccttcaggccaagagtttgaagctggtgcttgaggttggaggaaccggagggaacagctattcaccgaagccatggaggttctcctgggtggaccatgggacatgggagaggcatgtccttttgggatgggtgcctggcgtgccactgcatggccagccgtgatgcagtcattcccgactagtggaatgagctgcttgtttcatgtatgcccctttcctgatgtcccaccaaatggacaatctgcagagacacctatggtagggtggctaccgggtcagtggcttattctctttgtcatggttgcctggccctctccgatctctgcccgccccttgcctatctctgctttgtccccgcaaatgtcatcttttccttttcatcttgtggggtgcaggggcctgggctaggtagggtttgggaaagagcccttgggaccctttggggaggatgtgtgaccgggagacccgtgggtcaggacagagggcatctctaccttcctccattgtgtgataagggtgtcggttggcagatcaaagggctttttgttgttttattttcctttccagagccttcttgctgggaaagcaggctgtacaaccaaggggaacagctgccacctgtgtgtcctgtgagagggcagggccagccaggggcatggggcacctggtgctgctgaggggctgggactgggccacaggtgggagatttccctgggggactctgcacctagaagctgatggggacgtagtggccgagctcagaggctgtgggccctcagcaagacagggacacctggaaatgcagagaattagcaaagaattgggggagctgcccccacaaccccatcctagcctgtgaatttctgtcttccattgttcctcaaatggagtgatggagggagcactggactgcgagtccggaaagcctgatctttaagtccagtcttggtttggttctaacaaactctcatgttccctctggacttctgttttgagatggagtctctctctgtcacctaggctggagggcagggttgagatcttggctcactgcaacttctgccttccgggttcaagcgattctcctgtcccaagtagctgggactatagacgtgcaccaccacacccggctaatttttttgtatttttagtagagacgaggttttgccatccctgtggatttctgatatcccatccgcatcacgggagtggggctgcttgttctccttttaactccagagcctctgggtctcccctgagagtcttgaacggggaacatgacctcggagccttgtgtcccctggagaaaagctctcaggaagccgaggcgtggttgttgatggaaatggggatgttgtttaaataaattaagagccaaagaggacaatccgtggcattcttttcaagagctgggatgatatgcataacatttcctccctttcatttgataatttttccttctcaaagcagtttaatgaaagaaaagtgtctgaagattggctgcacaatgagctcaaataaaaatattcttttaaaaatgtggttgctatgtaatcgaatttaaataatgggcaatttttgtttcttcgtagtctagccactcacaaaggtctattcaaacctgtctcagacatgtatgtgtgtgtgtgtgtgtgtgtgtgtgtaaagaaaaatgaccttactgatagaatatttttgg

SEQ ID NO: 1066 - DNA, 2384 bp, Homo sapiens
ctggggccctttgccactcccttggcaaggagagccgagacctcagttcccggcggctcttgcggggcacaggtgagccctggctgcgcgcgcggcccctcctccccggcgcctcccagatgggggctccggaggtggcgcccaggctctgagctaccctaggtctgcagactagcgggcattggccagagacatggcccagccactggccttcatcctcgatgtccctgagaccccaggggaccagggccagggccccagcccctatgatgaaagcgaagtgcacgactccttccagcagctcatccaggagcagagccagtgcacggcccaggaggggctggagctgcagcagagagagcgggaggtgacaggaagtagccagcagacactctggcggcccgagggcacccagagcacggccacactccgcatcctggccagcatgcccagccgcaccattggccgcagccgaggtgccatcatctcccagtactacaaccgcacggtgcagcttcggtgcaggagcagccggcccctgctcgggaactttgtccgctccgcccggcccagcctccgcctgtacgacctggagctggaccccacggccctggaggaggaggagaagcagagcctcctggtgaaggagctccagagcctggcagtggcacagcgggaccacatgcttcgcgggatgcccttaagcctggctgagaaacgcagcctgcgagagaagagcaggaccccgagggggaagtggaggggccagccgggcagcggcggggtctgctcctgctgtggccggctcagatatgcctgcgtgctggccttgcacagcctgggcctggcgctgctctccgccctgcaggccctgatgccgtggcgctacgccctgaagcgcatcgggggccagttcggctccagcgtgctctcctacttcctctttctcaagaccctgctggctttcaatgccctcctgctgctgctgctggtggccttcatcatgggccctcaggtcgccttcccacccgccctgccgggccctgcccccgtctgcacaggcctggagctcctcacaggcgcgggttgcttcacccacaccgtcatgtactacggccactacagtaacgccacgctgaaccagccgtgtggcagccccctggatggcagccagtgcacacccagggtgggtggcctgccctacaacatgcccctggcctacctctccactgtgggcgtgagcttctttatcacctgcatcaccctggtgtacagcatggctcactctttcggggagagctaccgggtgggcagcacctctggcatccacgccatcaccgtcttctgctcctgggactacaaggtgacgcagaagcgggcctcccgcctccagcaggacaatattcgcacccggctgaaggagctgctggccgagtggcagctgcggcacagccccaggagcgtgtgcgggaggctgcggcaggcggctgtgctggggcttgtgtggctgctgtgtctggggaccgcgctgggctgcgccgtggccgtccacgtcttctcggagttcatgatccagagtccagaggctgctggccaggaggctgtgctgctggtcctgcccctggtggttggcctcctcaacctgggggccccctacctgtgccgtgtcctggccgccctggagccgcatgactccccggtactggaggtgtacgtggccatctgcaggaacctcatcctcaagctggccatcctggggacactgtgctaccactggctgggccgcagggtgggcgtcctgcagggccagtgctgggaggattttgtgggccaggagctgtaccggttcctggtgatggacttcgtcctcatgttgctggacacgctttttggggaactggtgtggaggtgagggggtcctgggcggactgggtggtgagtgttctccccttagtggccgggacgtgtggccgggaggttctcaggcctggacctttcccatcagggccctgtgtctccacccttcagaggaagactcaggaaatagaaccgaactcatttttagattggaaaggaaaacaggtttcaaagtgatgtgtatggccaggcatggtggctcatgcctgtaatcccagcactttgggaggctgaggtgagtggatcacctgaggtcaggagtttgagaccagcctggccagcatggcaaaaccccgtctctactaaaaatacaaaaattagcagggcgtggtggcgcacaccagtagtcccagctactcgggaggcagaggcatgagaatcgcttgaacctgggaagcggaggttgtagtgagctgagattgcgcctctgcactccagcccgggcgacagagcaagactgtgttgcc

SEQ ID NO: 1067 - DNA, 2907 bp, Homo sapiens
ctttttcctgtgagcttctgcaaggtctgcagcaaacacctcacaagcgttggggaaaaaggatgtatgttccctgcctctgaagaaacaggcctgacggttgggaagcacacccttcccctctcagaggctttctcatcggctcttcctcatcggctgcttcttgggagagtgctgcggtttgggctgttttagtctccaaggggatgggtgatttatatccttttattcggcaaacagctttgtacagaatgaataccgcttgctgaatgtcaccaggcgggggcaggggagccgtatagaatcccagtgaagccttccaggcctgggcaaaatggcacctggcgactcgatgaggacaccgaggcccagagaggtgtcctgccaaagccacacagcacagaggagcagagcccgggtccagctatttctcctatctcaccacgctgcctcttctcactggaagagtgtaccaacgcgggagtctggcccctacccatcccaagcctgatccctacctaaggtccacagagcgtctccaccagcagctccaggagggatgataaattgtcaaaagccaccaagagtcagggacaggaactcagttctgcccagctgagggctgtgcagggatttcaaggtacctgtgcgaaccccagccctcactcattgaactcagtcagaaaaccaccgcgtcagtggatttagaaatgtgacagggatttcagagggcaatgggtccagccctcacaacccagcaccactctgcaggcatggaaacgcaggcccagaggacaggggcttctcaatatgggcacacagcaccaagacagctccataaatagaagtgaaatatccaagctcccactccagggaagctgaccactgggtggatgactcccccagcgtccaaaccctctctggcagtcccttgctgctccaggagcgaggatgaaagggagagctcttcccagggcctccggggagacacttctgctgactgtccccaaggagaaagaggggagagaaatgagggagggtccctgaagaatggagaccttcaagaaggaggccaacctcggggaccagtggaagccagaaagagcacgggggcatggcaggggctgaagccgatgtcccagggaaggagtagctgcaaggcccctcagcctcagaggagcgccagccccgccctgccattctggacaaggcatgagtgtgaagagactcttgcctgtccacactatcaaggctgagcgggggcaaaggcagccccctgggggtccccaccctgctactggactttaaaaccattttctttggttttaaagaaacgatttttctttggtcatgattttgttggtagatttatctttatggaattgtagtattttcttgctctaaaaccctcagtttaaccccttcttttttctgtctcacatttttgcctccagcgatatgaaaatgaaccttggagaatgggagggtcctgggggaggggggctgaggggctcttcaccaggcagagatgaaccccagtgctgacacaagccctttccttttcctggtttctcttgccctggagagtgacaggcagaaagggctttttgtctctttggaccatttctgtatccctgctgcctcaaacgaagcctggcctggggcgaactcaatcaatgactctgatgggagacagggctccggcccactggggtgatgggctaaagaggggattctggttcctgtggacaatctggaagctggaagctgttagaactggagcgaggatttcaccaaggagctcacagagagagcccgggcaggaactctccaatcatctggcggctgaggccctttcgctggaggaggaaatgggccacaccgatgggggtgtccgggatgaagccgcgtgagatcaggaactggatgcccttgtcggggtttctggaggtgggggtggggagaagcagtagagagtgagctgaagccatccacgactctttcctccctgtcttccacccatagaagtacccagaggttcttggaaatccagttccccattgaagcttctctcaccagagcctcaacccactgaatgtcctcacgcagaggatggtgtgtgaccagaaggaggacaggggagatctgcaaacaaagtccccaccgcagacgccccaaccctggagagagggtgggagaaacagaggtgagacctccgccacaccacctcttccctttgcaagctttgaagccatgctgctccctgagctgttcctcacaggtccgggaggagataagtacagaaacacaaggtctgccgagtactagctatttcatcgtgtgcatttcgccttactggtgtgagccggcttcttttctgtaaaacagcatggtaatacctctgtgtagatactgctggaagattacagatgctttatgtaagggagcacatggtcttgaggctccacgtgctgagcgcgtcgtcgatggacttggccagggattgcacctgctcggtgaaggagtcctccagctcggctctcggccgtgggtgaccgcaccttgcgcagggagatccgccgtggcaggcggctctccagaagcgagttgcggattttctcgaagttcttgctgagctggtattggcggaaggcggtttggatggtgcaagcggcgcgccgggacaccagttcatgtcagagatgcatacagaagtacttatgggtaaaatgcatgatatcttgaagttgtgttaaaatattctgtcaaaaaatgtggaagagttagatgacacaatattaatgttaataaatattaataaaatggttacagctggatgatagctacgggggagtttataacactgtcgtttctacttttgtgcacactttaaaacaataaacaatg

SEQ ID NO: 1068 - DNA, 2538 bp, Homo sapiens
agatgcctctcttggttcccactgccctgctggtcttgaggcaggttgaggggggagtcacaggccatccctgcaaggaaaagcagagagggcaatttgggaaggtgacagaggaccctgtgggacgtcgagacacagccttgctgggcacagtgactggcgtgcatagtgagctgctttcccaagcactgccacccctggctctcagatatgctgctgaaaggggtgacgggcagtggggggcttgggactccgccgaggtgtcctagctcccatccccatccccaggcccaggcccaggcccctccagcatgaaaggctagggaccgcactgccatggggtttgccaggcccctgtctcttgggaagccacccctcccagggaaaagcagggctgagggctgttcaggctctgccaccacctgctctgtgacttcgggcaggccaccaattcttctgaaaaacgggagtcactgtgggcaccatcacgcccgggtacaggacgcccagtggctcagctgccccagccaggctgccctgtcctggcctcagcacacctcccacagccactgcaggcagccctggaccttctcctgctgaggccttactgccaatccctctgggagaccagacacaacaggcagcggtctgggtgactcccaggaacctgtcctccctagtggctgaggcagtaggcttggcagcagggactcagtgccctaggaggcagggctcatcccacaagttgccatggtagctcctcctcctgccccttactcatcagccaggctgtaccgacacgggctgcccaggcagggggtggctcgctggacaaagctggccgtgcaggcgctcaggcgtgcagggtagccagtgccccggccaggaatggacagcctccaggacacagtggccctggaccatgggggctgctgccctgccctcagcaggctggttcccagaggctttgggactgagatgtggactctctttgccctttctggacccctgttcctgttccaggtgctgacttttatgatctacatcgtgagcactgtgttctgcgggcacctgggcaaggtggagctggcatcggtgaccctcgcggtggcctttgtcaatgtctgcggagtttctgtaggagttggtttgtcttcggcatgtgacaccttgatgtctcagagcttcggcagccccaacaagaagcacgtgggcgtgatcctgcagcggggagtgctggtcctgctcctctgctgcctcccttgctgggcgctcttcctcaacacccagcacatcctgctgctcttccggcaggacccggacgtgtccaggttgacccaggactatgtaatgattttcattccaggacttccggtgatttttctttacaatctgctggcaaaatatttgcaaaatcaggtacaggtctttggtgtgtggggaggcccttctcccagcacactgccctattccagtgggaggggggcctggggctttccccttctctccaccatctgtgaaccagctcttgaaaggggtcacttccaacccacctgccatatcctgacctcccgcacagaggcaggtgagaggctgtgcgtcccagcctcttccaactcctcaacagggatggctgaaggggcaggaggaggagtccccattccaaaccccgggtttgtccatcctccatccatctcactcacaccttagcagggccagttttcatttatttcagaagatcacctggccccaagtcctcagtggtgtggtgggcaactgtgtcaacggtgtggccaactatgccctggtttctgtgctgaacctgggggtcaggggctccgcctatgccaacatcatctcccagtttgcacagaccgtcttcctccttctctacattgtgctgaagaagctgcacctggagacgtgggcaggttggtccagccagtgcctgcaggactggggccccttcttctccctggctgtccccagcatgctcatgatctgtgttgagtggtgggcctatgagatcgggagcttcctcatggggctgctcagtgtggtggatctttctgcccaggctgtcatctatgaggtggccactgtgacctacatggtaaggctcctgcaggggtgccttccccacatcccccacctgatggctggaggtgtcataggaggggggcaggctgtcacctgaagctatctctgtctcccgaaggaccctccccgggcctctcgtgcccaccaggtccagaccctgctcagcttacgccaggactcacacacaggtgcccacaacctgacgaccaagggtgatatttcactcacagatgttggaattttaaaaattaattagtatcattttaaaattgggagatttcacatcacaatcttatttttggattttctttaaaaatgcacattccaggctgggcgcagtggctcacgtgtgtaatcccagtactttgggaggctgagggcggatcacaaagccaggagttcaagaccaacctgggcaatatggtgaaagcccatctc

SEQ ID NO: 1069 - DNA, 2058 bp, Homo sapiens
ttgtatacaaccacgcccggcaggatgaccaccagatgaccggccgcagcaatgcctccactcagtcccagttgggcaaagtttcactccactgcggcgacgtgaacaagaatcacggcttccttatctatctggccaaatgaatacatgcaggagatgaaatatggagaaagaacaaaaggactaattccacttgtgagagatgaaggaacaggagcactctcatgtttcttaggtatgttttgtgacccagaatgtgatcctggtaaacattccatttgagaagaatgtgtattctgctgttgttggaagctgcgttgtcattgatgaaggaatatttcgaagcgctgaacaattcttgataaagttccgaaacaaacaaagcacaatcttccctcgatttacatgggagttgcattcctggaaaattcagtatattttaaaaccatgcaaaatatccttttaaaaaaatatgtaacatggagtttaggaccaaggctcagaatatttccaatccatggttgggtgcggaacctgcggatacagaggactgactataatatcaagaatcagagaagctctactacccagaagagttggaacgggccttgaaatgtaacccaagcatcttattatacaggaggctcgtgtggtccctgtttgtcatccagtcaatacggccatcagcttctggccccagacacctttcctctgcactgtggcacagaggagcagactgctttggagggcagcttcctgggagctccaggaaccctggccaggcggccactgccactgacttcctcggctcactgagcccgtgcctgcagctctcgtgtttcctctgtgctgcagtggacgcttatcttcccccgatggcacatttctttgtcacagacaggaccctcactggcagtcggaggacatcaagccctagtacaggaagggacattttcacactaatctgtgccagctggagcagtcctgccatctgaacatcatattttggaaccctgagaagctaggatgcagttaacaggcagatgaggattttaaatgcttcgcctacaacctcaattgttgtggagccaaagatgcaacagctttgaagaatagaagaattactctatatttgtcaggatctacgtgacaaacaagcgccacttggcttacattacttgcctggcttggatcccatggaatggaggagcattggaaccaagaggaaaaaaattaaagtgctttgggacagcgagccaaactcttacatagtatttgaaatggtgtggcaaacatgaaattattttaggctcaagattggtgctagttttttaccctctttttgaaaaaatagtaaaatgcacataaagggccctgccagaggtttagctcataaaatctgccaatcattggatgtgctaattggtgtagcaatctagtggtggcctggattaggactcaaaaactgacccttaccacccttggtgtcctgcagcaaagacagcctaaatcgaaaagactgatggaagtatatcaaattacgaatttctctatccctgaaaaatgcctgcaatttctgtttctccatcactccagaaatactcaaaacagcaaaaattaaatacatatgaagtgaacacaaaagacctccacagaaaaatcagtggctcatctgttgacgctattgctcgttgctcggctggccagtcatctgggctaagttttgactttgggccagtgcttcaaaatcagcaacctttcagccaaaagactgtggaatgcagccaagaccacctgtggaaagtgaattatagcatctttaatttactaccttgggctatgatgtcagaaacccagcatggagggcgcaccagttcttgtgtgggaaatctctcagagcccccatggaggcccccaaagtggctctggcaaagctgtaggggtggaggtaacaaaaaaggggacacctggctctccttcttaaatcagctcaccatgggcacacatttatattggaattttagggtcagaaaataccaaaattaaatcttctagaag

SEQ ID NO: 1070 - DNA, 1981 bp, Homo sapiens
tattttccagaaactagttcctcgctcgtggctcgcgtttcttccaaatcacctcaaaagcacggtgtttatgagcctacctaatccgatactgcaatggaattccggatatttgcagacagatctcccggctttgcaagtgtttgatgagatacgttcggaatctccttttttttctagagcccggttccaggccgtagagcaagccgacctggggctgcggcccctgccccacacccggcccgcgcgcccggcccgaggccagcacaggacgcagcccctccggggccggggctggcgggggccgctcgggctgcgggccgctctgcaacaggtcaccctgaccgcgactccgcgggttcgcgggcggccaactctgcggccaggcttctgggcgcagccgccagggccaggggagggggtgtggcccggcttctgctggtcctggctccgaggtccgggatcgggctcacctgaaggaagactgaggcgccgctgggcgccagaacagagcgggcggaggctgggggcttccgccacccaagagggagagcgaggcgggttcaaggggtcgcagcgcccccggcttcaggacggcgcccccgagcggggaccccacggccgctccgactctgagaacccgcggccgagggaggcgcgccgcccagcgcccttctccctcagcctcagccccagctccgcagccccctccctgcgcgcagggcgagcagccccggggcccgcggccgggagagccacactccgcagcgccgccgccgccattccccgcgccgcccggggggcgccgcgtacccaccctccctccctccctcccccgcaccgccccgcggcctgagcccaccgacctgtgcagccgcggccgtcgcctcagaggacggaaagacgatgccggcctcacgcttcaccgccacggccgccgccgcctagagtagcactcgtcgacccgaacagtcaccgtctctcattcagcgcccgcagcagccgccgccgccgccgctgccgctgccgctcgggggaggagagtgagctggaaccaccccgtccgcgccaggggtgggggacgagagcggacctggcgggggcgcgcgccaagcgggcggggcggagccgcgcgcgcgcgcaccaacggagcgcgctcgcgggggctctgagagctgcagccgtcagggtcttaacctcgcgcttcccgcccgcagcttttcggccccgcggagcccaactgccgccggtgatcggtgcccgcagcgcgcgcagccatctgcaaccccaccgcccggcgcctgctgaaaggaggggctcccaccggccaaacaacgggggggggaaggggtaggaggatggacaggtggggcgtccgccaccgcctggccacccgctcccggaacgcggccctctgtgaaatccgccgtgatgtctgtggccttcagcgccgggctcttcacctttaaggccagagaacaaagtctggaagcacttggccccaagatcaaatatccagcccacgccagcggtgtttttagaagtcactgaggacaaatgagggggctcccaatgtggagagtcaccccactgtcttagataaggtcataaattatggtgatcaacatcctcacacattaagattcgggaagtgttagaagtaggcctttgtaagatgttacgcagggtactacccttgacttaaggagcaaatgacggaaattgggcggaaaggtgttgtttcagagtctactaaatgggtggcctacttaaagctagcaccatttgatgcagtgtgactgttaacggaaggttttaagtgagccgcctttgtatctgctgtcattagaccatttggaaatggataattatttgatgatctgcagttctttctctaggcaatgtgcagtagaatgtggaaagaatactatgtaccagcattaagtgtaaaacatgaaaggaccaataattcactattccc

SEQ ID NO: 1071 - DNA, 2327 bp, Homo sapiens
caaattagccaggtgtggtggctggcacctgtgttccaactacttgggagactcatgtgacaggaagatcacttgagcccaggagttagaagctgcagtgagccgtgatcttgccactgcactccagtctgggcaacacagcaagatactgtgtcaaaaaatttttttttgataaaaaataaaagagttacatgacattcagagaccatccaaaaaacctgtgggtgcccggctgggctcagtggctcatgcctgtaatcccagcactttgggaggccaaagtgggtggatcacttgaggtcaggagtttgagaccagcctggacaacatggtgaaaccccatctctactgaaaatagaaaaaattagccaggcatggtggtggatgcctgtaatcgcagctactcgggagagggcgctggagaatcacttgaactcatggtgcgcaggttgcagggagccaagatggcaccattgtgctccagcctgggcaacaagagcaaaactccatctcaaaaaaaataaagaacctgcgagtgagttcccacacgttttcctaatgggctgctgctttcctaggagtctctcgctcatagaaaaggcacaaactgaaagaggaagcagatcccattgctgtggaagtcccattgttaggaagctctgcttttctggagttcaaattcgcattcatgacgctttaaaccgtcagagctgggtgggtcctcctacaacaaaatagtttgctctctctctcctagttaacaggctttcaaatattagaagatcaatgttctgaccccattaaaatttctcttttgtggaatgaaaagctctgatttaacccatcttcaaggctggtttgatggaggaataggggctgagtcacctgcatttcccctccctgcacaaagtcctgggcccagatctggggtctgtctctgctgagggtggggtgaaccaggaagcacctccttcttcatctccttgatgaatgggtataatggttgccatggaactggggcttgtttgatgacctggggctgggtgggcctctgagagcctttatagctgattgccttttgggagaggggaggtgggagccccaccctgtctcatgagtcaccccaaaggtgcatgggcaggcaggtgctggggaatcggctactccccagagcttggcgtggccatccctgtggcccctctgggagtctggagcccattccctcacgctggtactcactgcagctggggacatctgcactaggaagacaggacacggcatggaagctggcctctgcccagaagccatgacattctggtcaccagcctgatgctataaaacgagtgtcacggccgggcatggtggttcacacctgtaatcccagcactttaggaggccaaggcgggtggatcatgaggtctggagttcgagaccagcctggccaacatggcgaaatcccgtctctactaaaaataagaacattagccaggtgtggtggcacatacctgtagtcccagctcctctggaggctgaggcaggagaatcacttaaacccaggaggcggagattgcagtgagccgagaccacggcattggactccaggctgggcaacagagcacgactccatctcaaaaacaaacaaaaaaaaagagtgtcacctggggctacttggccagacacagagagcaaggagacatccctattatctgtcaaaaataattgttggggctgagcacagtggctcatgcctgtaatctcagcactttgggaggtcggggcaggaggacttgaggcctagagtttgagaccagcctgggcaacatagcgagcaccccatctccagaaaaaatttaaaaattggctgggcgcagtggctcatgcctgtgatcccagcactttgggaggccgagggggatggatcatttgaggtcaggagtttgagaccagcctggccaacatggtgaagccccatctctactaaaaatacaaagattggccgggcatggtggtgggcacctgtggtcctagctacttgggaggctgaggcaggagaatcgcttgaacccaggaggcggtggttgtagtgagctaggatcatgccattgcagtccagcctggacagcaaagctagactccatctcaaaaaaaaaagaaaagaaaaagtaaaaaatttaaaaattagatgggcatggtgacatgtgcctgtagtcccaggtactaaggaggctgaggtaggaggatgacttgagcctaggagttcgaggctgcagtgagctctgatcgcaccactgcactccagcctgagtgacacagcgagaccctgcttc

SEQ ID NO: 1072 - DNA, 2060 bp, Homo sapiens
ggtgctgcttccggccgctgagctccacggtggggatgccctccatgatgcggtagtcggccaggtaaatgttccccttctggaggggagccgcgatgggtggcaagtaggcacccacacgggaagcccgtgacccgcgccgcaggtgcgggcttgcctgggactggcgcgggcgccggaggtggggagagacggggatgcccgcgagggaggccgggaggagggccggggtctccgccggagcgggcctcacctccagctccgcttgcaagcacgttccctcgcccaggaacggagccaccatgtcgtctgtgacggggaacttgtctgggatccgcgtgcagcggcggatcaggccggggttgacgccgttgaggtactggtacccaaagaaggtgtcctctgcccagtgctcggccacgtactctgcgaggacggcgcgagggcgtcacaaggaggcccggcccccctcggggacggagaggcatgggacagaagaagactatgggcaccgagaggagtcggggaggaaaacgaggcccccagcctggcgctgagcggccggaggagcccggtgcgacattttccaagaagccgccagagggcgcgcgcgcgcctcgctgcctctcccgtcccactgccccgaagtcgggggcctgcctagcacgccggagaccgcctggctccccctgctcgatccgggacgccccattccataccggagacgacagatttcttgccagggaaaattttcctaatgtccttcagcctcttccacgaatgtttgcagtccaacgggccgcggactttgaaagccagtgccctaggagatgggattccaggaagaggccttcagaggggctgccaagcgccggctggggcaggtggcggggccgccccacccacttaggtctctgggtctcagggtctgtgcgtcgcaaagtctctgggtcccatgtctcaagatctttgcatctctaggtctctgggatcatgtctcaggttttctgggtctgcgtttcagctccctctgccttcctggccattccaacctctggggctgtcttggaggccgccaaggttgggggagagggaaagttcttgcaggagccctcgttctcccgtcactcacacggactcacatgggccccaggcggacgaagaaggaggccgtcttgaggaaggagtagcggagatttaagttcaggaacttggtggccttaaagttgatgagaattgggaatcccggaatatagccattccacctgtggggagaagcgcagggcaactgggatccagggggcggggaggaggcaggcgcccaggggaaaaccatgggcggggcccagcacagcttcgggtccttactcaggccggttggggttgcgatgcctccgcaccggagggcggtaactgggaatgtgcacatagctgggcaggccaggaagaaagactcgccagctgcaagggaaaccgagatgtcaccctcatgcccgtgcaccaccccagggcaaagggccagagccatcactgccccccacctccctggacccctgccgggcgcccagactctgccacccgccccctcactggtagaagtcctgcttggctctgatctcctcttttctgtgctccaggaggacggggagcgagtcatctgctgttgtctttcctgtagggagaccaaggagaggactcaagggctgacccttgcccctgcccacttcaggaagcaggagttcagcttctgtgccccaggtcgtctctgggggggcccatgaccacacctggcccatgtgtacacattttttaacacccatttatgggtgagaacattcggtatttgactttctggtctggcttgtttcacttaagataatgacttctagttccatccatgttgctgcaaatgacatgatttcatttttttcatgactgaatagtattccactgtgtatatataccacattttctttatccagtcatccattagggcacttagggtgattccatatctttgctagtgtgaatagcgccacaataaataaggcatctttttg

SEQ ID NO: 1073 - DNA, 2056 bp, Homo sapiens
attgttgatgaggagcgccgccgccgccgctgctgggcaccgtgtcgtcgcccagctcgtcgcccacccacctgtggaccggcgaggtgagcgcggccccacccccagcccgcgtccggcatcggaggaggtctccggagcagagccgaagctcgccggagaagaggagccccagcgccccggtttgcaaagcaggtgacaaaacacgacagccttcttcaagcccctccagtattatccgacgcacttcctccctggatactcttgctgcaccgtatcttgctggacactggcctcgggatagccatgggcaagctgcaccttgcatgagggacaaagctacacagacagagagtgcatgggctgaagaatactctgaaaagaagaaagggtctcacaagcgctcagcatcttggggcagtacagatcaacttaaggagattgcaaaattacgccagcagttgcagagaagtaaacacagcagtcggcatcatcgagataaagaaagacagtctccatttcatggcaaccatgcagctattaaccagtgtcaggctcctgttccaaagagtgcacttattcctgtaattcccatcaccaaatcaacaggctcccggttccggaatagcgtggaaggattgaatcaggagattgaaataataattaaagagactggggaaaaggaagagcaacttataccgcaagatattccagatggccatcgtgctccacccccccttgtacagagaagtagcagcacgcgcagcattgacacacagacgcctggtggggcagacaggggaagcaacaacagcagccgttcccagtccgtgtccccaacatcgttcctcaccatttccaatgaaggtagcgaggagagtccttgctcagcggatgacctgcttgttgatcccagagataaagagaatgggaacaattctcctttgcccaaatatgcaacctcaccaaaacctaacaacagttatatgttcaaaagggaacctcctgagggctgtgaaagggtcaaagtctttgaggaatgctcgccaaaacagcttcatgaaatcccagccttttattgtcctgacaaaaacaaggtgaatttcattcctaaaagtggatctgctttctgcctcgtcagcatcctcaagccactccttcctaccccggatcttacactcaagggctctggccacagcctgacagtcaccactggcatgacaaccactctgctgcagcctattgctgtggcctccctgtctacaaacacagagcaagaccgagtctctcgaggaacaagtacagtcatgccatcagcttctctactcccaccaccagaaccaattgaggaagctgaaggataggtcacagtgcaacgtggctgttgttctgggaaattgggaacctcctcagatcactggattctgatggcatcgtgtgcttctggtcggctgtgatgtgctccagctttccagtgacatgtgacggcgaggcttctggaagaaaggatcccccgtgacggctctgccccacttgtgaacgccaaccctcagtgcttagcctgctttttatcaaagcactgattgaaacaagaaaggtctcattctttacctttggagagacaatatcacgtttttgttttcgaattagacttctttaaaacacacacacacacacacacacacacacacacacacacacacacccacacccctgatccttgccaacatgattcctaaagggagatgtgactgatgctgcaagaaccatcttttctatgaaaatgactattttataatataccaatgttacattttctgaaacgtagcaaacaggatattcaaaagattctttggtggcctctgtttcttgttccctttctagatgtgtgcttttctcagctgttttcagctttgggaccaaagggattgttgacgttttcccagcaatcttaatctcatgactatgttcttctcccaaacaaggattgataggtaaatgcattgaacaagtatatataaaaagagattaaaaagcaatattcgtacattatgtg

SEQ ID NO: 1074 - DNA, 2200 bp, Homo sapiens
gaaaagctaaggagcagtgcgctaagctgtggaaaattcccaactccagccgtgcagaaaagatgctggttctggctggacgcggtggcttacgcctgtaattccagcactttgggaggccgagtcggaaggattgcttgagcccaagagttcgagaccagcctgggcaacatggagagaccccttctctactaaaaaataaacaaaattagccgggcgtggtggcgcgctcgtgtagttccagttactccagaggctgaggtaggaggatcgcctgaccaggagttcgaggctgcagtgagccgagattgcgccactgcaccccagcctgggcgacagagcaagagaccctgactaaaacaaaacaaaacaaaaaccatgctggttctcggtatcggaagaggctttcagtgctggttctcggtatcggaagaggctttcagctctcaatggaggtctaagctggttctggagtccctgagtggagcgtggtgggagggtatgaaggcaagtgggacggttgctgagacccgctttgcgcccagactgaggcagagagaggcccagggccaaaatgcgcttcgggatcgggcaggcctggggtggggctggagtcaggtacctctggagtctccgggtaagatgccgtgcaagctcggagatgaattggttagggctggcctgggagtctttagaatccgagctcagccccgcctcgcgttacctagcagaaggcacttcacatctgtgtgttctgtcttgttctcacctctgaaagggggactcttcccagagccctatgttgtcctgttccggcaggccgcaaacgtttctgggtcctccaggagtaaataacttctgttaaaacatgctgccgtttagtgaaccctgtgccacattactgtgctgaacacgcacataacgttatctccggtagcttcagggaagtatcggtaacctcgatactttataaatgctgtttctcccaggcactgtagcttgctggattcaacgatgatctaactccaaagtttcattccacagtagctgctcttcagtgaggaaggatttggttctccttccaggagtgtctgcatgttaagaggattgactttactgcgaagaaacctagcagacaccaccgtaaccagatcaaagttagtattactggcaaggggagatattgatgccgtgtgccccgataaaaatgcgttaagggcacatcacctccgagtcattttccacaaaaactcccagccttaaaccatgagaaaatttcactaaatccagtgtgagggatgttctacaagatacctgtaccccgcccccgccccccaaaatctcaaagtcatgaaagcaaggaatgaatgcggaactgtcacagattagaggagtaaggagaaagaaaaataacatgggtgggaaaattggtgaaatctgagtaagggctgtagtttagtgttatttttaccagtgttaatttattagttttggtaattctagcatggttatatgggatcataacattggagaaagctgggtgaagactgtgcaggaactcttaaccatttttgcaacagctctgtaaatgtaaaattatttcaaaataaatttttaaaaggactggatccaaaggaatttctattgaatgctggaaacattaggaaagcatttagcaaggggaagaagtgctgcagagactggaccctaaaacatcctggaagataagcactggaagaatcaccactgtcttgcccatggagaaccagactgagaggagtgaaaggattttaacagattacaatcccagaagcaaaaaagagaatggccaatagttcatgtgacaggagccaaaatgagaatgaaggaggagctggaataggaccaagaatgtcccggagtggcaggcttagagttttggcccggcgcagtggctcacacctgtaatctcagcactttgggaggccaaggtgggcggatcacgaggtcaggagttcgagaccagtctggccaacatagtgaaagcccctctactaaaaatacacaaaaaattagccgggggtggtggtgtgcgcctgtaaccccagctattcgggaggctgaggcaggagaatcgcgtgaacccaggaggcggcggttgcagtgagccaagatcgccccactgcactccagcctgggcgacagaacaagactccgtctc

SEQ ID NO: 1075 - DNA, 2378 bp, Homo sapiens
aggctcagccttggaacatggtggggtgacatctacggagaagtctcacctggcactggaaaagcccatcctactgggccagggaccagtacttcctgcgcccccctacaaccagcagccaccctgggctggactcaccaaggtgacccaggaagtctctccaccgtgggctccaattatgtacaggatgatcaaggtggtggtggccacgaagcagaacacagacacgaacatcacccagccctggaccaggggccagggcaccagggaggaggccaccaggatccacaccaggcccccgaagatctgcgggggaggaggaggggtgagttttggcctagaggagagccccagcccaggaagggcccccgaccagcggtcacatggggtgactggagtgcaaaaacacaggaagcaggcaaagagaacagggcaggcattttcctctgcaaaaatgcatctttagtccccccagggccctgtgctggatctcaatcccaatccccggcacgcttgccctgattaactttttaaaacttttttttcttgagacagagtcttgctctgtcacccaggcgtgagtacagtggcgtgtggctcactgcaacctctgcctcctgggttcaagtgattctcatgcctcagcttcctgagtagctgggattacaggtgcatgccaccatgcccagctaatttttctatttttggtagagacggggtttcaccatgttggccaggctggtcttgaactcctgacctcaggtgatctgccctcctcagcctcccaaagggttgggattacaggcgtgagccactgcacctggcctgagtaactttttaaatatgggtttaatttttttatttaacaaacacttatatcagacctacattccaggcactatcctaagcactttacaaataataactcagtgattctcacagtaaccctctgagcaatgctgacctgtttgccagatgaggaaactgaggtaggtggaagttaagtaattcatcattctgagaaaggatttatgccatttggtattgtcatgagaagagctgctatttcttctgatattctagccctcctacttgctttgatattaaaatgtcctttcctttatgcaatggtagtgaccagcagatctttttggtctttatttggcaaaacaaattaaccacactgtcagtagtcccctgccctgcccttcctttctttctctctctctctttccttcatttcttcttccctccctccctctccttccttccttctttttctttctttctttcttctttctttctttcttttttctctttctttctttctctttctctctttctttctctctctttctctctctctctttcttttctctctctctctccctttctctttctctctctctctccctttctctttctctctctttctttctcttgctcattatttctttttctggattcaactgtttatattcccaagtccaggaagtgttctgatgatcagatttggagttggaatggagtaaccaaggacagccttgtctctttggatggctgaggatgggcatgaggaaagtacagtcccgtggttatccagaatacaccccagttgatgtcgccagggtcagtgagccccatacagtcaaagaggagcagacatgggggccagtagcacccctcagtagcccagccccgctcctcgccgtggatggacacatacaaacccgctccccaccgcggatgggtacgtacaaactccgttcctcactgtggacaggcgtgtacaaaccccagcggggactttctgcacttctctttcccttctcctcatctcccccagcgccacccccacccagtaagaatcagctcagcctcatccacatgttccccacttggatgaggactgggctcgaagcactccaggcctatgtggagattcctttgcagccaaaagtctccaaggtactacagaagtgtctggggggctgaggatggggctgccctcccaggcctatgtcccctgtggtttgaattcacatagcaccttgacccccccacctccctgcacctgctgcccacctgctgggtgagagataccgctgtcttcacaggtgttctctgagctgcttgactgagaagcaatcaggagagaattgcatttgggtagaaaaatcagtgcaatgaagactttggatttattaaaaccaagttgtccctaaggaatcagatgtgggcatctctgaccagaaagcgtcctctgctgatggatcttaggttgcctgaaggcacgtggcagggccggtgggatgcactgtgcatcttacaaaaatgggagcaaaatcaattaaataaaaatgcccagaccaccatgg

SEQ ID NO: 1076 - DNA, 2710 bp, Homo sapiens
aatgtttaatgctgggtctttcaaatgtgtgtcctttacatactttgggtcttatttagcagccagagaatcaagaggtatgctttttcatggtataagtaatttatcccaggtatttataattgtagcagtatgtgtttggcttatttatctgaaagaaattgaacaccagaatttaataattaaggatttattagttaaaactgagtgttataatgagccagatgctgctgcattgaaacagccattttcattagcatttttaaatagaagagaattgaatttaaatttggagtgtcttgactttgatgagttgacattttaaaatcttttaaaatccgtcaaatagaaggcaaacttcttttaatttcaatgaaagacaagactcacactgaaatgtcaaaatagcatttttgaaacgttggggttgttggagtggttggattttccctggaattgagtgagaaattcagaagactgaagcccaggcttactgtctacctttcacggaggcctagccgtgagaggacagaagaaggcacgtggcgaatcatgacagcggacaaagacaaagacaaagacaaagagaaggaccgggaccgagaccgggaccgagagagagagaaaagagacaaagcaagagagagtgagaattcaaggccacgccggagctgtaccttggaaggaggagccaaaaattatgctgagagtgatcacagtgaagacgaggacaatgacaacaatagtgccaccgcagaggagtccacgaagaagaataagaagaaaccaccgaaaaaaaagtctcgttatgaaaggacagataccggtgagataacatcctacatcactgaagatgatgtggtctacagaccaggagactgtgtgtatatcgagagtcggaggccaaacacaccgtatttcatctgtagcattcaagacttcaaactggtccacaactcccaggcctgttgcagatctccaactcctgctttgtgtgaccccccagcatgctctctgccggtggcatcacagccaccacagcatctttctgaagccgggagagggcctgtagggagtaagagggaccatctcctcatgaacgtcaaatggtactaccgtcaatctgaggttccagattctgtgtatcagcatttggttcaggatcgacataatgaaaatgactctggaagagaacttgtcattacagacccagttatcaagaaccgagagctcttcatttctgattacgttgacacttaccatgctgctgcccttagagggaagtgtaacatctcccatttttctgacatatttgctgctagagagtttaaagcccgagtggattcatttttctacatattaggatataaccctgagacaaggaggctgaacagtacccagggggagattcgtgtcggtcctagtcatcaggccaaacttccagatctgcaaccatttccttctccagatggtgatacagtgacccaacatgaggaactggtctggatgcctggagttaacgactgtgacctccttatgtacttgagggcagcaaggagcatggcggcatttgcaggaatgtgtgatggaggctctacagaggacggctgtgtcgcagcctctcgggatgacaccactctgaatgcactgaacacactgcatgaaagcggttacgatgctggcaaagccctgcagcgcctggtgaagaagcctgtgcccaagctcatcgagaagtgctggaccgaggacgaagtggtgagcaggaaccagcatttgccttgtgctctggggcatcgggccaccggcgtctcagtgtgtgacctccctgctgctcagggaaagcagaagcttcagtcatgcagaatggctgtccgtggcagcgccaggcaggaggatggggcccttcagccccttaattgtacagaaagacttgattttattaagattaggcttcatagatgtcgggaaagattgtccaactttcatggaaagaaaggagaaattgatagttactcctaaaaaaagttaatttgaacttgtttttggtgcaagctagcttgtgatacctccctatttaaagacagcatgttaaaacccgtggacatataacctaaagtagggttggtgacttgtcttttttttaatcataattattttagagaagggggttttgccgtgttgctcaggctggttttgaactcctgggctccatcagtcctcttgccccagcttcttaagtagctgggactgtaggcatgctctaccatgcttggcttggtgacttgtttttatagggcttgtaagacccctgacctccttaaaggacattgattacaagcgggaagcagagagttgatgaaataaatatgctggattttacatactgattgtattgctgtggcctgttgaaggaagtggggggagagaaatgtgcccacagatacagccttgcaaacccatggattcccatccagcagacagttttaatgaagctacatctccatcttgtgacttgtaaaaggcattgctgtaaacgacttacggatttcttgtgcttttgcaaatacagtcttcagtatgaatgttaccgcttgacatttgcctttcaggtcgaatgaaatttaaatgaaggctggcactaatacacctattgattgcaagttcctctcctgtattttaaaatatgctaagaaagaatgtttagaaattg

SEQ ID NO: 1077 - DNA, 2124 bp, Homo sapiens
ttcccacataagatgccccatctttcaaatcatctggaagagacgacattttagccggcacaagagaggctacgctgcaggaacaaacatcccccaactgtccatgacaatgttctatgggccagggatcctccaggcagctgcacctccagagcacctgcagagtccacagctgctgaagctggcgggggagagctggggacccagtatgggccacccctgcccacagtctgccggccaaagccattccaacatccaagcacctgctccttcaaggggacaaggaggcacagcaccctcaaggctggaggaggagagcctgaaagcatggtcagaggtacccacgtggccaggatggacggccaggggccaggcacaccgaggaccggccgcagccgccccagccccacacaggcccagcactgcatttggacatgctctctggcttctttctctcctgggggacggccgcctcctcccagccactgtgccacccccagcccccacccagcctgctggcagaggcctcagctcccagccaggacctctcagtgctgagcaacagaggcctccggctgtgccttcagcccagtgtggtgggtggaccctcaggtctgcagaggacttctcaggcacagcagactggtaatgacctggctgctcagccgggccctcactgaagggcagcatttggaagccgccaggccagcaggggtcccagcgtgccctggccttggcttttcggggccctggggcatctcacagggaccaagccctcaggagacacacacgtgggaatcatcgctcaggtcctcgctcccctgcagggaggaagaatgacctcccattgggtagggtggtggggagggggcccacctcggaggcaccgccctttcatagcctctgagccttttcaggagatggaagcagcaggaagccaggcttggtcctcctgtgccacccccaccatctgctcacagccagccaaggcggggctgccgtccccagcacagggtcaagcgccccaacaaggactggacctgctgcgtcctggactccacagccctcccacccatccctgcctgagaattatcagtggaggctcatccccaaggcccacgtcaccccagcggggccacagggctcctgcatctgccctgaaggagctgccagctggagcatggcggtcaaacctgaggtgtggctggagctatcacagcgaagtacaggtctctcctgaggaggcccaaggccctgattccatcccttctggaaacttccaggtgcagcaagatgagtgtgaggccgggctgggcccaggagagaaaagcaggagggggtgggggtgcccacatcctggggcagccaccaggacagggcagagacatcctgaaagcatggacgccccccatgcccagccagagaaaggtgccagggatgctgatggctcattggtggtgcctctcacatccctcagcacccggcatcgggcagcagccaagagggcagccatggggggcctcgtgatcacggatcagtaacctttgttctgaacggggtggtttgttttcatggaggagccgagtttgtaaggcccaagttattgagcagcagcttcctaagtcacgagaccctgaggcctcccacctcccccaggcctggagctaaatctgcagggtcagctccacctccgacattcctcctggtcaccttcacccctgcccttgtctctacctttgctttccagggaaggggaagcagagtgtccacccaccagggcaggaggccggggggcaggggagacagacagcaagacacagaggcagagagacagggagacagacagagaggcagagagaaacagagacagagagacagggacacagagaggcagagagaaacagagacagagaggcagagagagatagagacagagtcctgcacggaagccctggtcccatccatggaacccttctgctctatggtgcacagctgggaaaagtgaagggacacccctagttattgtagttattgtcagagaaataaccatagtgtaaatgtgtgtttttgtaacttttgtgattataaaatacagttttgtaacatatttggaaaatgcagaac

SEQ ID NO: 1078 - DNA, 2500 bp, Homo sapiens
agccccccaaggccccccacggccagaaggcagccccccgaacggagcccagtgggaggaggggctcagatgagttgaccgtgccccgataccgcacagagaagccctccaagtcgcccccaccgccccctccccgccggagcttcccctcctcccatggcctgaccaccacacgtaccggagaggtggtggtcaccagcaagaaggactcggccttcatcaagaaggctgagtccgaggagctggaggtgcagaagccctaggtgaagctgcgccgggctgtgtctgaggtggcccgcccagcctccacaccacccatcatggcctcggccatcaaggacgaggatgacgaggatcgcatcatcgcagagctagaggtgtttgagagaagctcagtgtcttccctcccccccacgccccgccgccagctgatccccaccttgctgtccccccaggacctggggccccccgggggctcagccccaggccctacacggaagagtggcggaggcagtgtaccacccatgaaggtggtgactccgggggcctctcggctgaaggcggcccagggccaggcgggcagccccgacaaaagcaaacatggcaagcagagggccgagtacatgcggatccaggcccagcagcaggtctaatgagcaggcgcggaggctgtgtggagagtggacatacctcacctgtgggtgtttactgcccttgtggcctggtcagaggctgcagggtggctcctggacccagatgttgtgagagacccttagtgcactcgtttgatttagttaatatttatgagcagctcctgtatgacaggcccattctgggtgtgagggtgggggctgtgatatgtccagatgctctcacttaaagaaggttctagactcagaggcaagacgttagagaaggttctagactcagaggcaagaggttagagatgggtgagtccatctctttttcagatgagggggcagctcagaggaggagaggggcttcccaaaggtgcacagcaaggtggcatcacagccaggatcgggacctaggaatcttggaacccttccctgcactggccctgggacagccctgggcacccaaggccctgcctccctactggctcccaggagaatttctcaaaaagcagccctccagccccccgcagcctctccacagctcccacctgcctcctcatggcccccagacaccctgcgagccccacctccagatctttttcctgccactgccagggatgagttccccttgtcctgtccgggctggaccctcctgggtgcccagcagagcagctgacactgacagagctttcgctggggccaggcatgcgcattatctcatctcacactcaccacactgaggaaggtctattacccccatgtgacgggggcggaaactgaggcttaatccaaggccacacggctagcaagtggggggcaggacacaagtccagactgcctccctccccaccacaaagtgcttcagcctctccagcagccccttccctcagctctaatgatgttgcactgtttcccaccctagtccctccctccccagagcccagctcctccgctgtggtgtcagcctcatgcctttatggcccagcctccaccccatctccggggttgcctgggtctccagtgacatcgagatgggctcttttcacccccctcccccactgctctgcagcatgtggccttgtagaccccccccacacctgcatagggctgtgcagaccctctgttcctcagcatcctctccccagcctccacctggagcctctgggctcctttctgggtgactccctctattttttgagacggagtcttgctctgtctcccaggctggagtccagtggtgtgatctcagctcactgcagcctccgcctcctgggttcaagtgattctcgtgcctcagcctcccgagcagctgagactacaggctaattaccacactggctaatttttgtatttttagtagagacggggtttcaccatgttggccaggctggtctcaaactcctgagctcaggtgatcctcccacctcagcctcccaaagtgctgggattacaggcgtgagccattgcaccctgcctgggcgactctcctttgcctgcctcttcccttcctgtgccccactcctcagcctcttctcctcacaccatgccttcctctcctcaggcaccaggtgcactgcttagtccctgcccccacccaggtctccattctgagctccagtcacccacacacgcttccccgggcatccccaggctcctcgaatgcgtgtgtccagacataatgctcccccgaccacgctgccccagccggtacgaggctgccccagctgctgtctccctcaggaagggtcgcccacccccagccttcccaagcccctccgtgcccctgtctcacttccagtgctccagtagcctttcttataaacatggcttctttcttgtaaagtaataaatgtttacagtgg

SEQ ID NO: 1079 - DNA, 3319 bp, Homo sapiens
gctctcaccggggtcgagccgcggcgagggaacggatcggagacgctgcgcctgctcagaaggtagcgcagcggggaaaggcgggagagcgttaacttctgagcctgcgcggtgggagttgctcaagcaggtggtagcgacttggcttccgggcagcgggtaaaggtgagtctggggcatgggttcagtgggcaagtctagggcagcagagttgactacgcctcggcgtatagaatggccctggcctgggacagctaaggacgacaagaggaggccgaagcctaaaacgctttcacctgcttcttcccctgcctagatccccccaatagtaatactaaagagcgccatagtttacaaagatttctccctctcacaacaccttttaatcactgatccgtattcccttagcactcaaatctcttctgtttggattgccctcattaacaatctgaccagctcgtacaatgcatccctctttgcaatttgccacgtatgcttacgtgttccccttttttctactggcaaggaaagaatgtaagcttttattcacaggagatgtctgagacttttgccggtaaaatgatctggctacaaggtctaagagggaaaagcagtttgctcgaggaaaggtattcgtgcattaaggacagtcctgtgagtgagatattggtggacggcttcaagctctagcctgtggcctacagctggcctaaataagactgggaaggaactgtgaagacggtttcaaattcctaaagccctgaaattctccccctaagtttaggaagagcttttgttcttggtgtgtaacactgataaatgaattggtacctagtgattaatctgcacttttattaagatatgacctactttaccttttttgagacaggatcttgctctgtcgcccaatagcccaggctggagtgcagtggcagagttgcagctggctgcagcctccacctccctggctcaagtgatcttccagcctcagcctccccagtagctgagactatacaggtgcaggccaccactcttaattttttttgtttgtttttaagagacaggtctccctacgtagcccaagctgttttcgaagtcctaggttcctcccaccttggactcccaaagtgctgggattacaggcttgacccactgcgcccagcctgcatctttacattcgaaataaaattcagtcaagtcaaagccggtcttggaggaaaatgtggctttgatgacagcagtagggattttccttcagtgcctacttaccagaggataataataacagcaagtttcttaaacataaaaacatcagaaatgaaaaagaactttccataacactataaatattgcagtatttcaagatactgaaccagagccctaaggaaaggctggagacccagaattttataatggctttgggacatgaattttattttaaccagaggacaaaattaatctgcaaaagctgtcttggagaaatttcaggaaataaaagatcaaatgtatctgctgtcctcccttccctctccaggagaataaaaggcaaatgcaaactatcacagggagattttcacctttacctaaattatttattatatactttatatttctggttaatagattgggagagagcactccagataaagaacttcctttataaatgccacatttatttcagtactggaggtttggtcttgtgttgccacaaagatttggaatggcatctatgttataaatttagatgacaaaagagactaataaaagacttctagatgaaacacaagcttctaatattctggtccaggaaataagatagaaactaaaaaacaataaataacttttatgaattaactgaaggacttaaaatacttgttccattctaatcccaagtgtctgccaaggaactgaaatttaaaatgataaaagacatgatacagtcatgttacagggaattcaatgaagtaaaaatggcagacattgatgaatggtatggtttaaagatttgtgtagaggtagtgatgaggaggcctgctgggagctggaaaagttctataccttgacacagttatgcttacatggatatacacacacagtagtcactaagccatgatttgtacttatgatttgcacactttggtggttgtaaattgtacagcaatctaaaaacaaatgaggtcagtgtgcctcactacagagcttcaaaagtggtagatagcacatctcttttttcttttaagccatctaatacagagttgcttggaataaatcctaatagatacagtgtttctagaaacaagtaaatgaataaaccttagctgttaccccgtaggagccaacagaggtcaatctgttctcaagcttttacaaagttacaagaacaagtaatcagtgcatattttgttgaaactcctactgcaatactgaaaacttcaaatggagagcagctcctttttggtaattcacaacagacttagttttcaaattaccaagaatataaggaattagattagaagcctaattcaatttagaattatgagacattatttgtaacccacaagtattatttttcccatgatactgaacaattcacctggcatgaacttaaaagaagaaaatgcttattgcagccttcttgctttaagagcgaaaaaaacaattttgctagctgtggagggactagaatacaatgtcactttaagatttacactctcaaaagttttgacctatcagattgagagccagagagagagacagacagaaggagaaggataaatcaaatgtggtaaaatgttaacctttgggggatctgggtagaggggatctgggaattatttgtactattgcaacttttctgtaagtctgaaattgtgttgtcaaaagtcaaaagaaaaaatttataaatactttatcatccatttgctttataattaggtacagagtatgatgacagagagagcctactgtatgccagatacttaacagaaggaaagtagtttatatgtaaactctgggaaaagtggagccaaatgattacactgtgtgtaccctttagcactgtttggggtggggacatggggggtcagggtgcagagagggactgttctggtctccttggaaggtatgtgcctatagtaaaaagcatgagtaagatatcacatctcctaactccgtaacaaccaagcaaacttataatagcattttaacttatatcaccttttttataggagcggatatatattccagcagcatgagtattttagccctctttgcaattgcagtcttcattcattatcatcaataaactggcctctggttg

SEQ ID NO: 1080 - DNA, 3249 bp, Homo sapiens
aactctggggactgcatccgcctggcctgtctcctttgaactctctcctctgccctaccctctcacctcttccagaagaaagcccccaggctctcccggctgtcccgccagatggtgccccagctccagctgcccgagccccctgccctgtcggtcatgtactcctacctgcatagccacaagatcaagatcctggagatatttcacaaggtgggccagggtgagaaccagagaatcaccagggaggagttcatcgcggctgtaaaggcagtcggagtccctctgaagaaccaagaggtggaggatatagtgatctacctcagctctcttgggaagcacaacaccatcaccatggatatcctggccaatacctacaagcagtggtctatggctcagcaaaggagcagcctggccactgcaagggagcattatatcttggccaagcacagagattccctgaagggtccgctcaagaagcaggaggtggattcagccccacagcttcccaaagtggacctactgacggtgcctgcagtcgacacgcagatggagacgcggcccatgaccctggaggagatggaggaagtgggcaagcggtaccgcgagcggcagcgacagcacaagctcacgatcccctccatccagtacacggagcaatgtcacctggtgcgctgtgggaatcggcactttgatgagcactgcctcccgtccaccatccacggggatatgagggagctcattgactcggcccgcaggcacaactttctggtctacctgcaatgctggaagctctgtaagtcctatggcctcccgctgacagaggacatcctcatgaaagccttgctgtacccaggagacaagatcattttccagatggacaaagtgtgccccatccggcagccgggaggctactactctgactggaaggtcttttctccgaatctggctctgctccggtcccagggccctggcaagtctaagaggactgacaagctgagtttcggaccccctttctccctgccttggcctcctgctccattgctatcccttcagtgtgggggctggaggctggagtacctggggcgccatgctgtgcttgcgtctgcatcctagggcaacatcccccaacctgactgctcactgcagactggccagtcccgggtcacccttggcgcatgtctcaggatcatggcctgctggcctcagctcccacacagctaccctcctgaccccagtcctgcacaatcataaggtttctggaaaagatgaaaaggagagcctccttagagaacagggctggagcgagggccttcacaaatccccagccaggtgtcagggccctgcagagaacagggggcagccctttctctgccctgccaccttgcagcggccacaccccttctctggcaagaggtgggcttgcagctcataggaggataaaagaacatttccccgggacctgcctccagccctttcgagaggccaacctgagtcttctctaagaaaatggcctcctttggtactccaaagcctgagctacccagatttgagtcaagcagcaggtgacaacccgtgggcagcatccgtgggtgactgcagaggaacaaggcagcatccctgcagaggcaggggcgcggcatgggaggaggagagcccagctggccggataccatgaggtgggaggggcctggacctgcccctgcttctagacccctgccagctgcccactgggtgtgtggccagaatgcctgcagtgggacacagcagggccctgtagagatcagacaggccttcggttaaatggacaaggcacttctctgagtcttagcatcttcatatgtaaaggggcctagtagctcctaccatacactatgaggatcagatgagaaagagtgtcaacatcttagcagggacagcactcaatcaatgattgtcgttgttttaccttgctctggttggggcatcttcaagtgcaggagtaggcccaggcctgcaggtgggtcctggccatgacacgggctgtgacttccttccagccccggggtgggccaggaagtggctgggaacccaggaaggggattttggtccatgcttaggtaggccatagctaataaaggataaagagagttctcttaggtcaaggagagacgttgactgtatcttgctacttatggttgatggaggctgggtgggaaagagtgccgtgaacgattagtgatgtctgtcaggctcagggttggaggggaagggggttagatttcaccacctttgtcctcagggctgggttaagctctggagtggggagtaggagccagggaccccaaaaggatttggcagtgacttactgagcctccctcgtaactaccctgagaggtctctattctggaccatgagaaaaccaaggatgagaaaggggaagtgacttgcccaggtcacctggccagattctgagggtaggtccagctgacccaagcccactgtgttcccctggagcatggaggcacagagtcagggtccaccccaggtggaagacatttttctttcagagctctcgtttgagacttagaaacgggtccacccctgcggccctgacctactccctaaagccccattggcctggatttccactctcctcacaaaatgcctctctcttctccactaggaaaacgccaaagaaaagcaagaaaatgcgctttaaggagtttgaggaatttaccaggaagctgaaggtgaagaggtccagtggtctgcagcaaacacaccccaattccttctggccgggtcatcttctggataagctgcagctctacctgcccactgtggccacagaccggagcctggcgctcttcagttgtgttcaacaccagccccatgtctacccagccacctaccaccctgaccactggtggccccttaggaacaagaactacatgacccacgcccattatgatgccgccaaggtgtactacatcaactagagctagccaggtgttgccggacccagccttcctgggccaggggccagtgcagccagcggcccagagcccagacacaagaggagtgtcaaagagtcaaactaaagaaatcctttcaaagagggatggaccgggggccagttccctctggactcaaagtgtccagtgtctcagagggtagatgtgtccaaggaatgacgtgcagtttttgactatttccctcccctgacctctgccctttctacataaagcaggttggagtttttctcatttc

SEQ ID NO: 1081 - DNA, 2229 bp, Homo sapiens
ctcattgaactcgcctgcagctcttgggttttttgtggcttccttcgttattggagccaggcctacaccccagcaaccatgtccaagggacctgcagttggtattgatcttggcaccacctactcttgtgtgggtgttttccagcacggaaaagtcgagataattgccaatgatcagggaaaccgaaccactccaagctatgtcgcctttacggacactgaacggttgatcggtgatgccgcaaagaatcaagttgcaatgaaccccaccaacacagttatggtggtgaatgatgctggcaggcccaaggtccaagtagaatacaagggagagaccaaaagcttctatccagaggaggtgtcttctatggttctgacaaagatgaaggaaattgcagaagcctaccttgggaagactgttaccaatgctgtggtcacagtgccagcttactttaatgactctcagcgtcaggctaccaaagatgctggaactattgctggtctcaatgtacttagaattattaatgagccaactgctgctgctattgcttacggcttagacaaaaaggttggagcagaaagaaacgtgctcatctttgacctgggaggtggcacttttgatgtgtcaatcctcactattgaggatggaatctttgaggtcaagtctacagctggagacacccacttgggtggagaagattttgacaaccgaatggtcaaccattttattgctgagtttaagcgcaagcataagaaggacatcagtgagaacaagagagctgtaagacgcctccgtactgcttgtgaacgtgctaagcgtaccctctcttccagcacccaggccagtattgagatcgattctctctatgaaggaatcgacttctatacctccattacccgtgcccgatttgaagaactgaatgctgacctgttccgtggcaccctggacccagtagagaaagcccttcgagatgccaaactagacaagtcacagattcatgatattgtcctggttggtggttctactcgtatccccaagattcagaagcttctccaagacttcttcaatggaaaagaactgaataagagcatcaaccctgatgaagctgttgcttatggtgcagctgtccaggcagccatcttgtctggagacaagtctgagaatgttcaagatttgctgctcttggatgtcactcctctttcccttggtattgaaactgctggtggagtcatgactgtcctcatcaagcgtaataccaccattcctaccaagcagacacagaccttcactacctattctgacaaccagcctggtgtgcttattcaggtttatgaaggcgagcgtgccatgacaaaggataacaacctgcttggcaagtttgaactcacaggcatacctcctgcaccccgaggtgttcctcagattgaagtcacttttgacattgatgccaatggtatactcaatgtctctgctgtggacaagagtacgggaaaagagaacaagattactatcactaatgacaagggccgtttgagcaaggaagacattgaacgtatggtccaggaagctgagaagtacaaagctgaagatgagaagcagagggacaaggtgtcatccaagaattcacttgagtcctatgccttcaacatgaaagcaactgttgaagatgagaaacttcaaggcaagattaacgatgaggacaaacagaagattctggacaagtgtaatgaaattatcaactggcttgataagaatcagactgctgagaaggaagaatttgaacatcaacagaaagagctggagaaagtttgcaaccccatcatcaccaagctgtaccagagtgcaggaggcatgccaggaggaatgcctgggggatttcctggtggtggagctcctccctctggtggtgcttcctcaaggcccaccattgaagaggttgattaagccaaccaagtgtagatgtagcattgttccacacatttaaaacatttgaaggacctaaattcgtagcaaattctgtggcagttttaaaaagttaagctgctatagtaagttactgggcattctcaatacttgaatatggaacatatgcacaggggaaggaaataacattgcactttataaacactgtattgtaagtggaaaatgcaatgtcttaaataaaactatttaaaattggcaccataaaaaaaaaaaaaaaaaaaaaaaaaaaaaaaaaaaaaaaaaaag

SEQ ID NO: 1082 - DNA, 1940 bp, Homo sapiens
cccaatgcccagcaccctctgaagccagagggctacccccaggcctgctgctgctccgtagacagatgtgcgatacaacatccccgtgtcctctgcctccctctcggccatcaagagcctgggcctcaggggcatctgctgcatcagcctgaccaacctggatggctctctggcttcacaccaggtgctacaatctgttgcttaccacctgggcccacacctgcagagcttgtccctgggtggaggcagccccacagaggcctcctctgtggccctgatcctgggctgcccagccctgtgtgtccttgacctcagtggctgcaatagcctcttcacctcgggcacactgctggctcagccagagatggcacagagcgtccagcaggctttgagcggcctccgtgagctcaacctggctggcctgcgagacctggcggacctcagcttcaaccagctcagcagctgtgcccccagcctggagcgcctctccttggcatactgccacctcaccttcgagctaggcccagcctgaggctccatcggcccccaagactcctctcccgcccagttctccttctgcaacctgctgcgattagtgcaagagcgggctggcaggctgcgtgccctggacctgagtggcactggcttgccccccgaggccctgcaggctctgggccaggtagctgggctgcagcttcaggagctgagcctgcacagctgccgggacctctccacagaggctgtggctaccctgtgcttccagcaaccaggccttacctccctggacctcagtggctgctcagaactgactgatggggcgctcttggccgtgagccggggcctgcggcacctgcggcgcctgagcctggggaagctgcagcggctgacagatgcaggatgtacagctctgggtggcctgcaggagctgcagagcctcgacatggccgagggcgggaactggcccaggccctgggctgtatgcacggggctccatcccagctggcctccctcagcctggcccactgctcttcattgaagtcacgcccagagctggagcatcaggcctcaggtaccaaggacgcctgtccagagccacagggcccctccctgctcacgctgcgggccctgcaggagttggacctcacagcctgcagcaagctgactgatgccagtttagccaaggtgctccagtttctccagctgaggcagctgtcccttagcctgttgccagaactcacagacaacggcttggttgctgtggccaggggctgtcctagcctggagcacttggcgctgagtcactgcagccgactcagtgacaagggctgggcccaggcagccagctcctggccaaggctgcagcatcccaacctgtccagctgcagtcagctcatagagcaggcactggatgctattgggcaggcgtgcaggcagctccgggtgttggatgtggccacgtgccctggcatcaacatggccgccgtcagacgcttccaagcccagctgccccaggtgtcctgtgtccagtcccgcttcgtgggaggggctgacctgaccctaacactctgaggccagaccctctaggactgggggtggggccaatccagggcagcccagagggaacatcctgccacaccgcctggcagtagcctctttccagctacacgtcgctgccacaggcccctggaaatgctacctacgtgttgccgccacaggctcctgctctctggccaagccctgggtgggaggccaggcccccagcgggcagggtctggtgctgggaggagcagagcctctgcctcttgcctgccctcctctcagacctaaggccgggctccacctactcctgtgggactctcccagcaccctgtgtgcactgagcttcagcagctgagcctaggtctgtgctgtaaatcctaagattaaacattccagatagt

SEQ ID NO: 1083 - DNA, 2782 bp, Homo sapiens
cttatgttattataggtcgtcagcctatgtgtaggccatttcagtctcattggaaatacctggaaaaatgcctggacttggaaaaatgcaaacaaaaaacacagcacgtagctctaaaggggttgtttagtcctcccctgaattctgtttctgccttaaaacaccagaagagctttggctgtgtgccatctgcaggaagcaccctaggaaggagaggatccaccctggcttctcccaggctaggtggtccttcgtttttcacctttttaaaaggctcacctgaggctgctgaaaaggtggcaaaagacaggactgcatgcttcattcccagcaagagtgtcaggcaaaattcgaactccttgatcacccattggtttccacattctttccattccggagaccaaggggagatttgccgatgctgatgctccctgggctttgcaaagctttccctaattaaagtcctcccggctgtgtgcatagctcttctgctgcaaatctttgcccttttgtgtttgtgtttaaaattccatctttccaaaatgtttgcccactcagcaagtctccttgaaagccctcacttttgtttgggggaagtttttttttttttcctttttggtttttattctgcctatgtgtaggaaatttaagtctcttaggaattgcttgtgaaaatgctctctggtctttttttaaaccatgatgagtgtctctcaccatggcattggaagctggcaagggatgcccctggtgtccgtgctgttagctgccacttgagcttttagatggagctactggagtatcattttggttccattctaaggaaaatgaacaaaagagcttttccctcctgttcaatgtgcaacagtgctacaaggtgagggaagtatgttagcgaggaatctgaaccaggtcaggatcggggcaaggtggtaggaggctgagctctccagtggtgaaaaagatggctcttgtcacctagagccaggaggcataattcaagtgaagtgcatataggcccgttccttggccttgtcctcataggattttttttcctacaagatctatccaggtccttcatttggggaaccttatggactcctgttgttgttggaagccggagaacagtgtttggagagcttccattgaggatggtctgaagactctcactttaagttagatcctgccctctggttgatgagaaatgtgagacgtaaaagtgaattggagagagatcccacttccccacgtgccagaaaaggcagacaacaactccctcctcagagctgttagaaagccaacatctcgcggttggcaggcactggccctggatgaggaattcctgggtcgccccccttagaacatgtctggttttggaaacaggttaaaaatacttgaggagggcatggcacgctcagtctgcttccctgatgtttgaaataggccaggaatgtgggccgggaagcccagaggagcctgcgtgtcccgcagggttttgtagttggagcctggggtttctcctctccatcatcaccccctttaactgccagtgaccacatgccagattcatgaagggcacactgaaattgacgaagacctgtgccatgggtagcgggaaaaactgggctccctttagtaagcaggatggtgttgaggtctcggaggcaggcaaggggtgggctcggaatctctcctggaagagaaaagagaagggaatttggattctgtatacaaatatagaaattccctaagagtttaaatttgaacatggcattcaggggagaagattatgggttccaagccttttccttcttccccttcttgtgaataactcactcagctgcttgcatctgtgtcctaaggctgtgaaccgaagagctgggcagtccacagttggtttgagcctcagagtaccttgcttagtaaaggtttgttttaggagggatgacacaaacttttgagtaactctcaagtcttgaactatgaaacttcgtaggatgtcaacactaaaatgaaccttaccgattatctcatctagtggttttcaaacatttggaaaattggtacagccctttttttaagcaaaatcttagaacttgaataaaccaggtagaaggtggtaggcccagacttcctctcccactcttgacaccctgagctcctccctctgtactcacagccctcaaagtgctcctctctcagagaaccatccattgcagagaccagggagccgtggcccatgccccatgtagcaccgtttcatggcagaaccagctctgacttccaggccagtggcaagtccctgcagtaccttggtttattttgatgtaggaaaagctctgggtagtaagagtgaagagtcaaacagctacgactgagagtgaggagaaagacaacactgcccatggttcctgacacccagggtcactttttaccaacctaactctgggtcacatgacgtactcgtattctgaaactgttggtttcctggatgtctacctgtgatgtcttggatccatgtggttctctctgcctaaaatatcctctcttgattcaccttcttaacaacagctttctggagatataattcacataacataacatttacacttttaaagtgtacggtccaatggtttttagcacacgcaagagttgtgcagctagctgggcatggtggctcatgcctgtaatcccagcacttcgggagggcaagacaggcggatcacttgagtccaggagttcaagaccagcctgaccaacatggtgaaaccctgtctctact

SEQ ID NO: 1084 - DNA, 1878 bp, Homo sapiens
gtagctcgcgaagtgggcgcggtcgtaggggcccgggaaggtggaagcgccgggcctggaagaggcgcggggacagggcactccctgggtgccctagacctggcctctctcctccctgcgctgcagaccaacgcgtggcggctgagcgaggtgaacgaggacttcagcttgtgccccagatacccccgtgcggtgatcgtgccatacttggtggacgatgatgccctggcgcgcagcgcccgcttccgtcagggaggtcgcttcccggtgctcagctaccacccggctcccagcggcagagggagcgcgccctccccacgctccgcccctgggtggctgcgtcctttctgggccttttctttttggcccggtcaattcgcggcgtagccgctgccccaactcctgccccattctggtcccgcccctctcccgccttttcgctgggaagggtatcacctttctctggccccgcccctgacggttccgggccccgcgaagcttagtcccttctttgtcaagccaggacccgcccacggtctattcatagggtcccaaaccactttggccacaacacccccagactggtccgaagcctcgtgagttcgccctggtcgttgcactccagcctgtcgctgtgcagacctggcttagaggacccctaaggctgaggggtcacttccagaactgagtccggtccgcaggttctgctacgctccagccagcccctaactggtccccagaagcggcgctgctacagggaccaggagctgctgcgaactgcgctggcgggggctcgtccttgggcgcggggcttcatcatggacacgctctcggcccaggccgcgaaacaagcccgcgtgactggcggaggcacagagaccaaggccgcttaacctggctggttgcactggtccctggagagcactgagcacaggggctgccacagtggccggctcagacatggcagagatcagcagagaatgggcaatcaggctcccctgagatgagcagcagcgcagaggaggtgcccctctcttactacaccaacttcaggattctgtgtctccctcattggtcttgagcacttgctccctggctgtacttggcaagggcttgagctggaaaagatgaccagactcccaccgcccagagggcgtcccctgcaggagagcttcatgcgcctggtggaggcctgtggggactcggagcaaagcatggacaactggctgagtcggctggacggctgccgctgactgtaacatgtaaagcaggcactgagcaccacctgcctggcagtccagggcatggagaggcacagacagcaccctgcttgtgacttcactggcccaactcatcctggaccccttgagcaagaccatggctggattccaggaactggtggagtggaagtggatccaggaaaatgccgtgtgaagggaggactcagatgcactccctgtggtctgggctcaaccagccaaaagagcaacaaagactccagaacccactctacctcctcaatcccttggccatctgtggagccccagagcctgcggctgtggcaaggcctgtttctgcgctggacctgctcacctgagcctgcagaagctgcatgggggaagagtgtggcaaatagtgacaggaagggagaagacagaagcctctcagccaactgcttcagccgagcccctattctaagcactggctccttggatagcagctgagatgttcctgaaacctctgcaggccccttaggacctttacaccttggatgagggtgcctgcaacccaggttagccaaaagtactgagggtcttaagtttgaagtgtccaaagtatagggaggtctcaataataaaagtctccatgatcagcatc

SEQ ID NO: 1085 - DNA, 3317 bp, Homo sapiens
acactgcgtccccatcagctcaaagaatacgcatggggacaagcctggggggccgtctgagagtcccccaaccctggatccccacggcagcccccactgttgggtttttcagtggctggtgtgccctgggctggtcacctctgcattttgctctgctgggagtttgctcctggccctccaacagcgcctcctctgtgaggaggaactcctgttcccgtggctccgctggctctggaggctggagttcccgtgctgggccctcctgggcgggttctctcttgctgccgccagtaccctgcccctctcgtcctcctgggtagcctgggaggaatggcagaagaaagcagtgaagccaggtagcagtagcccggccaccccaccaggctctgctgtaggctgggctctcaaggcagctgctccaggaggggccccctaggaagggactgccacactcctgggagcgttcctggccccctccagtgcaaatgaccctgggccccaaggctccgaacacccgcccctctgctccaggctagcttggctgagcccgatgcttctcaaggtgaggagggcgtccttgaagcctccggccaccccacaccaaggagctttcagggcaggaaatgtgatcgggcagctgatttatctccttacctggtctttgttcacagcctggctccggccccccaccctgctgcagggcccgaggacgtctccccaggggtccccacctcggtctccttggggggactgtgctgagcccagctgcctctgtgagatgaagataagaaggcgaagacatgaagggcctgcctgggggcagtctggctttcttgcaggggggctgcacctggttccctcctccctctcgctggcagcctgcggggtggtgaggatgaaggggctgtggggccggggtgcagggattagagggaggtgactgccatctcttcctcctcatcgtgtttttcacctcttaagtcaactttagattctcggactcagagttctctcctgacggtggcagggtcctcagatcaccggtgcagacagggccagacagggccaatgtggggacccactcagcctgtggcctctgcaggagggaggtcggaggcctcagcagccacccccgccacctcctgaaacagtgaatgtccttcattttcagctggcaagctctgatcttacaacgaggtatggaactgttcagaaaactttcagcagacgttcgagggaaaacagctcagcttcccatgccccccacctctgccaggagcgaccccatatcccccaaacagaattctggtaacccgggaccacagggccttcctatgcctcccctgccagctctgcatgactttgtcacgtacttgcgtgctggctgagatgatgctaccgctaccaaacaggtgggaggccagccccagccccagccccagccccaccggggccggagctcccggtgaagaagcgtctgcctggttcgcaggtgtccaggacacaccagtcgcctgactcccggtcaggcaaacgcacacatcaagttcttgcaagccagggctctgctggcatcttcaagaggagggagggtcctggccctgaccacagggctcccttaacaggaggagttacaaactcggcttcctggggggcatcgtggggtgtgctgcctgccaggagaccccactcctggtcacggggttccgtcccacacagtggcaggagccatgcatgattcttggctgaagaagaacccgcacagctatgtggtctgccgcccagcagggaagcccccacatcagccctaagggaacttcccaaagctcagcaggtgcctcttcctgccatccgctaggtcttctcttggcccctctcccaagccttgacccatagctgacacttctagaaaagtctttaccgagaaacggaccggctgcatgggtggtgaggagggcagttgcccagggcctggcatcagaggggcctgtggctaaggctgtcctgaaattcttaatcattttacctctgaacttgcgggtttttgttgttgttttttgaggcagagtcttgctctgtcacccaggctggagtgcagtggtgcgatcttggcttactgcaacttccgactcccaggttcaagcgattctcctgcctcagcctcccgagtagctgggactacagaagtgcaccaccacacccggttaatttttgtatttttagtagagacggggtttcaccatgttggccaggctgatctcaaactcctgatacacccgcctcggcctctcaaagcactgggattacaggtgtgagccaccgcgccgggcccttttcctgcctcctaaacaagtggccaggaattctcctcctgcaccgggtccccagattgtgtggcaagccctgcagatggcacaggggactggttcttcctcgtggaaagccaggcccggacacctctcgggcatcgcctgttggggtgaccctcccacacccagcctggaaccctagccagctcagcctccgtccgctgagaaatcaaggtgaccttgtggctcagccctcagggggcactcaccacacaagagttccctttcaagaccccctgttcggggctggggcccccaggaacggttggggcaccttcctggggccctgtttttccccaggagcggggcctgggagctgagggcgtctcatctccccacaggcatctgctgctgctcctggctgccactcacccctgtgagatgctgagggcaggatacctgtctgtgcggggcgtgggaaaaagggagaaagcctggcagagggttgggggctaagaagcaaagggcgtggaagggccaccgtgcacttttgaagtctctacttgccagtggccaccccacctctccctgccctcatccaaggacggacaggcctggcaggtggaccggagccgtggggcagaagcatcccaggcctggcctcagaggagggaggccatggtgaaagtggaggctgtctgcatccacctccccagcctttgtcaccgggacctcagcctgaccccaggcccaccccaggctgctcaccgaggtgggtaccctgcccaccgccagctcagatgcggtgtgtggactcccttctctctgggggtgagcgggagttccctcccctccacatcaggagctgggggagagctggagggccctgggatccccttgaccctggtcatcagccccagccctgacaggccctgcgtgtgccatgtgtggcctgggtttggagctcagcaccctgcgggaattctattaaatctccgattttatctg

SEQ ID NO: 1086 - DNA, 2952 bp, Homo sapiens
aaatccagctctgtttccgcaatcaaccctttcagatttgtgacattaactcacctcaaacctctgtctttccttgacaatgagtaagaatgtgttcctgaccatgccagcaggaaccttccttaaggacaaatacaagactttgaagctgcgatgggctcagagtgcagccctgctcaggtccctgggcaggctaaacgccttcctggggctcgaccatctgggcttctctgtgagctggatggcagggaagtcagaaggcacattggagaggaagtttctcttgcactcagagatgccgttgcctgtccaaggcccccagcctcgtagccgcagctctgctcactctcccccgtcacccaggcttcctgccgcctgctgtcctgggtattcgtgggatctgctcgctacttcctcacaagccgaagcaagagtggcagtgtgcctgtgactccctcatcaaaacggagagagcggttacatgaggcaggtgtgagggacccgagcactcctgaggagggaagaacactccttttggccatgagtgtccatcccaaagctgccctgcagcctagcccagtgcagattgaatcagaaagccaaagccccttccacccgcttctctcaggcaagctgcctgcaagagagaaaagtgtattagtgcaggagcttgtgtctgctgaggatggcacctggccctctcctctcaccacatccgggtcctcctgaggaccggtcccctgtccccggtccccagccagctcagcctgaccaggcttttagaggctccgcaccccagcatcggccagtgctgacccttgtatggctgtttgggtccccgatcactctcataacagccctgcccttgtcctatgccctctactcagagaggatccagaagggtccaaggaggccatgatccctccctgagctttttcacgcgggccccctccttcccctacgagggtccgtcctgggtcttagctggtctaagccctacacaagtcatggagagggctgtgtgtctgggacttctcgggggagagtgcactgtttcctctgagttcctggagggggtgcgccatgaagatcaggacacagccatcttcaccttccctcctcactctgggtccgaggcctgggatgagccaggacagcgggaagcaggggtggccctgggcgtggcccttccttccttcctgggcccgcaggagggggccacaccacccacccagggggctgacccgtcctcaggacagaaactagcaagctgtcaaacctgagggtttataactaaatgacggggtgctgcccctggaaattacacccagacatctcttttctcgtagacctgggcccctagcttttagacaggatgacaaatcactgacaggtgctgactttacatgcactgtggcctcatgcttcagccattcactgccaggcagtcttctagggcagcaaagaactcagccacacagcccgggccacagtcaggatgagacctggcgttagacctcccctcagcgccgctcaccccccattctgggcatttcaatctccaacaggagatttaaatgaagaaaacacgcacctcacacagctgtaaagggaggaactgggaatttctcccaaatcttgacccttgagttctagaaatggggttctccctggaatgcatgatggcattattctggaaggcaaaaataaagctatttaatatagaaatgtctttagcctgacaagccagagatttttaaaaatattgtttttttaaattttcttaattgagagatgagctaaaaagtaaccttttctaaatatttaatgtagctttgctatactttataaatactgtcaagctttggggagggtttgttgggataagaaaaagtacttataaaaatgcagtcagtatgtcaggaggctggcgtaattaacacagcacagggaggtcatggaggcttgtgtaattaacctaacataacataaatgtatttgcatgacacgtgcatcgcatgtgcatacgtgtgtgtgtgtgtgcacctgcggggcctctgggaggtataactgaggcaggcatcggaagggctctgtagggccagctggtactgggtgggcacctgggagccgcaggtgcctgcttctcccatcccctgaaagacttggctccttcaggccaccagtgctgcctcagggtgtctggctcccctccagagcagggggctgagccaggttggagcctaggccaaggccaagagtgtccccagggctgggctgtccctgtccctctgctggggaccgctgcctcccttcctgctcttcagaggtctcacgcctctgctgtcgggagggctggaagaaggggcagcagctggcagggggcctgtgcccactagaccctagattcttaactgtaactgtggtttctgtggccaggctgggggtgacagaggcattcaagccagactccatcttgaataggggctgggtgaaatgaggctgaggcctgctgtgctgcagtcccaggaggttaggcattcttagtcataggaggttggcaggacgggtatcacaaaatacaggtcaggatgcggtaaagaagacggccaaatcccaccaaaaccaagacagtgacaaaagtgacttctggtcgtcctcactgctcactatatgctaattataatgcgttagcatgttgaaggacactcccacgacagtttgcaaacaccatggcaacttccggaacttactatgtatggtctaaaaaagggagggaccctcagttccctgcccctttcttggaaaactcatgaaagatccaccccttgtttagtatgtaatcaagaaataagtataaaaatagccagttagcagtcctcagagcttctctgcctatggagtagtcattcttttgtttctttacttctttaataaagtggcttttacttt

SEQ ID NO: 1087 - DNA, 2617 bp, Homo sapiens
ttagtatgtccgagtctatcccggcaggaaactcttggcacgaatttcaaacagtgaaaaggagaaaaaaaattaggtcggtcaggttaggtgtcggcgataagaaaagagattgcgggagcatccccagccttcttctttccccttttgccgcccccacacactccccccacgcgtctatcacggaagcaacacagaggagcgcacacgcaccgctcacacctccaactattgactgttgtatcaggtgttctaaccgggatgtgacagttgaggctgggagcagaaataatcaacatgcccattagatacaggacggaataatgcttctattggttgggtcccttcgaggtaagcgggtgtattgagcggggaaacttgggatctgagaatggatcaaagctactttctttcttatttttcgtcctactagttttctttaagaatcttggtttgtacatataagttagcgccagcccacaaataaactggtaggagtaagggctgtatacctttccacaccttaaaaccatctgctcagtttgacatttaaaagggcggagagcagagaaggaggaggggggagtagggggaagaaaggagtcagggacagagaaaaagattcaaacgcgaaaaaaatggcttgcactttagcccacaagtttgtgtcaattgcacatagcgcttgaatgcacgttttgcacacaccacgcccgggaactggcggcgggaaaagttccctgagaaccccagtaagtcctgtgtcacgccgtggggaaaagcaggcctgagtcgaagtcggggtaacccgcttgccgaacaaggaagctctcccacccccagcctcggcggcagaggctcccggctcgcgacgctctgccgcggcggttcgcagcccgcattagggcgcaggagcggcgacttgaaataggagcgcgcgccacgctaggcgagcgagatcggttcgcagcccagctccgtgagctgcctcggcgcagccctgtcccgtgtcctgtcctctactgtcggggaggcgtacaggccaggctcctggcaacctctcttgctagagctgcggcattctcctgggtctcgggctgccctggacaagacttgaggcccgagccccctatctcgggcgactcccgctttgttttctgataggggagaagcctggagacaaggagtcgcctagatattggctccatctctgaaaccagccgccaagcctagggttaagacaactcctccctccgccccacttccaacacaaccccagtaacttagaagttaacgcaagttctgaccggtcttgtaacacactctatccgtgcaggttgcatttacttatttatctgaagggtgatctgtgtgttcttagacaaactcgcagttatcacccatgcatctggttctgggttaaatacacttcgccttgacatttgctcggtgtatgctcacgcctcctgttctttcttaaagctgttaggtgggggcaggagggaagacagtgtgtataagtaatttaaaaccttacaaacaactgttatcagatcctaaacaaaccaattctgagaattacaaccagattcagttgagaggcaaaagtggacgtggattttggaaaaggatgcctaaggacttccaggtcagccacccaccgctaccaccaccaccaccgccaccactaccaccatcactatcagcaccctgaagaagggaagagaggaaaaccaaccccagggtgcaggcctgcctgctgcaagctttctagaggcaaaactgactgacggcctctcactctcatctcctgtgctcagtgtgacgccaagcccaacctggatttgttctgaatgggggggaagtgaaatgccacaagatcagtagcaagtagcagctgcagcgttttctctcctgggaaccccactgcttagaagcctcctgagtgatgtttgtttaaccaacagctttcaaagtaaacagaagccaatcactccaaagaagttgaaatataacccttacaagaatttggatccaggggtgctggcagaaagaaagtaatttttaaaatgataaagaacccactcccaaataagagtctgccacattgctttaaggagcgcagaattgtcatgaaaatataatttcatcgaaagggctaatcacaataagttgacctcgaagaaaatcactcttcgcccacaaagacacacccgcggggatgaggaggttgtcagtgattgaagggacacactactacttgattttatggaagtgggcgaaaacaatcaaagggaagtacattccctgccctggagtagtgaagtgtaggctgggagctcttcgccgccaaccctggctttgcctcaggcaccgaactttccaataccaagatattaacagatggtggtgagcacatggagggctgctacttacataatctagccactccgcccggctgcccagagcccggcgaggaaccggccaggccgcgcgcgcgccttccgaggggtgcttcctgacataacttgcctttctccaaccccacccatcgttttgagggttagcatttggagaggccgtgatttaaaaaaaccaaacaaaaacaaaaacaccc

SEQ ID NO: 1088 - DNA, 3297 bp, Homo sapiens
tttactatccccttagctgagcaagactgtgaacagtttgcatttacaattcctgcagtaaacaacctgcagcctgctaagcgttttcactggaaagtattgccacaaggcatgttaaacagcccaacaatttgccagacttatgtagggcaagcaattgaacctactcgttaaaagttttcacagtgttacattattcattatatggatgatatactttgtgctgcccccactcgagaagtattattccaatgttatgatcacttacaaaattcgatttcttgcgctggtttaattatagctcctgacaaaattcagactactactccttactcctacttggggaccttagtaaatgacactaccattgtgccacagaaagcaaccatacataggaatcaattgaaaacattaaaggactttcaaaaattactaggggacattaattggatacgacctgctctaggcattcctacctatgccatgagtaatctattttctatccttagaggagatcctggtctcacaagccctcggtaattaacaagagaagctgaggcagagctgcggctaatcaaaaagcaagtccataaagctcaaataaatagattagatccagagaagactctagatttgctaatttttccaactcagcattcacctactggtgttattgttcaagagtgagatcttgtagagtggctttttcttccacatactaattcacggactctaactccttatttggatcaaattgctactatgataggaaatgggagaactcggattgttaaattacatggatatgatcctggaaaaattattatccctctcacaaaggcacaaatacagcaagcttttataaatagtcttacttggcaaaccaattaagctgactttgtgggtattctcgataaccattttcctaaacaaaactgttttaatttttgaaattaactaattggattctccctaaaataactaaatttaaaccaattgaaggtgctgaaaatgtttttacagatgggtctagtaatggtaaagcttcttattctggctcaaaaagtaaagtttttcagatgccctatacttcagctcaaaaagtggagcctgtagctgtaattgaggtagtgactgcttttcatatgcctattaatgtgatttctgattcttcatacgtgattcattccacacaattaactgaaaatgctcagttacaatttcctgcagatgaacaactgatgattttatttacccaactgcaaacagcagttaggagtagaatgcaccctttttacatcactcacattagggctcatacacctcttccaggcgtcaccttttgcagtgttttgcagtgatgggcattccagcttctattaaaacagataaagccccaggctacactagccgagctctagctacatttttctctatacggaatattaaacacattactagtatcccatataattctcaaggacaagccatagtggaaagaatgaatctctccctgaaacagcagttgcaaaagcaaaaaaaaggggggaaaacaaggactacgggacaccccatatgcaactgaatctagcattgttaactttaaattttttgagcctgcctaaaggccagatcctatcagtagctgaacagcatctacagaaaccagctgcaaagacagaagcagaacaactagtttggtggagagatccaataacaaaaagttaggaaataggtaaaataataacttggggtagaggttatgcttgtgtttctccaggactgactcaacagccgttttggataccatcaagacacctgaaaccttatcatgagccagatgctgaggaagagattccgggaggaaactgaggacccccccccaacccccggttgcagccatgtcgagactgacgctgaggaagaccccaactgtcacgagcaacacctgtcaaacacagccacccacctggagacagatcaagaagctgtcacagatggtggaagaaaacctgaggaaagtgggacaaccagtcgcaatgagtaatttaatggtagctatgatagcgatgatcaccactgccatgagtattccttcaataagggctgacacagaggacaattatacttattgggcatatttatcaatcttggctggcaataatgcctggatgtaatcactctatgacacagttatacaagctttctgatctcataataaatctgctcctataattgaggcatactgccctcaaaaacatatttgtaaacaggattggacccagttagcaaaaatgaacgtacttgtttaggaagattgctttgcagaacaggcagaggtgctgcacaacaattcctatggaatcattattatggtcacctatggggatgtttagcttgaactgcacctctcagtctgcatgccatggccacactgcgatcagctcatctgaacaaaatggtcagatgatagaaatggtaagaaatacagcaagagttcctattatctggaaccatggcagtatagtggcacctcagcctcaaatgatatggcctgctctaggagctaaacataagcatttgtggaaactgttaatagctcttaataagatcaaaatttgggaaagaataaaaaagcatctagaaggccactctacaaacttgtatttggatattgcaaaattgaaagaacaaatatttaaagtatcccaggcacacgtgaacttaatgccaggaactggagtgcttgaaggagctgcagacagattagtagctagtaacccattcaaatggataaaaacacttggaggctctgtgatttcaatgatgattgtgcttttactctgtgttgtttgtctttgtatagtgtgcagatgcggatcctgactcctgtgagaagtagctcaccgtgacaaagctgcctttgcttttatcactttgcaaaacaaaaaaggggacatgttgggaacaggcccctgaatctggccataaactggccccaaaactggccataaacaaaatctctgcagcactgtgacatgttcatgatggccatgacccccaccctgaaggtcgtgggtttactggaatgagggcaaggaacacctggctcacccaggatggaaaacggcttaaaggggttcctgtaccacaaacaatagcatgagcgatctgtgccttaaggacatgttcctgctgcagataactagccagagcccatccgtttattttggcacatccctttatttcccataagaaatgcttttagttaatctataatctatagaaataatgctt

SEQ ID NO: 1089 - DNA, 2728 bp, Homo sapiens
cacactctgcgtgtttttgtgtcctgccaggcaccgtggtctcatccgcctgcacagctgagtccagtgggagctgacgccatgaccctcaccctctcagtcctgatttgcctcgggctgagtgtgggccccaggacctgcgtgcaggcaggcaccctccccaaacccaccctctgggctgagccagcctctgtgatagctcgggggaagcccgtgaccctctggtgtcaggggcccctggagactgaggagtaccgtctggataaggagggactcccatgggcccggaagagacagaacccactggagcctggaacctaccgatgctacagcgcaatcaggtcctacccctacctgctgtccagccctagttacccccaggagctcgtggtctcaggtgagggccctgaccctgtcctgtccaagctcaaaggctcagctcaggccctgcccccaggagagctctgggctgggatggagtcgcggtgcgggggggagggtttgaggggggctcagccagagggagactcacccctcagaggggaggaggacaacgggggctccccaggcatgcccacacttggccccatctcctgggatgcaaatggtgaaaggtgagcagaagaaagtttccagagaagccacgggcaggtggagggacgggtttcctcactcagcaccaaagcgcctcgctccctttctgtgcttattcccaggaccctctggggatcccagcctctcacctacaggctccacccccacacctggccctgaggaccagcccctcacccccacggggttggatccccagagtggtgagtgaggggctctgagtgggaggtgggcggagaccaggggaggcaggggtgggttctgtcgtaggttcaggctcctctggagatggtgaagtgcacaagcccttcccctgcctgggcctcagtttctccaagtgtaaaggagagaggcctgcattgatgggattcttcaggggactgtcctgtcccaccggcagcagtgacggtgacctggggcaggggaggggagcagggccgtggtttggggcattcaggctctttccctgcagctccggggctccgctcaggtgcagagaacaagggctgcgggtcagactcctgggttcacttcccagctctgccgcatcccaccgtgggcccaggcaggtcaactttctactctgactcagtttcagcagctgtaaactggctcagtcccatccagctcacagaactgctgcgaggcgtaagcaaaatcatgggacctggccctgtacacagctcggcaggggcaccgtcctcctgctaccctcagcccttcccagatacacacagagcccctatccagacaggttctgcatgggagtatgggaacttggcagagtgggaaacggacctggctgagctgggagtgagagcaatgcagggtccgtcctgcacaacccactccctctcccaggccctgctgtgctggggaagggaggatcctaagaaggacaccagccccagatggagacactaggacaggcccctcctgtcaaataggaaacaggtgtgcacctggtggggcagcaggaggacagctggggaaaacacaaagtccctggttcccttcccagacctgcttcttccaggctgaggagcctggggcaggcgattcccctctctgagcctcagtttgctcctctgtgaattggggggttggcaatcccatgttgcacaactgctgtgagggttggagctcatgaaggaaagacctagctcgcgcctgcacacagaaggtgcttacatcaatgacgtcatccccattcccaacgtcatcacgctcaaggtctgggaaggcacctgggggttgtgactggggtctcagtggccttcgtcctgctgctgttcctcctcctcttcctcctcctccgacatcggcatcagagcaaacacaggacatcggcccatttctaccgtcctgcaggggctgcggggccagagcccaaggaccagggcctgcagaagagggccagcccagttgctgacatccaggaggaaattctcaatgctgccgtgaaggacacacagcccagggacggggtggagatggacactcgaagcccacacgatgaagacccccaggcagtgacgtatgccgaggtgaaacactccagacctaggagagaaatggcctctcctccctccccactgtctggggaattcctggacacaaaggacagacaggcagaagaggacagacagatggacactgagagagtcctttcctctccaggcccccaggcctccccacccccaccacgttccttccctctcactctcccccgctgcaggctgctgcatctgaagccccccaggatgtgacctacgcccagctgcacagcttgaccctcagacgggaggcaactgagcctcctccatcccaggaaagggaacctccagctgaacccagcatctacgcccccctggccatccactagcccacgggggacccagatctcatactcaacagaaggagactcagagactccagaaggcacaggagctgcccccagtggacaccaatgaaccccagccagcctggacccctaacaaagaccaccaggacatcctgggaactctgggactcactagattctgcagtcaaagatgactaatatccttgcatttttgaaatgaagccacagacttctcaataaatcaatgagctg

SEQ ID NO: 1090 - DNA, 2977 bp, Homo sapiens
ttttggggtgcccttaacaactgtcgtgactccagagaagccgatccccatttttattgaaagatgtattgagtacattgaagccacaggactgagcacggaaggcatctaccgggtcagcgggaacaagtctgagatggagagtctgcagagacagtttgatcaaggtaaagtgcagcctggccaggcatccgaggccagagctggtcaaggcagacacagctgcctcggtgaactgtctgtggggcttcggagcactcctgccagcacagacccaaagccacgaggtgctgagactgagaaagagaccatgtgtggctgcagcggggaggaggggaccgggtcctgtcagtgaaccgaagcaccatccctgcccaagctgggtcatgtaggccactccccacactgccactcacagatgctcttccaggttgcccgggcacatgcctccctcaccacactgaagagctttgcctgttttcccatgcagagctagttgcaggcacatgatatacaagtcgggttgagatgtgatcctgttttgccagggcctcagatctaccctcctcacaaagtcccagcaccagagaaagtgagggaccatcgtgtgaggagctgagcccttgggacagagacccaagttacatagctcttggcagggactcccttctcctaagctgagccagcttcaagaggcctaaagtcaggcagccaaactacctcttggaattgcccacactgtgggatgagaagccacgtcccccagtgccagaagcaaaagcaccagagcagggcacattcccatctatcagcagccagggcaggaggcaccacccagagtggacaccacacccacttcccaggtgggcggcccttgcgccttgcagcaccgcagtcgggctcagctggccggcagcaggcagaggggaccgcgggacagggaaacgcctgctaatctgtgggagacacgaggccaaagtgagggtagagcccccagtgtgggatgcatttgtatatatgggagatcctgtaccagcttacctcccccatagtggaacctggtactgtccatctgtagagatttcttcgtcatcaggaacgcactgaagtatgtatgcaatgagaaggaaagcatgacatgggtcagcggtgcctgtggctgggaagggccagagagagaaaaaatgagcctatttgccctcccaccataggggacaaggatggaggcagcagtcacagtggttgctaacatctttgtgacctacctggaaagcgagccaccctttaggaaagccgcctccttcttctgtgatgggaagggagtaaggaagaggcaacagcatatcaaagccagatgaaggcaagctcctggcaccaaaaaccagcatgtgggggtagcacccctgccccgagagtggtagaaggggcagttcagcagtctcggaaagaggtgctggggccagcccatgcctgaacctcagaactcgcgttagcgctcacaagtcccacccctccaatccttgccagtcctgaggccgtctctggctccttgaggtttctctagcctctcctgagccccgagttgtcctgatgcttctgcctggcttagaatggtttggcctcactctcctgacttcctttcagaccacaacctggacctggcagagaaagactttacggtgaataccgtggctggtgccatgaagagctttttctcagaactgcctgaccccctggtcccgtataacatgcagatcgacttggtggaagcacacaaaatcaacgaccgggagcagaagttgcatgcccttaaggaggtattaaagaaatttccaaaggaaaaccacgaagtcttcaagtatgtcatctctcacctaaacaaggtcagccacaacaacaaggtgaatctcatgaccagcgagaacctctccatctgcttctggcccaccttgatgagacctgatttcagcactatggacgccctcacagccacgcgcacctaccagacaatcattgaactctttatccagcagtgccccttcttcttctacaatcggcccatcaccgagccccccggcgccaggcccagctccccctctgccgtggcttccaccgtccccttcctcacttccacgcctgtcacaagtcagccgtcgcccccacagtcgcctccacccaccccccagtccccaatgcagccactgcttccctcccagcttcaagccgaacacacgctgtgagccaccaagacctggggcgacaggagaaccggtcctctctctgacggggtggcatttggccttgaacaaaaccaagtccactggggacagaggcaggggcaagtggctctccccattaccttctcaagacctcagtgggagcaccagccaatggtaccatcggctgggctgccaggtaccctgggcctggcgctgcagacctgagctggcttggacccatttgaggactgaactaggcaggcaatggctccagtgccctccctctgttccctggaccaccaccccacgtagctgctcacaccagcctccgggtgcctccctctgcttgtacagagcccatggtcgggacagtgccctggcctttgccggggaggaggatgctctgagattcagggtggggctggcaacccctgaagagaacacttcctgttggtctgtctcttcccaccttccatctgcacacacccccaaggtaagggtgcagcccggctggcggcctccttgggaacgtgtaggccacggctctgccaccactaggtacctgctgagggcgctggctctgcagatcagaacaacggaggatagctttgtgcctggacccagagagtgtgggactccccgcttcatccccaccgtcccactccacagccttcccgaaacattccctggcaaacaaaggaacactaggagaaaaaatggaaaaacccttccagtaattaaaaaggaagaaaccacag

SEQ ID NO: 1091 - DNA, 2073 bp, Homo sapiens
ggtgcctctgcagcaagcgtggggcgcgggaacccgagcaggttcgggggacggaatgaagggccgggtgggctcgcgaggggccggggagtccgcggggagcgagggagtttccgaggggcgggtcgtgttcctggcagcgtccctccagggcaggcccgccccctttgtcccagttccccgctgcccgggctggggcggccggggttcattcattgccggcctgaggactcctagctcggccccgctccgcgctacagcccaaagcccagcctgagacccagccgccctcgtatgcccacggcctagctccccttccctccaacagacagactgggaaaaccgagtgggcgacggctgagcaaggtcactccgctgtcgggggcgcagccggcctcagaccagctttcgtgcttcccagggcctctctgcgaccactttcggggtccgcgccaggcgcggggcgggggcgggggcggcttcggcgcggcgggcagagtccagcgggcagcggtgggggaagggcgagccgcctggggagagggccgggctgcgagcctggcgatccagattccagcccgctgtcgccagctgtgggaccgaagggcaactgtttcacctctctggccctagtatctgtatctgtaaagtgccagtgataacacctgtctcaccgagatgctgggggaattcaggaaaatcatgcaaaagtgcctggtacggagcctggcacgcagagggctcttggtcaagtgggttggagctgcgtgagcccagaaggggatagaggcagcgtgggggaaggcggcagcgggcccggtcgctgggaatgaaaggcctcagtgtctggggcttcctccccgtactacccgcagagtttgttcagggtggaggtgcgcacctggccaagtccacgtctacacggcccacccagagtagcctaagttgggcgggattcctaactctgagccaggagtgaccgggctggccctggcatgggcagaggctgagcgggggttggggtggggccccctccaggaccaaccacggtgtggttgcccctgagctggcctcagcctgcctggcaaaggacctcacccttgaggccatgtgatctatttcctgcttcctcccagctgacccttgagggaaagggggtgggggccgcctagagcaggaggtattagtcactgcgcccaggagccagtttacacctagcgaaggcggaggcattggacaagcctgggtctgagcagacagaaccccttcctgcgaccctggagtcccaatcgtgctgccattttccttctgcccaggactctccagtcctcagtcaccttggacaaagaagtgtggatcctcagattccatcttttccaactccaaggtgccatggcagagaaggtgctggtaacaggtggggctggctacattggcagccacacggtgctggagctgctggaggctggctacttgcctgtggtcatcgataacttccataatgccttccgtggtgagcggggcagtggggctggggctacttgaggggatggcagaagcaaaaccctgggttccacctccaccaccgggcggggaatgtgtgtctggctagtccctgggaacacagcaccccatgtcgtgatgatgtggcctacatgtaccctaccaggagggggctccctgcctgagagcctgcggcgggtccaggagctgacaggccgctctgtggagtttgaggagatggacattttggaccagggagccctacagcgtctcttcaaaaaggtgggtgcaggctgggcacggtggctcacgcctgtaattccagcactttggaaggccgaggtgaggagatcacttgagcccaggtgttcaagaccagcctgctcaacacagtgaaaccccatctctacagaaaaatacaaaaattagctgggcatggtagcccatacctgtggtcccagctactcgggaggctggcatgggaggatggcttgagcctgggaggtggaggttgcggtgagctgagatggcaccactgtactccagcctggacaacagagcgagactgtc

SEQ ID NO: 1092 - DNA, 2498 bp, Homo sapiens
ttaagtgaccctccagaacaggtgatggcagagccagtgccttctaactgatgttcagtccagtctccaaatttcccctttgtataagaataccagttgtatttgattagggcccaccctgatgacctcatttgtaaatacttatctccaagtaaagtcacattctgactttaaaaccacatcctgggggttaggatttcagcatatgaatttggaagtgggggacagagttcagctcataatacttcactctctccccaccagaatacatgtccttcacccaatgaaaatattccatcccaacaaccccaaacgtctttcaaacatcaactctcaagtccaaaatctcatcttaaatatcataaaattgggtatgcgtgacactcagggtatgagtcatcctgaagcaaaattgttctctagctgtgtgtgaacctgggaaaccagacaaaaagttatctgcttccaaaacagaatggtgggacaggcatagaatatacattcccattctgtaagggagaagttgcagggggaaaaaaaaagaaagaatcatggttcccaagcaagtctgaagctagcgggggaaattccattccattttaaggcttgaaaataatcctctttggctagatgttctgtcctcagggctcacaggggaggggatgcatagccctgccttccaggcacagggtcacaggagccccacccccacagccctgggcaatagttctaccctctacaaccaaggaggagccagtcgctgaaccatctttgaagccattggtccttcatttcatcctgtctctgtccctttcagtccatgctgtcaatgtttctgctggtataaaattctcaaaaaccttattggcctcccatgcaagtcatgggggtccaagcagtcagacaagagggcactccgcggatctttttcagataaccacctctctatttctggcatctactgtggaggttgattggatccgtgagtcacgtacctaatttcgttagcacatggctgtccagccacacccttggcattctctcccagtctgaggtactgagagttaagcacttcgatgtagcagtttggcggggtggagcgcggggggggacacaattcacagctgaaatatttctttacttaagctaagactttatcccaattttggtatatctgaccagtcttactaaagctacattttgtaagaccagaaatgagtcttttcaaaaccaaaaggttggtgtgaggacagagaaagtaggcaagcggggagacaggagacgtctatgtgtgcagaaacctgcacctcttctcctccagctacccgtgcaggtcatttccccccaggcccatccaggtctagcgatgtcccagcactgccccctggtggagccctccaccggcctgcaggaagggcatgtgactgactccctcagcgccctgcagtcttgtcccctctggtcccaaaagtgtatcctgcctccgctttgcgataggtttcttcctgccctttgcctggaaattttatctctggttcttgcaaacattatttacagctgtctaattttttctgtctacctcacagctgccagactaaagtaggtgggaagccattttccctctctaggtcaatgaataccccccgttctccacccgcgcttttgaagattccagcactgctgccaagtcaacccatctgcaggagaacgctttggaaaaaacagactttaaaaagaaaagcaaactgctcttagcccctgatagcttctccacaggagagggaatatggacagagctgaggttcaagacacatgtgctgtttgagctgaatctgtgctgttttcttctttccgtggttacccaacaacgaaggcgtgttgtaccttcttgccttcaaacctgttcctcctcccgtcagatgtccttactcctcaatttgaagttttccttcataggatttctgagaaggactttggaaaaagtgctccagatctctgccagttccttagccatgaaaaccaaacataaaagatcatctggggacattcattcagagcacgttacccacattccaccaccactactctgacagcacaaaacatataccaggagctggggttatgtggtgggggagtccttcctattgtaagccctaacattatgaccctctggggttaaattttataattttcatattgtggagtcccatattttgttctgctttccactagtccaggcttctgaggtcttctctgtgttcattgcttattaattttattcagcaaagattaattgagctcctgcaatgagacacacacactatgttaggtgctggggaacaaaatagggaagggccctaccctcagaaagcttgcaatttatgaaagaatactaacaaaacctgcaaagtggtattttaagttattttgtttcatttttgctattgaaacaaagaaactgagaatttggtatgattcaaaaaatgtttaggtacaag

SEQ ID NO: 1093 - DNA, 2690 bp, Homo sapiens
gcagagttcaccaacttttctggggatcagcttttctttttctcaacaataacttaagaaaccacctaaaaataaaatatactttaattattcccactagcatcctactgtgtctgcttgtctgctttccatgctctttcctgggagtaatgagatccacaagcagaagagtaaccagaaaggatcaaatgtctttgtgttgtttcattttctgttaggtgggaaactttcagcgacaattggcagaagctaaagaagacaactgcaaagtcacaatcatgttggagaatgtgctggcttctcacagtaagatgcaaggtgctctggagaaagtacaaatagagcttgggcggagggattcagagattgcaggcctcaagaaagaaagggatctcaatcaacagagggtgcagaagctggaagctgaagtggaccagtggcaggccaggatgcttgtcatggaggaccagcacaacagtgagattgaatctctacaaaaagctctaggtgtagctagagaagacaacaggaaacttgctatgagtctggaacaagctctccagacaaataatcatctgcaaacaaagctagatcacattcaagagcaattggaaagcaaagaacttgagcgacagaatttggaaaccttcaaagaccggatgactgaagagtccaaagtggaagcagaattgcatgctgaacgcatagaagctctaagaaagcagtttcaaaccgagagagaaactacaaagaaagtggcacaacgggaagtggctgaggtatagtcatgagaaaagtttctcttttggtgaatgcctcttaggataagcagctcaaggatttcagagaatggctacagttgttctttgactcctctcatccccctttgatcagcaggccagatgtaattaagacctctctgtaaagcaacacacaagaaaaaagtttctgacataattctctgcccgacaaaggtgtgccttgatgggagattttccatcagagagtgataagcaagagggatagaggaataaggagactgccatttgatagacagaagagaaatcatctgtcttctcagttcatttaactggcatctattctgcatctaccatttcctgagaggcacagagaaaacagtagaagatatggtccatgccccagtgtgtgccaaatgacccttgtttgggatctccactccggaaatgagatatatagggaaaacatcagagaactttcttgggtagcagaggctgtgtacaactttgaaggaattcaaagtaagagaaagtttattttaggccatttggttgatagaagaagagaggcttaatgagagtacaggattgagactagcagaaatggcagggctggacaccttatgaaacagcacaggccatgcttacttacaaaaatgaacaggacatgtgagcagatgaaaagtagcctttcttgattagagcagagactttggaaaatgttagagagagagtgttagcttaaatgggaccacctgatggatggccttagttatagaaatgttggatgtgtgctcttaggtagaaacggagcactatgggtttctgagcagggggtggtatgatagaagcatgagtttaggaaggttaatgtaacagcagaggacagtagaggataatgaagagaaactggaggcatggaggctcgagaaaactataacagttaattcgagtattagatgattagggccaagcaaagtagttcagttgaaaatagaaaacaattaagtcagaaagcccattttaatagaaaaaaaatcaaacaggccaggcgaggcggctcatgcctgtaatccctgcactttgggaggctgaggcaggtggattacctgaggtcagaagtttgagaccagcctggccaacatggtgaaactccatctctactaaaaatacaaaaattagctgggtgtggtggcaggcgcctgtaatcccagctattcaggaggctgaggcacaaaaatcgcttgaacccgggaggcagagcttgcagtgagccgagatggtgccactgcactccagcctgggcgacagagtgagactccgtctcaaaaaaaagaaaaagaaaaaaattatcaaccagacattaaatgttgtatcctggagagggagggattaaaataattccttggttggcatggctggtctgtgtttcaccaaatttgttacgtttagtagttgcaattgacagaccattcacaaaatcaaactcaaataatggtatataaaacaattttgtgaattgcaaagcactatataaatacaaatgttataaaaagcaaattctgctttttatagaagaattagggaacataaaggtgtgctaaatgtagaaatgtacctttagtcggagatcattgttaagaatacttacagccgggcacagtggctcatgcctgtaatcccagcactttgggaggctgaggcagggggatcacgaggtcaggagatcaagaccatcctggctaacatggtgaaaccctgtctctactaaaaatacaaaaaattatccaggcatagtggtgggtgcctgtagtcccagctactcgggaggctgaggcaggagagtggcatgaacctgggaggcggagcttgcagtgagctgagatcgcaccactgcactctagcctgggctccagagcacgactctgtctc

SEQ ID NO: 1094 - DNA, 2036 bp, Homo sapiens
gacacagtaagtaccgatgccgcaaagggaggtccccagggcttgagggcatgtgaggcgaggagaggatggactctagagttttggggtttggggtctgcaaagctctgaaggagtctcatctctgcagtttcaggtatccaaggcagcagagaacaaagaacagccaccatgcagctcttcctcctcttgtgcctggtgcttctcagccctcagggggcctcccttcaccgccaccacccccgggagatgaagaagagagtcgaggacctccatgtaggtgccacggtggcccccagcagcagaagggactttacctttgacctcggcaatgcccttttcaccgacctggtggtagacctgcaggacaccttcgtaagtgccatgaagacgctgtacctggcagacactttccccaccaactttagggactctgcaggggccatgaagcagatcaatgattatgtggcaaagcaaacgaagggcaagattgtggacttgcttaagaacctcgatagcaatgcggtcgtgatcatggtgaattacatcttctttaaagctaagtgggagacaagcttcaaccacaaaggcacccaagagcaagacttctacgtgacctcggagactgtggtgcgggtacccatgatgagccgcgaggatcagtatcactacctcctggaccggaacctctcctgcagggtggtgggggtcccctaccaaggcaatgccacggctttgttcattctccccagtgagggaaagatgcagcaggtggagaatggactgagtgagaaaacgctgaggaagtggcttaagatgttcaaaaagaggcagctcgagctttaccttcccaaattctccattgagggctcctatcagctggagaaagtcctccccagtctggggatcagtaacgtcttcacctcccatgctgatctgtccggcatcagcaaccactcaaatatccaggtgtctgagatggtgcacaaagctgtggtggaggtggacgagtcgggaaccagagcagcggcagccacggggacaatcttcactttcaggtcggcccgcctgaactctcagaggctagtgttcaacaggccctttctgatgttcattgtggataacaacatcctcttccttggcaaagtgaaccgcccctgaggtggggcttctcctgaaatctacaggcctcagggtgggagatgaagggggctatgctatggcccatctgtatgctggtagctagtgatttacacaggtttagttgactaatgaggcattacaaataatattactctatgatgattgcttccacccacacgactgcaacatacaggtgccttggggaaatgtggagaacattcaatcttgccgtcactattcatcaatgaagattagcactgagatccagagaggctggatgacttgctcaagttcaccagcatggtagtggcaaagagaggtccagagtcctggcccttgatgcccagctcagtgccacaaagctcagtaggagggatgttccagtggatgagggccaccaggaagcacaggtccaaggctggtcccacacttatcagcagcaacaactgtcagttcatcctgcatgggaaaaatgttggaatgggagtctgaaatggggctactgtttcagtcctaacgtgctgtgtgacattgggacaacactttccctctctggacctcagtttccctctgtatacaaggatcagattcttgctgtgacccaagaactcctgaaatcatatagaaaggctggggtgggccctgtcattcgtggttgatttcaatacactcaagtgccattcatcctttaagaaaaacatctggatatcaaggtggaaatggcccatttaatgattgattatatcattttgtggatatagttataatctgatgggcctggctgggagtggaagaagggaagccttttgcaaatagtagagtgtcagttgcaggtgccaatgactaactttttgaattctatgttggcattaacaataaagcattttgcaaac

SEQ ID NO: 1095 - DNA, 3052 bp, Homo sapiens
atttgagacagagtcttgctctgtcacccaggctggagtgcagtggcgcgatctcagctcactgcaagctctgcctcccaggttcaggccattctccagcctcagcctcccaagtagctgggactacaggtgcccaccaccgcacccagctaattttttgtattttttagtagagacgaggtttcaccgtgtcagccaggatggtctcgatctcctgacctcgtgatccgcccacctctgcctcccaaagtgctgggattacaggcgtgagccaccgcgcccggccaatttttgtattttttgtggagatgggatttcgccatgttggccaggctgttcttgaactcctgggcccaagtaatctgcctgcctcggcctcccaaagtgttgggattacaggcgtgagccaccacgcccagccattccatttactttgggctttccttcacatcagaatgcacgtgtgggcagctccctaagcacccaccccttagtcgtttacacagagctcatgcagtggactctaggagcctcctttccgcctgtaaaatagagggttccgttgtcaatgtcacagggtggctgtggagactaattgagatcatctgtgtgactcccgaagcccgctgtaaatgtagctgttcccattatgtgacagtgaccttctcacgtgtggcacagccaccaatggcacagttgaaggcctgggagttctcaaggggactaggccttgcactgagcagagcaagcagggcaggcttcaggagaggtggttaaggtccctcttgggagaccattcccctccaactagaaagcgaaagctacctctcagtctgggcctgtggcaggttgtggctcactctaagagttcgtggaacaggaggggaagacactttacccaaacattccaacagatgcgctaggtgtgttgttatccccatttgtcagaggaggaaactgaggcacgagggggtatacaagtataccaaagagcacccagctatgaaaggggaggcagggatttgaacctatatgccatttatttatgtaaaagcaagggcagccccttctgtggagatgcacaaacctacgtgtgtgaatatctgatccagtgctccctcctccagtgccgtggctgcctggctccttccccaggccccagccctccccacatccagaaatcataaaggcacaacaggggcatccaggaccctgctatgatggtggatgaaggcctagaccaggagcccaaggccgggctggtgtcccttgctgtgatcttgtgactgccttctcacatggggtgggggacagcggctgggagccggagtccaggctggggaggcaggcctgccgtttgacacgtccccgtccattccatgcggacttcctgggaatgaccagaggcctctatgcagttcctgttcccagcggctcacagtcgccaggcccagggagacaaaacgtccctgaatgcggtggggcagggaacaatatggggcgggcggaggagggccacaggaagtgtgttagggacagccggagagctggcgtggggctgggggtgactcagggacttgtgacttgataaggtacgatgactctgaaggaaaacagccggagtccagggagggcgccgaaatggtggacaggacggggtttctggcgcctgtgcggacctgagttcttgagtccccataggtctccctgcagcaaagaaccttaaacaatatccaaccaaccacgttacagtccctggctctctcaggtagggatgatgatcctgacctcactaaagaggggactgagggtcagagaagtgagatgacattcaccattccaagatcacacaggaatgtgcaatggtaccaggatacacagcaggccagtctcattccagggcatgtgtacccagctaggcttcctggcactcaaccctgacccttgtggtcccccaaaactagacactcctgtatttgagcccaaagcctcttactgggtcttcacatccttgcttgcaaagccagagcccccatcataccccaccaaagacccccaacgaacaggaccattttgccattagaatttagagtttaagaaaatgtttgaaactggggaaaagaacacctcttagctcccaaatataacaagaaaactgcaagttaaattaatcatcacagttaaatcacattcacgatggaatctgtgggtttaatatgcctgatatggagtggggatctcaaaactaagagcgccagggtggaggagagactcccaacagccctggccaggcctggccctgcagcctgagcgttaacaccagcagtagtgtgctaggactgggaggctccaccagctattatccaatcaagtcacttctcagagcctcagtttctttattagtcaaatgggaccatagttagctaatactgggttaatgggagggttaaatacaataatgtgtgcagggagccaggccccatagtcagagctcagctattgttcttgcctcctcaggcggccctgcccaatttcaggaagtcctttttggctggaagcttctcaggatgaaagaatgttggagagagaaggccgttagaaagaaagcagagcccacctccgcaccccgaccccaccagagtgctggcagcagagtccaggtggggtctccctatgttgcccaggctgaactccaactcctgggctcaagcaatgctcccatctcagtctcccaaagtgctgagattacagtctcgctctgttgcccagtctggagtacaggtatgatcttggctcactgcaagctccgcctcccgggttcaagcaattcttctgcctcagtctcccaagcagctgggattataggaaggggccacaagccaaggaatgcaggctgcccatggaagctggtcaaggcaagaaaacggattctctcctagagcctcctgaaaggcatgaagccctgccaatgctctgattttaacctgatgacacccattttggacttcagactcccagaactgtaggaaagataataaatatgtgttgtttg

SEQ ID NO: 1096 - DNA, 2904 bp, Homo sapiens
ctgcctggagagacatctggccaagttctggtgagcaggaaaaatgtctactcgttaccaccaagctgctagtgatagttacctggaacttctaaaagaggctaccaagcgagatctaaatctttcggatgaagacggcatgactcctactctcttggcagcctaccatgggaacttggaagccctagagataatctgcagtagaggaggggaccctgataggtgtgacatctggggaaacactcctctacattttgcagcctccaatggccatgcccactgcgtctcattcctggtcaactttggtgccaacatctttgccctggataatgacttacagactccactggatgctgctgccagcagggagcagaatgaatgtgttgctctcctggacaaggctgccactgcacagaacatcatgaaccccaagaaggtcaccaggctgaaggagcaggctcagaagaatgccaggaggcagatcaaagagtgtgagaggctccaggagaagcaccaaaataagatggcccacacctacagcaaggaggaatccgggactctctcttcttccaagggtaccttctccagatcatccccttcaaatgcttctgctcctggcacattcgggtcactatctaagggcattaaagacactttcaagatcaagttcaagaagaacaaagatacagcagaacaggtggggaaggaaggcagaagtgggcagaggaacgtgatggaagtgttcagagaggaagaggaagactcgttctcaggggacttcaaagagaagctccagttgtcagcagaggaggacggcagtgtgcaccatgaatccattctcaatcgtccaggtctaggaagtattgtttttagaaggaacaggatatcgagtcctgaagacatctcagatagcaagagagagtttggttttaaactgcccagtgaattgcttcaaagacaaggagcatcagaggctgatgagggtgcagctgatgaagagggagaggaaaacggcctcaaagatgatctgccgtgggatgacgatgaagtggagtgggaggaagatgtggtcgatgccacgcccctggaagtgttcttgctgtctcagcacctggaagaattcctgcctatcttcaagagagagcagattgatctagaagctctgctgctctgctctgatgaggaccttcagagcatacaaatgcagctgggtcccaggaagaaagttctgaatgctatcaacaggaggaagcaggtgcttcaacagcctgggcagctggtcgacaccagcctgagatggagagttttggcctggagcattggggtgatgctgtggcccgctggcagcactccaggcggcaccccctctttacccaatgccagaccactgggaatggattctagggcatcggaaatgcctacctgagagagagacccaaactttactctgggaggtaggctatgcccatccaaataaatctccatgagaaacttgaggagacttcataacaagaatctggcatttctcttcagttatcttatatgtacatataattgtttttgtggttgttttgttttgttttgttttgttttttggagatgaaggtctcagtctcttacccaggctagggtgcagtggtgtgatcatagttcactgtattctcaacctcctaggctcaaatgatctcctcccacctcagcctcccaagtagctgagactacaggttcacaccccccacacctggcttattttgtatgttttagtagaggtggggtcttgccacattgcccaggctggtctcaaactcctggcctcaagcaatcctcccacctcagcctcctaaagcactgggattacaggtgtgaaccaccgtacccagcctatctttttgatacttttgaataaagaaagggtcatatgcatgacaggaaaatgaaagaaacttcctttacttttctatctctggatttaaaattataatctcatcacattatcctgctgcttgctttccgatctgtgtaacctgggaattccaattctttttctctccttagatctatgactttgcctagtggtagagactagagttctttcctggcctgcggcttgatgcccaacttaaatgcatctaaccctttaacaaatgtgtacatgtttacaagtaatggaaatgcgtctataatactcctgcctgagaatagagacagagtggtggtggggagagtgaagaaagagatagaatacaggtggtacctgttgtggactgaattgcgtcaaattcatatgttggagctctaacccctaatgtgactgtaattggaaataagacctttaaagaagtgattaaggttaaatgaagtcataagaatgcaaccctaatcctgtaggactggtgtcctttttttccctttttttttttttttgagatggagccttgctctgtcactcatgctggagtgcagtggcgtgatctcagctcactgcagcccccgcctcccaggttcgagcacttttcatgcctcagcctcctgagtagctgggattacaggcgtgcaccacaacgcctggctaagtttttgtatttttagtagaggcggggtttcaccatgttggccaggctggtctcaaactcctgacctcaggtgatccacctgcctcggcctcccagagtgctgggattacaggcatgagccactgcacctggcctaggactggtgtcctaagaagaggaagagacacttaggtggaaggcacacagagaggccacgtgaggacacagtgagaaggtggccgtctgcaagccgaggagggggcctcaggagaaaccaaccctgcaatcaccttgatcttgggctttcagcccccaaaggtgtgagaaaataaacttcggttgataaactgct

SEQ ID NO: 1097 - DNA, 2103 bp, Homo sapiens
agtttaacatggtggccaccttgctgtgatggaggagtgggcctagaggaaagatgcttccttctgcctgaatgactagggtggattcctaggaattgacccctgggctgaggcttgaaggagtcaccaaggagagggtaaagggtgtcccagacaactagaacagcagaagcaaaggcacagaatgtgacacagctgatgggggtgggggagacctgcaacagtcctgcatcactggaatgcagagtgaaaggaggggagtcgacaggagtgaggacgaagcttgctgggggccaggtggtgcaggctctgcaccctgggaccaaacagtctctttcctcttttcccacacctcaaatctctgccttccatttcacacccagcacaagtaccccaaggaggagccccatccccaagggcccaaagagactggccactttgctcttagagcccacagccacagtagtcagcttgtctacagcagttcctcgtgtatgaccatacaaatacatcacctgaccaccttgttagatgcccctctgactcataggtctggaatgggccctgaaatcctgcactgggcttccaagagatgctgctgctggtctgcaggccagaccacactttcagttgcaaagcacctgagggtctgtataccagaaaaggcagttgcaggccaaatctacataaagtggacctgtgccaggaacaaactgtgcttctacttgggacattatctcacgagtggtggctacggagtcagagcccagagaacaggatggtcttaagcactgttctccctgagctgtgacaaacggtcctctgctgtggggaggtacctgtggagcccagaagggagcaggggtcgggctagagacaccgcaatgattcttttcctccagaaatgcttcatctaaagcacagatctacacctttagaattccagtatattacttaatttcagtattccttacaatatagtttggatgtttgtctcctcgaaatctcctgttgaaaactgatccccagtgttggaggtggggcctagagggaggtatttgggtcatgggagcagattcctcatgaagggcttggtgccatcctcgcagtaatgagtgcttgttctattcgttcctgcaagaactagttgttttaaaagaacctggcctcggctgggcacggtggctcacgcctgtggtcccagcactttgggaggccgaggcaggtggatcatgaggtcaggagatcaagaccatcctggctaacatggtgaaaccccgtctacgctaaaaatacaaacagttagccgggcgtggtggcgggtgcctgtagtcccagctacttgggaggctgaggcaggagaatggcatgaacccaggaggcggagcttgcagtgagccgagattgtgccactgcactccagcctgggcgacagagcgagaccggccccttctcctctcctactctctctttcgccatgtgacacgcctgctcctcttttgccttccatcatgagtgaaagcttcctgaggtcttgaccagaagcaatgctggtgccatgcttcctgtacagccctcagaactgtgagccaaataaacctctcttctttataaattacccagcctcaggtattcctttatagtaatgaaatctctctgtctcggatgaaatgcccagtcctcattgtcaacccctcattcttcatgctaggatttgtacttgtgtttctgaatcagatgttttctccatcgaatgctttaccctttgaaccaacccaggccttgctgattgtagtgtgatgggtcccccaccaggttacttaagggtgtatgttcactgtctgaaccctcaaggccaggcagttagtcaaggccatggtgcccagctgtggagcaggtgtccctgagaatccaaacatcctagaagatatctgaaaacctactaaggaaaacagtcccatggcacatacacagtaggtgaagagccagaaaattagcttaaaagcagcttagagatgtgaggcaaagcaggtctctagagctgtcctgctgctgcccaggagtgccccacatggaagacctaaataaactcatctactcacc

SEQ ID NO: 1098 - DNA, 1816 bp, Homo sapiens
aacccactccagtccccttctgcactgtggaagctttgttcttttgctctttgcaataaatcttgctactgctcactctttgcgtccacactgcctttatgagctgtaacactcaccgcgaaggtcccgcagcttcactcctgagccagccagcaagaccacgaacccaccagaaggaagaaactccgaacacatctgaacatcagaaggaacaaactctggacacactgcctttaagaactgtaatactcaccgtgagggcccgcggcttcattcttgaagtcagtgagaccaagaacccaccaattccagacacagtgggatcacagagagagccaacagtccaggccatgacaagctgggacccagctctgcttcacatgatcaaactgcatcacggaagctgcacacgatgacaccctgtctggaaagtttttgccagagggcaaaagactgcaagcagaatatccctttgccatttctcattcaggactggccgttgtctgaaagcaaacctcaaggacaggacttctggactccgcagccacttcaggctgctgctccatcgcatgaattccagcaggtggcgctgcaccccgcgcggacccggcttgcctctcggccccagggaggtcggttgatgagcagtcgggaagtgggtctgtgcgcaccccgctgcagctgtggcaaacgcaaacgatgacacacaggcttgacgagggcctttgtcagaagcaatggggatctggcgtcaccgcacaatggaaaacaaagtgcttctgcctggctggccagaatgcacgtttgctcactattgatgctggggcatttacaggcagaatgagttcatgtgaaatttcaggatctgccatgactcagattcactttctgtaaaccagagtcaacattacatttccctttactctgggccattccttgaatttttaggtcaccagttgtttttgtactaactgaagggatttgagtatttcacaagcaccttatttttattagcatttttagggcattaccaatttgggacggatctgtagtgtgagagattgttgtcactcttagctccaaacataggttgactttatatattatttacatgttcagaattatactgtgtagaaattcaaatgaaacttgcaaaatacttttctggcaggaagccctggagaggatcgttcatggaaacaaggatgacgactggggtaagaaatgcaggtgactcgtgagtggtcagggagtggaagagaagacggctggaaggttttagcattcagaaaaaaaatggagacaactagagttgatctgaagattatggcagaattcaatattgggggaaagaaacaagatgggggttagaaattagaaacagcagagctccacaggttggaaaggttggaaaggatttgagcaagagaacaagaaggagcctgctaatagcaccctgggtttacatcaagagaagcacctggagagaattaactcgggaggaggtgggggcatgggaaaccttttcatctccaagagtgggcaggaacagcagctggcctgaacttgaaggtacaccaggtagcttgcgtgggccaggagaaggtgattctcttctatgcctctctccaacgccctgcttctgatgctgctcctctacctgtattgaggggaagatacatccctaagaagttccctgaaccccattctttgttgtggctaactggtccccttggaatttttctactaattttcaattccccctctcacctggtgaaatcttgaatcttactgttcaataaaagttcttctaccg

SEQ ID NO: 1099 - DNA, 2454 bp, Homo sapiens
aagaaaaaaagtgggagaaatcagtgcagccaaattcagaactaaagagaagagaataaagactcataactttctcattgaagctgccttcttaccaagtccagaggatctctactctggacagaggaacgccctgaacatggcatcagagatccacatgccaggcccagtgtgcctcattgagaacactaaagggcatctggtggtgaattcagaagctctggaaatcctgtctgccattacacagcctgtagtagtggtggcaattgtgggcctctaccgcacaggcaaatcctacctaatgaacaagctggctgggaagaacaaaggcttccctctgggctgcacagtgaagtctgaaaccaaaggcatctggatgtggtgtgtgccccacccctccaagccaaaccacaccctgatccttctggacacggagggcctgggtgatatggaaaagagtgaccctaagagtgactcgtggatctttgccctggctgtgcttctaagcagcagctttgtctacaacagcatgggcaccatcaaccaccaggccctggagcagctgcactacgtgactgagctaacagagctaatcagggcaaaatcgtgccccagacctgatgaagttgaggactccagcgagtttgtgagtttctttccagactttatttggactgttcgagattttaccctggagctgaagttagatggacaccccatcacagaagatgagtacctggagaatgccttgaagctgatttcaggcaagaatccccaaatccaaaattctaacaagcccagggagtggatcaggcatttctttccaaaacagaagtgctttgtctttgaccggccaataaatgacaaaaaactcttactccatgttgaagaagtacgagaagaccaactggatagtaatttccagatgcaatcagaaaatttctgttcttatatcttcacccatgcaaagaccaagaccctgagagagggaatccttgtcactggaaaccggctggggatgctggtggagacctacctggatgccatcaacagtggagcgactccttgtctggagaatgcaatggcagttctggcccagtgtgagaactcagcagccgtgcagagggcagccaaccactacagccagcagatggcccagcaagtgagattccccacagacacactccaggagctgctggacgtgcatgcagtttgtgagagggaagccattgcagtcttcatggagtactccttcaaagataaaagccaggaatttcagaagaagcttgtggacaccatggagaaaaagaaggaagactttgtgctgcagaatgaagaggcatctgccaaatattgtcaggctgagcttaagcggctttcagagctcttgacagaaagtatttcaagaggaactttctttgttccgggggggcacaatatctacttagaagcaaaaaagaagattgaacaggactatacactagtgcccagaaaaggagttaaggcagacgaggtcctccagagcttcctgcagtcacaggtggttatagaggaatccatcctgcagtcagacaaagccctcactgctggagagaaggccatagcagctaagcaggctaagaaggaggcagctgaaaaggaacaggagctgctaagacaaaaacagaaggaacagcagcaaatgatggaggctcaagagagaagtttccaggaaaacatagctcaactcaagaagaagatggagagggaaagggaaaactatatgagagaactgagaaagatgttgagtcacaagatgaaggtcctagaagaactgcttactgaaggatttaaagagatatttgagtcgttaaatgaagagattaatcgactgaaagaacaaattgaagcagctgaaaatgaagagccctcagtgttttcacagattcttgatgtggctggcagtatatttattgcagcactacctggggctgctaagctagttgatttaggaatgaaaattcttagctcattatgtaataggctgagaaatcctggtaagaaaattataagctgaggtttcttttgttaaaatggtataacgctgttgctcattttaaaagtatatgtgttattgcagtttcatttaagaagagtttaaaattaaaaagcaaatttcaaagaatattatggcctgaagttcataaaaacaaacttaattttgactaaagtaataattaatagaaatggggaacaagttagaagataaaattattcctagaaaagatttaagtaaagcaaaaggacaaatggtaatataaagaaattattttcaattaatgttatagtcacagagataatttaagttataattagctcttgcaaatcagtgagaagagagtaacgccacatattttaaacaggcaaaaatatgataataaaaatgtttaattttactgacaataaaagttgtgc

SEQ ID NO: 1100 - DNA, 2140 bp, Homo sapiens
agaacggtgcctagagatgggggagggatgatcccgtttccccttcccccaccggaacccccctgtctccatcccagctggagaagagcgtccggcgcctccgggagaagtttcatgggaaggtatcctccaagaaggcgggggctctgatgaggaaattcggcagcgaccacacgggagtggggcgctccatcgtgtacggggtaaagcaaaaagatggccaagaactaagtaacgatctggatgcccagacaaagaaactgaggccgaagtcacttgccagcaagcaggggcagctgcgatttgaaccctggccacctggagtcagagcctgggctctaacatgcctgtcagtgggaacccagggggcagggagtggcttgcccaagtccccacagctggaagtgatacagctgggatttgaacccacatctctctcccacttagccgagcacaacgtggcctcaaaggggcgatatgtcacaacatcaacaagcatgtggcatttgcaggcaggaagatccaccagaagatatgaagcaggaccgggacattcaggcagtggcgacctccctcctgccactgacagaagccaacctacgcatgtttcaacgtgcccaggacgaccttatccctgctgtggaccggcagtttgcctgctcctcctgcgaccacgtctggtggcgccgcgtgccccagcggaaggaggtatcccggtgccggaaatgccggaagcgctacgagccagtgccagctgacaagatgtggggcctggctgagttccactgcccgaagtgtcggcacaacttccggggctgggcacagatggggtccccgtccccctgctacgggtgcggcttccccgtgtatccaacacggatcctccccccgcgctgggaccgggacccggatcgccgcagcacccacactcactcctgctcagctgccgactgctacaaccggcgagagccccacgtgcctgggacatcctgtgctcaccccaagagccggaagcagaaccacctgcccaaagtgctccaccccagcaaccctcacattagcagtggctccactgtggccacctgcttgagccagggtggcctcctggaagacctggacaacctcatcctggaggacctgaaggaggaggaggaggaagaggaggaggtggaggacgaggagggcgggcccagggagtgacccctgccaggtgcagatacaaaccagacacggtctgtggctactttgtgttattataagatatgagctcaaaccgagatatgaatgaccttggggagccatctgaggccaagatattgacgggggggattcctgggtcccattttcagtgcccagggtcacagatccacagtgggaagttctgtgggacacattggcactgagccacaaagaaggtgtggccagaacaacttgggctcctgctgaccaatgtcctctagggcctaggggacagaggaacacagagtcacagcttcaggggccgaatgagcatggcggccttcctgagagaatatgccccaccacgaaactcagcccagtagacaccatcctggtagcggcttcggtagtggccgccgtggtgccacacaccgttgaggttggagtgggcacaggcatggtaccaccagcctccccgctggtacagggcacagttacctgaggggagagagagagcccatgtcctctcaccagaataaaagcctctacctgcacctcacagtgcaaggcttttgccaggcatcccctggcccctcccattcttattgaatacaagccctgatcttccatctcctcagcaaaaaaataggagccctggccccccaactttcttcagagtaatagccttaattccttccctatctccttaccaaagtacaagtcacatctttcccaccttttctgcaaactaggagtctaccgttcattcctttatcaaagaaaagtatctacttcctttctagaataagagtactagctctcaccctctgccctttacttgaacaggagtcttgattctttttttgcctcatcagagaaggaatctggactccccatccccccaccaggataaaagtcctgacctttgttctcttgacggaataaaagcttgcttatcctt

SEQ ID NO: 1101 - DNA, 2558 bp, Homo sapiens
attataattagcacataatgagcagtgaggacgaccagaggtcactttggtcaccatcttggttttggtgggtttgggccggcttctttaccacgtcctgttttgtcagcagggtctttgtaacctgtatcttgtgcccacctcctatcttatcctgtgacttagaatgccctaacctcctgggaatgcagcccagcggggtctcagccttattttacccaacccctattcaagatgggggtcactctggttcagacggacactcagatatcccagtgtccctgctccacagcctttcttcagcaaccttggccagacacctagttttccaaacgctaacccagaagcttggggctggagtgggagaggcttaagctccaggggtggggtcaagacaggagcagggaggggaagacatggaccaagtccttcccctatggagggatgccccctcccccttcctggggaagctgtgccacaggaggctggggagattccagaaggtgtcacctgccaaggagggatgagcttgctgagacctgccaagactcaaaggacattttaaaacagcagagtttgtgaaaggcagcagaatcccgctccccatgcttgccttcgggaccctcactggagcagaaccattgcttagagcgtgagaaggagaagcgagtgtccgtcaacatgctggctctgggtgagacctcggttagtatttggtttctagagcacagctgcgtcctcacagcctagagccatggttttatcagaagagagtaaacctacagcagaagcaagtcttcctgctcaggacttgggatctgcatgcagaggcctcatggcatggaggtcccaagcgttgacaccagtgtccgggggccgaatccagttcttcccttatagctgtgagatcttggccaggatcaccttccagagcgtgtcctgtgggccaagccctaacaggtattaactcagtcagtcatcacaccagctggaggaggggacgtcctgttataatcagagagtacctcagttccttcatctgtaagatggggataataataaaactcatggggtgatggagaggatagagcaagttactctatgtggagtgtcatcacagctcctgtctcagcgagagctctatattaagtattagctatttttattttttcaggggaaaaaatggtgtgaattgactaatatctgtgattgtttccagcagcctcccccagagtgtacgtgctggggtgagagttgaaattcaacctgactcctgtacattagagcttttctgagtgtagactcagcactgctcacataagagccagccaattccagccccacttacagaaccagcgtctcagtgggtgggggcataggaattttaagacctccccccaccatggactctgtgcctccaatacccttatagaaacattgacttcattgaacccgtcagtgggcaaatgagaaactgagcatgcaggatcctcaatgtggatgtgggccaggtggcgcaaggctcttggggcagaacccccagtgtccctgaggcatccttgatctccctagcctgcctcatcatttcaggagccttccagatgacttccatctcgtggttgtcctcctcaccttcacccaaacctttaattcacggagctgcatccccttctttggtttcagatgttcctggttcgccgggacagcagctcgaagcagctggtgctctgtgtccactttccttctctgaacgaaagctcggccgaggtgctcgaatacaccattaaggaagaaaagtcgagtaagtacccatcttctctgttttcactttgaccacgcggcagcagcagcagcagagaggctgcaccttctaaccacagactcccctgtatgcactgatggtgtttaaaattagaaggaggaaaagctttcagtcactgaagttacttagccagacttgttttgaactcagttcatcatccaaagtcagtgtgaatttccactcaccctcgtcgcagctgggtggctttgcattctcatggccacattgaagtttcttcttgttagctcaatgcagggacgctggagaaagggaagaaaaggagaagacatgtctgcacccttgagtcctagtgtcagctcagcacacactcaatccatgattgcagacaagtcacttaatctttctgagcctcagttttctcttctgtcaagtggacataatagtcacagagcttttgtgagggtcaaagggacaaacactttgaaagacaaaaatctgggccaggcttgatggctcacgcctataattccaacacttcagaaggcagagggcagaggatttcttgagcccaggatctggagactagcctgggcaacatggaaagaccccctctctacaaaaaataaataagccaggtgtggtggcatgcacctgtggtcccagctacttgggaggctgaggtggaagattggcttgagccagggagagtgaggctgcagtgagctatgattgtgctactgcattccatcctgggtgacagagggagatctggcct

SEQ ID NO: 1102 - DNA, 2007 bp, Homo sapiens
actgctagctgagcaaggttcgaaggaaggacctcagaaatgttctgccagcgcaaagacactggccaaaagaagaccctagacaagaaagatggaagacgaatgtcttttcagaaacctaaagggactattgagtatactgttgaatcaagggattctttgaatagcatagccctgaagtttgatacaacacctaacgaacttgttcaattaaataagttattctcccgagcagttgttactggacaggttctgtatgttcctgatcctgaatatgtctccagtgttgagagccctccatctctaagccccgtaagtcctctgtcaccaacatcatctgaggctgaatttgataagaccactaatcctgatgtccatccaacagaagcaactccctcatctactttcactggtattcgacctgcacgagttgtatcttcaacttctgaggaggaggaagcatttactgagaaatttcttaaaattaattgcaaatatattaccagtggcaagggcacagtcagtggtgtgctgctagttacaccaaataatataatgtttgatccacataaaaatgaccctttggttcaagagaatggctgtgaggaatatggcatcatgtgtccaatggaagaggtgatgtcagctgcaatgtacaaagaaattttggatagcaaaataaaggaatctttacccatagatatagatcagctatcaggaagggacttctgccattcaaagaaaatgacaggaagtaacactgaggaaatagactcaagaatccgagatgcaggtaatgatagtgccagcactgctcctaggagcactgaggagtctctttctgaagatgtgttcacagaatcagaactttcccctatacgagaggagcttgtatcttcagatgaactgcgacaagataaatcttctggtgcgtcatcagaatctgtgcaaactgtcaatcaggctgaagtagaaagtctgacagtcaaatcagaatctactggtactcctggtcacttaagatctgatactgaacattctacaaatgaagttgggactttatgtcataaaactgatttaaataatcttgaaatggccattaaggaagatcagattgcagataactttcaaggaatatcaggtcctaaagaagacagcacaagtataaaaggtaattcagaccaggattcttttcttcatgagaattcgttacaccaagaagagagtcaaaaagaaaatatgccttgtggggaaacagcagaatttaaacaaaagcaaagtgttaacaaaggaaaacaaggaaaggagcaaaatcaggactcacagacagaggcagaagagctacgcaaactttggaaaacccatactatgcaacaaactaaacagcaaagggaaaatattcaacaagtgtcacaaaaagaagctaagcataaaattacatctgctgatggacacatagaaagtaagtgttatagagtaaatgaagttagttcatccaattgtatggtgtctccgtctttcctcactgactcaaaagccgctgtaccttagggcaacctgaaggataagtgagtgacccttgaccggtgattctctggggacaagtatatacagtctccagtgtctactgtcttttcttatcccacaggtggattgtacacataatgagcatcattgctacccaccatgtttaaacattcttggctcactacatcgtatcattaaacaatttatttcttgagaaattgcacaaaagctgtataatacctttgatcactccattttctcttaaaaagtttttggtgtgttaccattaaaaatgtcttttttcatatataacattttaattgccaaagttgtaatcccatcttttataaaatgtacagttaaacctaaaagtgtacttacagaattcttccacgtatcgagaagtttcatcatcatcatctaattattttcttttaaaaacctgccctcaggacaaataaaaacactattttatctgtc

SEQ ID NO: 1103 - DNA, 2979 bp, Homo sapiens
tttcgactgtgagctgcggcagctgagcagaggcggcggcgcgggacctgcagtcgccagggattccctccaggtgacgatgctctggttctccggcgtcggggctctggctgagcgttactgccgccgctcgcctgggattacgtgctgcgtcttgctgctactcaattgctcgggggtccccatgtctctggcttcctccttcttgacaggttctgttgcaaaatgtgaaaatgaaggtgaagtcctccagattccatttatcacagacaacccttgcataatgtgtgtctgcttgaacaaggaagtgacatgtaagagagagaagtgccccgtgctgtcccgagactgtgccctggccatcaagcagaggggagcctgttgtgaacagtgcaaaggttgcacctatgaaggaaatacctataacagctccttcaaatggcagagcccggctgagccttgtgttctacgccagtgccaggagggtgttgtcacagagtctggggtgcgctgtgttgttcattgtaaaaaccctttggagcatctgggaatgtgctgccccacatgtccaggctgtgtgtttgagggtgtgcagtatcaagaaggggaggaatttcagccagaaggaagcaaatgtaccaagtgttcctgcactggaggcaggacacaatgtgtgagagaagtctgtcccattctctcctgtccccagcaccttagtcacatacccccaggacagtgctgccccaaatgtttgggtcagaggaaagtgtttgacctcccttttgggagctgcctctttcgaagtgatgtttatgacaatggatcctcatttctgtacgataactgcacagcttgtacctgcagggactctactgtggtttgcaagaggaagtgctcccaccctggtggctgtgaccaaggccaggagggctgttgtgaagagtgcctcctacgagtgcccccagaagacatcaaagtatgcaaatttggcaacaagattttccaggatggagagatgtggtcctctatcaattgtaccatctgtgcttgtgtgaaaggcaggacggagtgtcgcaataagcagtgcattcccatcagtagctgcccacagggcaaaattctcaacagaaaaggatgctgtcctatttgcactgaaaagcccggcgtttgcacggtgtttggagatccccactacaacacttttgacggtcggacatttaactttcaggggacgtgtcagtacgttttgacaaaagactgctcctcccctgcctcgcccttccaggtgctggtgaagaacgacgcccgccggacacgctccttctcgtggaccaagtcggtggagctggtgctgggcgagagcagggtcagcctgcagcagcacctcaccgtgcgctggaacggctcgcgcatcgcgctcccctgccgcgcgccacacttccacatcgacctggatggctacctcttgaaagtgaccaccaaagcaggtttggaaatatcttgggatggagacagttttgtagaagtcatggctgcgccgcatctcaagggcaagctctgtggtctttgtggcaactacaatggacataaacgtgatgacttaattggtggagatggaaacttcaagtttgatgtggatgactttgctgaatcttggagggtggagtccaatgagttctgcaacagacctcagagaaagccagtgcctgaactgtgtcaagggacagtcaaggtaaagctccgggcccatcgagaatgccaaaagctcaaatcctgggagtttcagacctgccactcgactgtggactacgccactttctaccggtcctgtgtgacagacatgtgtgaatgtccagtccataaaaactgttattgcgagtcatttttggcatatacccgggcctgccagagagagggcatcaaagtccactgggagcctcagcagaattgtgcagccacccagtgtaagcatggtgctgtgtacgatacctgtggtccgggatgtatcaagacctgtgacaactggaatgaaattggtccatgcaacaagccgtgcgttgctgggtgccactgtccagcaaacttggtccttcacaagggaaggtgcatcaagccagtcctttgtccccagcggtgacctttgtttcgatccttaagactctgaaatctggtgactttgacactgaagcggaagagccaatgaaggactgcagtatttgtgtgcccgattctgtaaacacacacacacagagtatatatgtgtatatatatatagatatattcaaaaacattgcatcatttatatgaactatagggggattattatatgtatattttttgctataagacatgtattgtttctaggatcctaacctgtaagccattgaacatgttgtataaatacaccaggtgtttttaatttaataaggtggcatgcagatacattggatagtgttaacatcacatacatttgtcatttttaaggaagttttctaagagccctcaattgcctgcctgtattaattttagttttgagtcaggatttgtaatggagtgggaaatgtgtttctctggagaagggcacatttatctaggggcatttcaggtttccaaagaaaggaatgtatgcctgagctcaccatagtctaatagaaaacaaccgaaaccaaataattcaagcactgcttattacaattttactgggtctctattttaccctcctacaagcctcagagtacttcgagtctcccttcaccatttccgacggcatctacggctcaacattttttgtagccacaggcttccacggacttcacgtcattattggctcaactttcctcactatctgcttcatccgccaactaatatttcactttacatccaaacatcactttggcttcgaagccgccgcctgatactggcattttgtagatgtggtttgactatttctgtatgtctccatctattgatgagggtctt

SEQ ID NO: 1104 - DNA, 2589 bp, Homo sapiens
aaaaaaaaagcctgccacgaaagtccctactgcgttgctgtgaacgtagctttgagaagctggcgcccagtgatggggcaaacagccatgcccttccagcagccgtgaaagccccaacagcaaactgcctgggagcggggcaggtcaccaacttcgttgctcgaactccctgggtgcccgccgcggtggttacaaagggggtcaagagtgccggacccagccgcgcggagcccaccattgcggcccgagggggacccgacggggcccgacggtgtggcgtggcgcaaggagcgcgcctgccttctctcgccgccgggaacgggctgcaccaatggccagattccagcaagattatggaagagcatagctacatacaaaaggagctagatttacaaaatggtagcttagaggaagactctgtggtgcattctgttgagaacgattcccaaaacatgatggagagcctcagcccaaagaaatactcttccagtctgagatttaaagccaatggagactattctggctcctatttaaccctctcacaacctgtgcctgcaaagagaagcccttctcctttgggaaccagtgtcagaagcagcccctccttagccaaaatccagggaagcaagcagttctcttatgatggaactgacaaaaatattcctatgaaacctccaactcctttactcaacactacatcctccctcagtggatatccacttggaagagcagactttgatcattatactggccgggacagtgaaagggccttgaggctctcagagaagcctccctattccaaatatagctcaaggcataaatcgcatgacaatgtctactctcttggagggctggaaggtcggaaggcatctggctcgctcctggccatgtggaatggaagttccctgagtgatgctggcccgcctcctatcagcagatcgggagccgcaagcatgccttcaagcccaaagcaagccaggaaaatgagcattcaggacagcctggcgcttcaacccaagttaactagacacaaggagcttgcatctgaaaacatcaatttgagaactaggaagtactccagcagcagcctgagtcacatgggagcctacagccgatcacttcccaggttgtacagagccacagagaaccagctgacacctctcagcttgcctccaagaaactctctgggcaattccaaacgaacaaaacttggggaaaaggatctacctcatagcgtaatagacaatgacaattaccttaatttttcttctttgagctcaggggctttaccctataaaacctctgcttctgaaggcaatccttatgtaagttctaccctcagtgtccctgccagtccacgagtggctcggaagatgcttctggcctccacctcctcctgtgcctctgatgactttgatcaggcttcatatgtggggacaaacccgagtcattcacttcttgctggagagtcagacagagtttttgcgaccaggaggaacttctcttgtggatctgtggaatttgatgaggcagatttggaaagcctcagacaggcctcaggaaccccccagcctgcccttcgggaacggaaaagcagtattagctccatttcaggacgtgatgacctgatggattatcaccggcggcagagggaggaaagactcagggagcaggaaatggagcgattggagagacagcgtctggagaccatcctcagtctctgtgctgaatacacaaagcctgacagtcgcttatctactgggaccaccgtggaagatgtgcagaaaatcaacaaggagcttgagaagctgcagctctctgatgaggagtctgtgtttgaggaagccctcatgagccctgacacaagatacaggtgccaccggaaagactccctccctgatgcagacttggcaagctgtgggagtctcagtcagagcagtgccagcttctttacccccaggagcaccaggaatgatgaactactcagtgacctcacccggactcctccaccaccatcctccacctttccgaaagcttccagcgagtcctcttatctaagtatcctaccaaagaccccagagggtataagtgaagaacagagatctcaggagttggctgcaatggaagaaacccggatagtcattctgaacaacctcgaggaacttaagcaaaaaatcaaagacataaatgatcagatggatgagtctttcagagagttggatatggaatgtgctcttttggatggagaacagaaatctgaaacaactgaacttatgaaggagaaggagattttggatcatctaaaccggaaaatagctgaactggaaaagaacattgttggtgaaaagaccaaggatgctgacctgttggatgttgaaagcaaacactttgaagacctggagttccagcagcttgaacatgagagccgtctagatgaagaaaaggagaacttgactcaacagctcctgcgtgaagttgctgaatatcaacggaacatcgtttctagaaaggaaaaaatttctgcattgaaaaagcaagccaatcacattgttcagcaggctcagagagagcaagatcattttgtgaaag

SEQ ID NO: 1105 - DNA, 2705 bp, Homo sapiens
accccttcgagcgcttcgacgcagagtatcgccagctgttcctgttcgagcagctgccgcagggcgagggcggccacatgcccgtggttttggtgtggggcgtcctgcctgtggacactggcgaccctctggaccctcgtagcaacagcagcctggtgagggaccctgccttctcggccagcggccctgaggcccagcgctggctgctggcactctgtcaccgggcccggaatcagagcttcttcgacaccctgcaggaaggctggcccacgctgtgtttcgtggagaccctccagcgctggatggagagccccagctgcgcccgcctggggcccgacctctgctgcggccactcggacttcccctgggccccccagtttttcctgcactgcctgaaaatgatggctctggagcaaggccccgatggcacccaggacctgggactccgctttgatgcccatggcagcctggccgccctggtcctacaattccagaccaacttccggaacagtccggactacaaccagacccagctcttctacaatgaggtcagccactggctggcagcggagctgggcatggcacctccaggcctccgccgtggttggttcactagccgtctagagctgtatagcctgcagcacagcctgagcactgagcctgctgtggtgctgggcctggctttggcgctggcctttgccacactgctcctgggcacctggaatgttcccctcagcctattctccgtggcagctgtggcaggcaccgtgctgctcactgtaggactcctggttctcctcgagtggcagctcaacactgccgaggccctgtttctctctgcctcagtgggcctctcagtagacttcactgtcaactactgcatctcctatcacctgtgcccacaccctgaccgcctgagccgtgtggccttctctctgcgccagaccagctgcgccacagccgtgggggctgcagccctgtttgcggcaggcgtgctcatgctgcctgccacagtgctgctctatcgcaagctgggcatcatcctcatgatggtcaaatgcgtcagttgtggctttgccagcttcttcttccaatctctctgctgtttcttcgggccagagaagaactgtgggcagatcctctggccctgtgcccacctgccatgggatgctggtactggggaccctggtggggagaaggcaggccgcccacgaccagggtcagtgggagggatgcccgggtcctgctcagagcaatatgagctacagcccctggcacggcgtcggagccccagctttgacactagcacagccaccagcaagctgtcccaccggccctcagtactctctgaggatctgcagctccatgatggtccgtgctgttcccggcccccaccagcccctgcctccccaagggagctgctgctggaccaccaggcagtcttcagccagtgccctgccctgcagacctcctccccctataagcaggctggccccagccccaaaacccgggccaggcaggactcccaaggggaggaggctgagcccctgccagcctcaccagaagccccagcccactctcctaaggccaaggctgcagatcctcctgatggcttctgttcctcagccagcaccctggaggggctcagcgtctctgatgagacctgcctaagcacctctgagcccagtgcccgtgtaccagattccgtgggtgtgtccccagatgacctggatgacactgggcagccagtccttgagcgaggccagctcaatgggaagcgggacaccctgtggctggcgctgagggagacagtgtatgacccatcattgcccgcttcccatcacagcagcttgtcctggaagggccgaggggggccaggggatggcagccctgtggtgctgcccaatagccagccagacctgccagatgtttggctgcgcaggcccagcactcacacgtcaggctatagcagctgagggggacccggggaggctggacagggcgcggaaccctgtcatggatgacaaggcaagggcagcaataggctggagcccgaaggtatttctccagatccacagggagaggtctcaccctccagctgtggatgttaaaccctgccagatgtcccagccttgatctgtctgctcctacccctcacatctggaggattccagcaggaggggttttggaggggacctgcttgcgacctgctgagggcttgtctgctcccacagcaccatctaagacccctcctctagaagtggggaaggccagatgtgtagcttcgggtatcggaggaggctgacctggcccccatcccaagttacaagaacttcagtgagactaagggacccccatcctagggatcttgtcagggttccttactgaccagaggagcccgcagcaatctccacagcctcctgggccccacccctttcatgggctcttcatcaggacacttccctctcttttgggagcttctctgggcagaattgggctgggacctctctccccaactgccctgctctcctcatactcaccggtttgaccagaaattctccaaatccagccatagatggctgctgggtgtgcagcaggagaaggaggatggtcagccttggagcatctctcaattacgggacagtccctctttggaagcaggctcctgtgctttcctgtgttaataaacagtaataatcctttcc

SEQ ID NO: 1106 - DNA, 2442 bp, Homo sapiens
gttgccatgggaacctcgccccttctagagtcctggccgcttgactcagctaagcgcgaaggtgttgtttcttcctgaggtgcgctggggctgggacccggtctgcagaaggtccaggggatggcgtcgggggattgaggagaggagaccaagccggccttgcctccgggaccagcgcttccaaattctctggggcgtcccggcgcgcacacgctcctgaggcctcggcgttctgaggaaaggggctggcgtggcgacccgggtcctcgaggccgagatctggctgtggcccgcgaagccccgcttgcccgcgccagcgtcttgtcaccccgagccgagggcctgcgcgcggccgacagatatgggatgctggaggacatctgggggccacaaatgctccttctcctggagacgcaactcaagggtcctcaaggtcatagaaccccataaccccattaggtgtcaggggcagaaacaggactgtgtgaagattcacagcctccacctcccttgccttcacggagcttcggcatctacccttattccaggcggctgctcaggggcaccgttctacccctttctgcctggagaaactgccgtttttccttaaaggatcctcgaagccggaaggagcagccacctcccactcccggctgctgcaagcaagctgctttgacttctttctagagttggggattgctgctggagtccgagtctcaggcccagagtgggtgcgatggtcttgcttgcaccctgtatcccccggcagacgcccgggaactctactaagtgggtgaccccagagagctcgcccccacactccgactccgagtccagcactcggtccactgcacagggacctcgcgccccacagctgcgtcctctctgaccttcgcaatccggtgcgcggcccgcggaacgccccgatctccaggggcacggaaggccgaggcgtgccgggggagccaggagcagctggctggcgggcgccgcgggcctccccggtcacgtgacaccccggacaacgtgcgccgtcacgtgacggcagagcctgtgagcgtttttctcacgtgacggaggcgcctgcacgtggaccaatggggaggcgggggcggggccggcaggggcggtgcgcgggaagggaccccggacccggaggtcgcggagagctgggcagtgttggccgctggcggagcgctggggcagcatgaagtgcctggtcacgggcggcaacgtgaagggtgagtgcaggtcggcctggcagcggcggtgcagcagccgcggagccgccagcctaacccccttccgctcttctccccgcagtgctcggcaaggccgtccactccctgtcccgcatcggggacgagctctacctggaacccttggaggacggggtgaggggctagggtgtggggggcgggtgggactccagccgggagcgggtaacccggactagagtctcgcccccactaggcgggatgaccgctggcagatttgtcggcaaagtttcagtttcttagtctggcggctgtcatcttcccaggccggtgtgtgaattgaggaaagctgtcctgcgagctcccagggggtgacgtgcacttagagaaactcggggaaggcctgggtgtgcgacccctcctctgcggcagcagcgccggggccgactctgaaggcttccatggggaaaggagggtttttcagcaggtggtggcggagcgggaggacgatagggcaagtgtgtgagcagaagcagccagagggctgggtctgtggctgccccctgaccacgtccctctccctgctcttcgtggcccagctctccctccggacggtgaactcctcccgctctgcctatgcctgctttctctttgccccgctcttcttccagcaataccaggcagccacccctggtcaggacctgctgcgctgtaagatcctgatgaaggtgaggcccttccctcagcagtggcactactccaccccaggaatctccaccagctgtgcctctgccctggggtactcagtagatgctaagtggggagagagacacgtgcaagcccaatccatgcaaaacacagggagggccatggtaaaagcatcacagcggggacctgagagggtggtgacgctcaagttcgtcaagaaaggtaagcacgtcttttggccgggcgcggtggctcacgcctgtaatcccagcactttgggaggccgaggcaggcggatcacgaggtcaggagttcgagaccagcctggccaacatggcgaaaccccgtctctactaaaaatacaaaaattagctgggcgtggtggcacgcgcctgtaatcccagctactcgggaggctgaggcaggagaattgcttgaatccgggaggtggaggttgcagtgagctgagatcgcaccactgcactccagcctgggtgacagagcgagactccatctc

SEQ ID NO: 1107 - DNA, 2873 bp, Homo sapiens
attgctttaagcaagaaatataccctctctgccatactttcctcatccataaaatgggaatggtaactaacattccagcagcgttggaggggctccgatgaggcaatgaggatggccctggtgggcatgcctgcacagctactatggagatgcttaaaagtctggttcatgtaaactctttggtcacgttgagcaaacctcttgtgctctttgggttttggtttttgtcccctcacatctacccccaagaagttggacattctgatcatctaaggaactgggctggccccacctcccttgtgggtctgctttgtatggccagtgtcatgcacaagctgatttggtttttgttgcagctcgtattcatcgatctggtggctgcaggtctaccgcctcagcttgggaacctgaagacatctaagtatagacggactttttttccctccaccatagcttcctgtctctgccaacaccagcaggcctctcgactgccacctactggctctacagacttctttgacctttctcttgtggctcatagagcttgctgcttggtcttatctgcagacactacaattaatttcaaaacactctcccttgttacaacaaacagagcccctcctgcccctccctgcatcctcatcatcctttaagctaacgtctccagcctgcaacctcctggctagtgctttcctcttcatggcatttaactactttgtcacttgaacagtgttgagcataactgtcttgcccccggggaaaatggcaaggttaaacataaggggatacagatactgcagggtaatctttcgggtggaaactctcgtttatataggcaggaggtaggccaggagctcccagacatagctgggggaaatgtttccacctggttaagaccctaatctcattaagaagactgactaaacttttaactcttatctgaacaccggagtaaagatcttcaactggagcttctgtaagcaaagaaaatagccgacttataacgtgggactgtgtggtcagccacttagcagatatctatgaatgaatctccactaccacagaccctcatcaatgaacactgacagactggagggctgttgtacaactcacacatactgtcctttcaaaacaacagacttcagactctgttaacaaaccaattagtgcgaggtttcacagtgctttctcagcaacagtgctggcccctggtctacagggaaaagtgccttatatcttatctccattcctttccagtgaggaagaggaggcttgcggacctgactgggcccatcattcccaagtgccggagtggtgtctagtgtgtggcggtggagtccatgcctttgaactggatgtgttctattgatgacctgtgctctgcaggggaaaccagaaggcaaaatgctggcagcatgaaacccttttgtggttcagttctttatgcactaaggttttaggttgactagtggttgtagttgaaaattttataaaataccgttaatgtgaagtttttctttagtcacagaagttgaatctggttattatttaaaaactagaagcccccaaaccagcagatcttactgaagatgatgttccagcagcagcgacttagccccaggagcccagtttcaatggccttgctgtgtggtgtttcaagtgcatttaaaatgtgtgacacagaaacggcacactcttccacatgcttttgaagtattataaaacactttattacaaatttgtcttagctattagcaaataaaactgattatcattctttattaaccctccttggaattttgaaaacctcgattaaagttgccaaattgattactggatccagaacacaattttcccctcagaacagatagacagactgaagccactgaactctgccaggagtcaacatgagattccttttgctggatatgcagaaatgataggaaaaaaaccaatggtgaaatttcaagtttcaaaaaccaacctttcattaccaatcccaggcaacaaacatgtccctgagtgttctttaagaacatttgggatttatgtacaatttaatactggagttagaactttttccttattgaatgccaaccttatgatggatgtgaaaatctacggccaaatacttttgaaaacacctttctatattgcacagtgggcaaatggcttatgtgaggtaagacactagagggataaatttccagatcaacatggctatggtatttagtaatggcccagcttagagacttcagctactgatctcatcacttattagacaaattgctgctgaccttacgcctgtatattaagcctccgcaggatgccggacaatggtgaagaaactccagatatcaaggaattgggaaatcctggccaaaccaccccaagatgattacactgaaatgtagtattagtactgctgccagatctctttttaacatcatgtgcgtctcttgggatccagcaaaagtgttaagccacaatgcccttgtgccttttaatataccacagtgccagttaaactaatatttttgtttgttgcttttgggagttattttcattagtgatttcagcaaatctcatgataaaggacaaggtcaagaactccagagcactgagcagagaggctggtgatgaaaaggtgaaggcctgcgcactgaactgtaaggcagtgggcagtacagggtaactggaggcggggccagggcctcagcgctatggaagagtgtccactgaggctgcacatggcccaggagtggcaccatgttgcagggacaaccatccccatttggcttctccttaaaacacaattgcagctgcattctgcatcgctgaaaactgcaatataatattaaatctgttggtcc

SEQ ID NO: 1108 - DNA, 2998 bp, Homo sapiens
agattcgattggaaggctgccggcgtgctactgagttcggccggtccgagtcactgtgcgtcgcctgggcgcgttcctggtcttctcccccagggtcttgctctgtcacccaggctggagtgccatggcatcatcatagctcactatggccttgatcctcctgccttagcctcccaagcagctggtattacagaccacggtgtgaacacatgaacagaagacgaaaatttcttctagcctcagtacttgctctccagaattcaagttttatatatccatcatgtcagaagtgcttctctaggataatcctggtctccaaaaggtctaattgtccaaaatgtggctctactggtgaatctggaaatgccaattacagatacaaactttccttaaaagttgcagaatcaaacaaattgtttgttattactgtatttggaagttgcttagatacattttttggtcttactgccactggtttgcacaggtacattcaggatcctaataaaattccagaaacactggacaatgatacaactcagaatctattaactaaagcagttgaaacttgctttgttggacaaagctttatttttggagtgacgaattttgaaaaccaacctggacaaggttcagatgccagtaacttcttacagcaatgctctgaccacaaaagaaaagccaaagcactagtggcttgccagattgttctaccagacccaggtattgcaggctttactgtcattgactacttccatcaacttttgcagacttttaatttcaggaaacttcagtgtgactctcaggcacctaacaatcacttacttgctttagatcactcaaatagtgatctcagcagcatatatacttctgacagcacttctgattttttcaagtcctgcagcaaggatactttttcaaaattctggcagccatcacttgaattcacttgcattgtttcacaactaacagataatgatgatttttcagcttcagaacaaagtaaggcctttggtactcttcagcagaacagaaagtccatctccattgcagaggccactggttccagtagctgccatgatcccattcaggattcatggagccttgtttcatatatggataaaaagagtacagcagaaaagttgggtaaagaacttggcttacaagctaaggagctgagtgcagttcacagcagtcatcatgaaattggagttaatgactctaatttattctctttggaaatgcgagagccccttgagtcaagtaatacaaaatccttccacagtgcagtggaaattaaaaataggtcccagcatgagctaccatgttttcagcatcatggtatagataccccaactagccttcagaagagatctgcatgttgtccaccttcgttactcagacttgaagagacagccagcagttcccaggatggtgaccctcaaatttgggatgatctgccattctctgaaagcctgaacaagtttctggcagttcttgaaagtgagattgctgtaacccaggcagatgtcagtagtaggaaacatcatgtagataatgacattgataaatttcatgcagaccacagcagtttatctgtgactccccagagaactactggagccctgcatacaccacctatagctttaagatcatcacaagtaatagtcaaagcaaactgtagcaaagatgacttccttttcaactgtaaaggaaatctaagtcctagtgttgaaaaggagtcacaaccagataacaaagtagaggctgtctctgtaaatcataatggaagagatatgtcagaatattttttaccgaatccttacctgtcagctctgtcttcatcttcaaaagatttagaaacaatagttactcttaagaagactatcagaatctcaccacacagggagagtgaccattctagtctaaataacaaatatttgaatggatgtggagaaatatcagtttcagaaatgaatgaaaagttgacaactctgtgttataggaagtataatgatgtctctgatctttgcaaattagaaaataaacaatattgtaggtggtccaagaaccaagatgacagttttacaatttgcagggaacttacatatcctttagaaactctttgcaatagtccaaatagaagtacaaatacattgaaagaaatgccttggggacatatcaataacaacgtaacacagagctattctattggttatgaaggtagctatgatgcctctgctgatctctttgatgatattgctaaagaaatggacattgcaactgagattaccaaaaaatcacaggatattttgttaaaatggggaacatctttggcagaaagtcacccttcagagtctgatttttcactgagatcactttctgaagacttcatccagccttcacaaaaattatccttgcaaagcctatctgactctaggcattcaagaacatgctctccaacacctcattttcaatcagattcagaatataattttgaaaatagtcaagactttgttccatgttcacagtcaactccaatttcagggttccaccaaacaagaattcatgggataaacagagctttcaaaaaacctgtattttattcagatcttgatggtaactatgaaaaaataaggattttccctgaaaatgacaaacagcaagccagcccaagctgtccaaaaaatataaaaacacctagccagaaaatcagaagccctattgtatctggtatttcacaaccagacgttttcaatcactacccttttgctgagtgccatgaaactgatagtgatgaatgggtccctcctaccacacaaaaaatatttccttcagatatgcttggattccaaggcataggtctagggaaatgccttgctgcctatcatttccctgatcaacaagagttaccaagaaagaaactgaaacatattagacaaggaaccaataaaggtttaattaagaagaaattaaagaatatgcttgcagcagttgttac

SEQ ID NO: 1109 - DNA, 3127 bp, Homo sapiens
ggggttcgcagccgcagccgggatcgggcacccaggggcgggcgggcacggtagggccatggcagagggtgaggatatgcagaccttcacttccatcatggacgcactggtccgcatcagtgtgagttaagaccagcatgaagaacatggagaaggaactgctgtgcccagtgtgtcaagagatgtacaagcagccactggtgctgccctgtacccacaacgtgtgccaggcctgtgcccgagaggtcttgggccagcagggctacataggacatggtggggaccccagctccgagcccacctctcctgcctccaccccttccacccgcagcccccgcctctcccgcagaactctccccaagccagaccgcctggaccggctgcttaagtcaggctttgggacataccctgggaggaagcgaggtgctttgcacccccaagtgatcatgttcccgtgcccagcctgccaaggtgatgtggagcttggggagcggggtctggcagggcttttccggaacctgaccctggagcgtgtggtggagcggtaccgccagagtgtgagtgtgggaggtgccatcctgtgccagttgtgcaagcccccaccactagaggccaccaagggctgcacagagtgccgcgccaccttctgcaatgagtgcttcaagctcttccacccctggggcacccagaaggcccagcatgagcccaccctgcctaccctctccttccgacccaagggccttatgtgcccagaccacaaggaagaggtgacccactactgcaagacatgccaacgcctggtatgtcaactctgccgggtgcggcgcacccacagcgggcacaagatcacaccagtgctcagtgcctaccaggccctcaaggacaagctgacaaagagcctgacatacatcctgggaaaccaggacacggtacagacccagatctgtgagctggaggaggccgtgaggcacaccgaggtgagtggtcagcaggccaaggaggaggtgtcgcagctggtgcgggggctgggggctgtgctggaggagaagcgggcatcactgcttcaggccattgaagaatgccagcaggagcggctggcccgtctcagcgcccagatccaggagcaccggagcctgctggatggctcaggtctggtgggctatgcccaggaagtacttaaggaaacagaccagccttgctttgtgcaagccgccaagcagctgcacaacaggattgcccgagccactgaagccctccagacattccggccagctgccagctcccccttccgccattgccagctcgacgcgggacgtgagatgaagctgctgacagagcttaacttcctgcgagtgcctgaggcccccgtcattgacacccagcgcacctttgcctatgatcagatcttcctgtgctggcggctgcccccccattcaccacctgcctggcactataccgttgagttccggcgcacggatgtgcctgctcagccaggccccacccgctggcagcggcgggaggaggtgaggggcaccagtgccctgcttgagaaccccgacacgggctctgtgtatgtgctgcgtgtccgcggctgcaacaaggccggctacggcgaatacagtgaagatgtgcacctgcacacgcccccggcacctgtcctgcacttcttcctcgatagccgctggggcgcaagccgagagcggctggctatcagcaaggaccagcgagcagtacggagtgttccagggctgcccctgctgctggctgctgaccggctgctgaccggctgccacctgagtgtggatgtggtcctgggcgacgtggctgtgacccagggccgcagctactgggcctgcgccgtagacccagcctcctacttggtcaaggtgggcgtcgggctggagagcaagcttcaagaaagtttccagggtgcccccgatgtgatcagccccaggtacgacccggacagcgggcacgacagcggtgccgaggatgccacagtggaggcgtcgccacccttcgctttcctaaccattggcatgggcaagatcctgctggggtcgggggcaagctcaaacgcagggctgacaggaagggatggccccacagccggctgcacagtgcccctgccaccccgcctgggcatctgcctggactatgagcggggccgggtttccttcctggatgctgtttccttccgtgggctcttggagtgccccctggactgctcagggcctgtgtgccctgccttttgcttcatcgggggtggcgcagtacagctccaggagccagtgggcactaagcctgagaggaaagtcaccattgggggcttcgccaagctggactgagccttccaggcccctcatgcagacctggggtcctcctgggccctggcccccaaacctcttggcacccggttgttaccccctggcagcttctcccccaaactctcctaccatgtggccctgctccttctcccgtgtctgtcttcccacagttttctcttgacccaggggctctcttctgcccacctctctggatggcccccgttctctccattgcttgttagccaggcccccacccccactgagtctgccctatgacctgcctttggcatgttacccaagccatggagagagccccttctccatccctgtcctgtgccccccaggctgattgggagggagggcacctggaacactgggcatgatctccagctctgcccttgccctgccaagctccctgccctgttgatgctgaactacagccttgggacaggcaggctttggggctggacgctgtccaggcattcctggtgaggggaaggggaccctgtcatcctgctttatttatttgggtcccaacaccccgcagccgcatgccccttatgtccctcttctccctcttgcatgctttacctgtcccacacccatgccaatgtgccaagtctcccttggggacccagctgagtctgggtgttcccattgggttgggccaggcaaggcctctggtgcccgctgccgtccccctgcagtgggctctgctaggcctgtgctgagcaacagctgttattgtcatggtttataaacaataaactgtgatgccaggcacatctctgccttccctg

SEQ ID NO: 1110 - DNA, 2333 bp, Homo sapiens
agagctgcccgccttcgggccctgcgcggggaggctggtcccaaccttgcgtgggcttcgcgtgggcccggcctcgccgctgcggtcgcccgcctggcatggccaactgggtgttctgtaatcgctgcttccagccgccccacaggacgtcgtgcttcagcctcaccaactgcgggcacgtgtactgcgacgcctgcctcggcaaaggtaaaaagaatgaatgcttgatttgtaaagctccttgtcgtacagttttgctttcaaagcataccgacgcagatatccaggcattcttcatgagcatagacagtctgtgtaagaagtactccagggaaacctcccagattttagaatttcaagaaaaacacaggaagagattgttagccttctatagagaaaagatttctaggttggaagaatcccttaggaagtcagtgctgcagatagaacaactacaaagtatgagatcatcacaacaaacagctttcagcacaataaaaagttcagtttcaacaaaaccacacggatgcctgctgccacctcactcatcagcccccgacagactggagtcgatggaagttgatctctctccttctccgattagaaaatctgagatagcagccggccctgcgagaatctccatgattagtccacctcaagatggacgaatggccccctgtgcccggagagtgtgtcatttccagaggttcaccatgtttctgcatagacgtctgtcctcactggctgctcctcctagcgttcagttctggaaggcacggggaactcaccaactctaaaacacttccaatatatgctgaggtacaaagggccgtcttgtttccgttccagcaggctgagggcaccctggacacgttcagaacacccgctgtgtctgttgtgtttcctctttgccaatttgaaaggaaaaagtcattttgatttgcatttatgtgactattaatgattctgagtgttttcaatttattcctctgtgttttttctacaaattatctgctttattcctttgtcatttatgtggaagccctcagtgtgcaggatattaaccttttacccaatttgctttgtaattttatatttgacctttgaattttagagacaatatttttatgtactcatatatattgttattatcccttttattttataggttctcatgcttagggagttttttttttcacatacttaaatcatttttttctaactgggtggtttttaaaactttttcttagagcagttttaggttcacagaaaaattgaaaggaaggtacagatttcccatatacaccatgactccacacacgcacagctcccccatcatcctcatcctccaccagagcagtccatgtgttaaaactgatgatcctacttgaatacatcattatcacccaacgtccatggtttacattagggttcactctaggtgtcgaatgttctatgggtttgaacaaatatctagtgacaggtgtccccatcgtagcagcatatggaatagtgccacaccctaaaaatcctctgtgcgccacctgttcatccttcccccacctcccaccaacccttgacagccactgatctttttacggtccctttttcagactctcctggagttggaattgtacagtatgtggcttctcagattgactcctttcacttagcaatacacacttatggttcccccatctcttctcatggtttgctagctcattttttcagtcactgaataatattccattatctggatgtatcatagttcatccattcacctactgaagggcatcttggttgcttccaagttttggcaattatgaattaagctgctatagatgtccatgtgccagggttttgtgtagacatgttttcagctcctttgggtaaatactaaggagtgtgaatgctggatcagatggtgagagggtgtttagttttgaaagaaattgccaaactaccttccaaagtggcagcagcttttcgcattcccactagcaacgaatgagagttcctgttgctccacgtcctcacatttgatgatgtcagtgttctggattttggccagctgataggtatgtagtggtatcttgctgttttattttgcatttcattgataacatatgactaggagcatcttatgctgatttttcatctgcatatcttctttgctgaagtgtctgttaaggtatttggcccattttttaattggattgttttcttattgttgagttttaagagtcctgtgtatattttggatgacatttcttttttgtgtgtcttttttttggatgacatttccttatcagataaatatgtatcttgaaaat

SEQ ID NO: 1111 - DNA, 2539 bp, Homo sapiens
ttctttccttggtgtgtggttggaagattaatttgagataagtgttcagttctgggctgggcagtcgtgccgggcacgggaaattcaggttctttaagggaaaggcctgatgtgctaagacgaaatctataccgtgtgtagccgcttatgagaatatgaaactaaggagagccacaggtaagtatacgtctatgaatgcgaattaaaacgggtgacaatataaagagagattggtgtcacaaatggtggagtgacttttgtatttcagcagacctcagtgagaaatggtcaccaccactccctagatgtgtgaccttgagtgagttgcttaacctctctgatcctgttacctcatctgcaactggggatgagaatatatatcatagcatgccctgggagaagctgttcctgaccacctgggctatggtgattttgacttcctctgtgtcagaagtacccccgtctcatgcctgccatagttgtctttttgttttgttttgtgatttcagatggactcaccctgtcacccaggttggactgcactggcctcaacctcctgagttcaagtgatcgtcccacctcagcctccccagtagctgggaccatagctgtgcagcatcatgcctggctaattttttaagttttttgttgagatggtggtctcgccctgttgctcaggctggcctcaaactcctgggctgaagcagtcctcccacctcagcctcccaaagtgcttggattagaggcgtgagccaccattcctggctccttggacaatattttattcctcagattaagacacgtccttgggatggggctgcattggataattcaccgaaggcaccgctgaatggagtgggccctcagtaaatacctggaggaatgtgacctggccagtgaggttattttcttttgtaggtgaaaggtgtagcagtcactcggcctacacccacagcatcgaccttgtgaacccagcgacctgactgccttgggagaattgaagcgaatgagagtggggagtgtgagaggtgcgtttggtgcagcatttctggcatgggaacagaactggccaggaggaagtgacgtctgggttctgcccgcacacattcctcgccaccttcttggtgtctgagaacctccagcttcacctccttttctggacccgagggcctggcggagcttccagctgggaccagacctccatggatccactccagaaacggaatccagcatcgccttccaaatcttccccgatgacagctgcagagacttcccaggaaggtccagcgccctctcagccttcgtactcagaacagccgatgatgggcctcagtaacctgagccccggtcctggccccagccaggccgtgcctctcccagaggggctgctccgccagcggtacagagaggagaagaccctggaagagcggcggtgggagaggctggagttccttcagaggaagaaagcattcctgcggcatgtgaggaggagacaccgcgatcacatggccccctatgctgttgggagggaagccagaatctccccattaggtgacagaagtcagaatcgattccgatgtgaatgtcgatactgccagagccacaggccgaatctttctgggatccctggggagagtaacagggccccacatccctcctcctgggagacgctggtgcagggcctcagtggcttgactctcagcctaggcaccaaccagcccgggcctctgcctgaagcggcactccagccacaggagacagaggagaagcgccagcgagagaggcagcaggagagcaaaataatgtttcagaggctgctcaagcagtggttagaggaaaactgagacgtgcacccccatgggatggagacccgaagggactcagacggagccgccgtgttggcagcgcctgggtgtgggcccattttggggaccaaacagcaagctgtggtcggatgagtgccaggacctgtgtaccgggacacgtgggagtcctcccagcatgatgcttgactgacccgaggaaggtcctcatgtttcgtgcctgtcattctcggatggctgtgaggcattccttggcaagggatgctgcgtaccagcggtcctcaccgcatctcacatggctcctgtgatgcatgttgtcgctttcccacccgggatctccatctctcttcccttcctgctgtcagtaagagatcacatgtctgtgtagtgtgaatgccttgtcgctgtcctgtgcttttgcaccattgagttgactgcctctgagaagcagcactaggcctgttgaaatgcaatgtgctgccctgagatccagtttcaagaatgggcaggtaaacgcagtgtgggaaaggaatgtggaatgagaacttggtggttcaccgctgtactatttgtgtaaatgtttacgtatgtgataagctacatgtatgtaaatgttgcaatacccctaacagtcgagtagtagtctcccttacaggaatttttgacggggttcctcatcatcaataccaaataaatatatgtaggaatggaaaaag

SEQ ID NO: 1112 - DNA, 2170 bp, Homo sapiens
attagccaggcgtggtggcgtgcgcctataatcccagctactggggaggctgaggcaggagaatcgcttgaacccaggaggcagaggttggcagtgagctgagatcacatcactgcactccagcctgggcgaaagagcaagaccccgtctcaaaaaaaaaaaaaaaaagacctgtctggacaacatagtgagatcctgtctctatataaaatttccttcctttgagcaggttgaaaagtaaaagccatgtttgattatggggtgtgatgaggtcccagaggagcagagatgcccacggagaagctgggactcagagttgtgtccccaggtggcaggcaatctcctctcccccagcacaggcccccaagaccaaacagagccctcccaggcgccaagtgaagaccgaaactcttgggcgagaggagggggattgtggcaggggtttcgttctgtcaattctgttctattttgtgccacattcacgttttctgacattcttagaaactctgtcttctctagatttcttactggctgaataaattctgatggtctcattggatgacacgtctattaatagaaaagttggcatacttttctcctagcagcagtactcatgtgaatctgctgccatcgtcaggatgtggagagctctttgtaaagctttgactgacctggcatctgcactgttcttggcgaagtgctgttttctaatgactctgtgcttggtcactttcctcaccagtctcccaacgagcgtgcccgcttgtacttcctgctggcctggtttcatgcgatcatccaagaacgcttacgatacgcaccactggggtggtcaaagaagtatgaatttggagagtctgacctgcggtcagcttgcgatacggtggacacgtggctggatgacacggccaaggcaagtgtgggccatgccaggacagacagtggacgtgtatctgggaaggatgctgcagggcgtggtgctgagaggccagactctgcgtggaagagcgagctgacccctcgtgaccgccaaagcctagctggccatggggagtgaggaggaaagctgtgcccctcgaaaggaagccccgggcctgcccgcctctgaccacacacacgaaccctgcttttcctcccccagggcaggcagaacatctcaccggataagatcccgtggtctgcactaaagaccttaatggcccagtccatttatggcgggcgcgtggacaacgagtttgaccagcgtctgctcaacaccttcctggagcgcctgttcacaaccaggagtttcgacagtgagtttaagctggcatgcaaggtcgacggacataaagacattcaaatgccagatggcatcaggtatgctgctgcctgctggaatggagacagttgtgatgtcagggcgtctggtgtcactcagaggtgacccctgacatcatttccaaatgcactggttttctaggcgagaggagtttgtgcagtgggtggagttgctccccgacacccagacgccctcctggctgggcctgcccaacaacgccgagagagtcctccttaccacacagggtaggcaacaaggatcctccccacacgcagggtgggtggcgagggtcccctcacgcggggtgggtggcgagggtccccacacgcagggtgagtgtgcactgctgtcccagggccctccctggttatgctgggtgtggctctgtcagcctcggccttcctgccagtctccagctgctcctagctccactccgaggggaggcagaggaaagaactggctcttctctgcagcatcaactcagttctagagaaaaggcttgatatttatgtaaatgagcctagaaataacatttagatgttcatctcatattgaaaagcagttactggctgggcacactggctcacacctataatcccagcactttgggaggccaaggcgggcagatcactcgaggttaggatttccagaccagcctggtcaacatggcaaaacctcgtctctactaaaaatacaaaaattaggtgagcatggtggcaggcacctgtaatcccagctactcaggaggctgaggcaggagaattatttgaacccgggagatggaggttgcagtgagccgagatcacatcactctactctagcctgggcaacagagtgagactctgtctc

SEQ ID NO: 1113 - DNA, 2909 bp, Homo sapiens
catattagtgtctaagccctgcaatcaggcatgtcagccacgtgatggaatgggagggctgcagggcagcactgtccagtagaaacgaaatgcaagccacatatgtcattttaagttttctttttttgagatggagtttcactctatcacccaggctggagtgcagtggcacgatctcgcctcactgcaacctccgcctcccaggttcatgtgattctcctgcctcagcctcctgagtagctgggattacaggcatatgccaccatgcctggctaatttttgtatttttagtagagatggggtttcaccatgttgatcaggctggtctggaactactgacctcaggccacccgccttggcctcccaaagtgctgggattacaggcatgagccaccgcgcccagctaatttttgtatttttattttatttatttatttattttttgggagacggagtcttgctctgtcacccaggctggagtgcagttgtgcgatcttggctcactgcaacctcagcctcccaagtagctgggattacaggcatgcaccatcatgcccagctaatttttgtatttttagtagagatggggtttcactgtgttggccaggctggtcttgaactcctgacctcaggtgatccaccggcctcagcctcccaaagtgctgggattataggcgtgagccactgcacccgtcctaatttttgtatttttagtagagatggggtttcaccatgttggctaagctggtctggaactcatggcctcaagttatctgcccacctcagcctcccaaagtgctgagtaagccaagttttctaatagccacattagacaagtaaaaggaaacaggttaaattcattttaacatgttttacttaacccaatgtatccaaaatagcatttcaacatgtcatcggttttttagttttttttttttttgagatagtgcttcgctttgttgcccaggctggagtgcagtggcacaatctcggctcactgcaacctccaccttccaggttcaagtgattctcctgcctcagcctcccgagtagctgggattacaggcacccgccaccatgcccactaatttttgtatttttggttagagatggggtttcgccatgttggccaggctagtctcaaactcctgacctcaggtgatccacccacctcggcctcccaaagtgctaggattacaggcgtgaggcaccgtgcctggcgtcatcggtattatttaaatgaattatgttacgttcttttgtgctgtcttcaaaatctgttatatattttacacttacaccaaatctcaattaccatggtacatttttatctgaaatgcttgacctttattttgatttcataaaattcatagttggagaagtagattcacatatccaagttgttccaattatataatagttttccaaaaactgagatgggtgtccattttttttttaagtaaagatgcaggtctggttatgttgaccaagttgctgggttgttttgttttgttttgagacagagtctcactttgtcacccaggctggagtgcagtggcatgacctcagctcactgcaacctctgcctcccaggttcaactgattctcttgcatcatcctcctgagtagctgggactacaggtgtatgccaccatgcctggctaattttggtatttttctcagagacggggtttcaccatgttgggcatgctggtcttgaactgctgacctcaggtgatccgcccacctcggcctcccaaagtgctggtattacaggcatgggccaccacacctggcctcagctgttcaattaaaagtaaatacaacttaaaattctatgtttcattggcagtagtgcaacattaatactgagtagccacatgtgattagtggctatggtattggacagggaaggtacagaatacttccatcaacatagaaaattctatcagtctatctctaggggcagatagtccttccactgacttgggcaagtcactctacaaatggcatctacctcacatggttatggtgagaattcagcgtatgtatgtacatgcaggcacacaatatgcacacagacacataacatagtacaccctttcctgaaaagcctgacacatggagctcaaacatgagtgccacccacccctgggcagcaccaagatggctctagtctgggtgcctttgtctcacccccatgcctttgctcggagtgtgctcctcatttttctgccactttgaccctgtctctgatttggtcctgtctgacatcactgctatatgctttgctcctctcaatttcctctgccctcatgccagcaggagtcatgccagagatcatatctgagaaagcaagacaattttgtgtgtgtgtctgtgcccatagaggagtgctggttgtgttgatatagttgtagattggttgtgtttacacagttgtatatattgacacccttgagtgttatgacttcttttgggggtggtcgccttttaaatcataacttttaatgggattccattttagtctttgtgaagacataaggttgttggcaggcatctgtccctgggagcatccaagcagaaaagactaagactcccttgtagacagatcactggccgccactgaagtgtgtctgcatggcaccacagggctggaagacccttgaaggcaggaattcaaggaaatgtatgatgaattttggcattgccatcaaaagcagaacaggcatggaaaacttgggtgagtgggcgagacaacctcctcaccacagcagagttccatccatgcctggataatgatggagggatttgtgtccactgcagtggggaaccatgaaggacacatcaagggtgtggttggcctgtggtgctctttggaggaatgaataaaaatgaatagaaatcct

SEQ ID NO: 1114 - DNA, 3447 bp, Homo sapiens
gaatgccaaaaatgttagaaacagaatcaaagtgggacacccttacagagcctcagatgctacggtaaagaggctgaagtgtccgagttcagagcatgtaaggaacaagcaagaaattgagcttttgagataaaatagggtttttgtgatcagatagaatttgctgctcggttcttagtgttgtttgatcttcgatctaagaagtggctgacggtctgcaacctgctgttctttgcgtgttacagcaacatggccaacgccctggccagcgccacttgcgagcgctgcaagggcggctttgcgcccgctgagacgatcgtgaacagtaatggggagctgtaccatgagcagtgtttcgtgtgtgctcagtgcttccagcagttcccagaaggactcttctatgaggtgagttgcactggacaaaagcagggaggtgccattccccaccctcccgcttcctgcccttctttcctgaggactcctccttcatgttcagtttcatgatgaaagactgaagtgccacatgcatgccaggtatttgatagctgtgaggtcagaggtggcatctctatggcccatatgggcagtggcgtgattgggacaccctcacagaccctgcatttgtattgctcagttcatcgtcctatttcagaacccagagtcccttacgacagagcctttcagacctaagcagctcagctccacatagaaaattctttccgagtcttcagccacactcaggccccccacacacctcacccactcctgtctctgtgtctttcccccttctcagaggaccactggacctgctctaaaggagagcgtgcggtgtacgtcaccccctccacaacttcccagcctcgagccaggagcgtccatgcatttattttctaagggaaaaaaaaataagtattttagggaactatactgtctacatttagctctcctgggtgtctatgttcttttctaaatatttgtttttcttgatcctcgggtgttagcatatggtctgcacttcctttgtagtgtatttggtattctcaacattaccgaaaccactttcttgttgttttttattgttttgttttgtttgagacaaagtctcattgtatagcccaggctagagtgtagtggcatgattatagctcattgcagccttgaactgctaagctcaagtgatcctccagcctcagcctcctgagtagctggggctacaggcacgtgccaccatgcccgactaattttatttttcatagaaacggagtctccctatgttgcccaggctggtctcaaactcctgggctcaggtgatcctcggcctcccaaagtgctgggattacaggcatgaacctccatgtctggcccactgaaactcctgtctcacagtaaacatgtattttgggggataatctagagatgctgaccccaggctataaatgacggtgagagtgaggtgtatgtgtgtgttagatcaaataggtaatttacttttaccaccttacttcttacatatttgtacgtaaatgcacatctatatatgataatatatgtatatagaattattttatagctggagatggctgctctttgatttcttcttttgcctagcagatttttatgtttccctgttatataaaccatgcttgagcaaggaaaggtagttgacaaagatcattggtaagtccattgtatgccactccggcagcattttcccatagaaacaaacatgagagtggggttcccaggccagcccacagaaaagctgtttaccccatcatgggtacatgaaatacagggctagcaagtatgtaataatgtcaacttggaaacagctttaagggtttgggttaaggaatgctgttttattcactagcacacatttttttaagctcctattgtgtccccaaaacacacattcccaacaacaaaaaccttagcagtggaaagaggttttcgttttctctcttcttctagttcttttttttttttttttaagtttatttctttaggcctccaaacatgctctatgtatcttcttacagttcttcctgttcttcctgactccttccctgggcagtgggaatcttttggacaaggatgatggatttagggatgggcaaatgacagttgtgaagatggacaggagcaggagaggccaatgtaccacagcagaagagggcaggagaggagctccagaggtgtgaatggaggcatcaggcatagagaccccctaccgaggctataggtagactgtgattagctggtgaggagaaggaataggaaatccctaggtgctgcggcagcaagaagagagggcgtttgctggtggtagtggtggtgagccatgactcaattcagttaaagggacctgaggacctgcttctacctcggcaccgtggaggcctggtgggactatggcaaggaaggaggtgagactcccaaggcacattgaagggaattctggaaagctggcttggagagagcatggtcttctcactatatgaattccttctgtatccctcccttcttttttttttctcctgtagtccagagaggttgaaatgtctgataacatagcaggtttgcgacatgaaagagatgagaacctagctggtctcctagtatccaatacaatattctttcccttacatattctttttaaatataagatatttttattgaaatgggtgattatgacaaaggccttaggagagctcggtccaggggagcaatagagaagaactcagagaaaaagacaggctttgttttcccaaacattttccttatatccctggcttgctctttcccctgtgagcaccctggagctccagccctccgtcaccttctttctcccattttgcctgtgacttaggaatgaacgtgatggttaagctaccttcattaagcagcatgaccgcttcctgagctcctgctgccgcatttaggccctgtcagctgtgaggccactggtgctgagtcagagggaaaagctcagaacagccttgagcagcgaagaataaagcgtgactcatctcgtcctgcccacccctcacactggactataaataccctccctgggtctgtgtgctgttattccaaaagatgcgatgaatacccagaactaggctattcatgggctgttgcccagttcaagctctattgggtcctgaggaagattactattttggctacattgtttatcattaaaaccagcccagggatgtgtaaacctgcatctggagaataagacatttctttttggttaaatgatattagagaaaaaaaaactatccaaggctgctaacaaataatcttcactttcaattatatccagcaataagttgttctccagaaaagaaagcttggaaacttacccagtttgccttccatttgggacatgactgatgtgcttcagtctttgtataataaatgcatcttcgccactct

SEQ ID NO: 1115 - DNA, 2296 bp, Homo sapiens
aataagtgcctgtgtgttggcaactgcagctaaagctctcctatctctgcaaacatcgattcacgagttccccacagatctgttctccaataaggagcgacagcacggagccgtcctgctgcacatccttggtgctctgtatatgttctatgccttggccatagtgtgcgatgacttctttgttccgtctctagagaagatctgtgagagactccatctgagcgaagatgtggctggagccaccttcatggctgcaggaagctcaacgccagagctgtttgcgtctgttattggggtgttcatcacccacggggacgtcggggtgggcaccatctctgtcatcgtgctcatcgtgttcatatatgatgaacaaattgtgtggtgggaaggcctggtgctcatcatcttgtatgtgttttatattctgatcatgaagtacaatgtgaagatgcaagcctttttcacagtcaaacaaaagagcattgcaaacggtaacccggtcaacagtgagctggaggctggtaatgatttctatgacggtagctatgatgacccttccgtgccattgctggggcaagtgaaggagaagccacagtatggcaagaaccccgtggtgatggtggacgagattatgagctccagccctcccaagttcaccttccctgaagcaggcttacgaatcatgatcaccaataagtttggacccaggacccgactacggatggccagcaggatcatcattaatgagcggcagagactgatcaactcggccaatggtgtgagcagtaagccgcttcaaaacgggaggcacgagaacattgagaacgggaatgttcctgtggaaaaccccgaagaccctcagcagaatcaggagcagcagccgccgccacagccaccaccgccagagccagagccggtggaggctgacttcctgtcccccttctccgtgccggaggccagaggggacaaggtcaagtgggtgttcacctggcccctcatcttcctcctgtgcgtcaccattcccaacagcagcaagccccgctgggagaagttcttcatggtcaccttcatcaccgccacgctgtggatcgctgtgttctcctacatcatggtgtggctggagcaaagagaggggaagcagttccagcatggctgcagttctgttgattgtgaaactcactctcagccccttacaccctagtggttaacatcgagtccctttattctcctcctaatgcctgacaccagcagcagagaaggcaagcgatcttgacatgagagacagcagggccagtaaacgttccatgctggcccaggggccacctttcccttaactccagagaaaccgtgtcgtttggtggggaacaaaggatcctggatcacatgagaacagcgctgaatcctagtcctacctcttgcaaaccacagaagctggtgactccctctatgaagtgggggtgatcatcactctcttacaaggccattgggagaatgaaaagagagcccagcacattctaggcacttggccaatcctgtctcttccctccccccaacccaatcacgccttcccccatctctcccagagcattactggaattctaaacagtgtatgggagccattttgcctatgctttcctgaaatcccaccctttggccggctccctcacctcagatgcttcctcaggctgatcagagacctgccgcaacctctgtgagtgtccttactcatgcagcagccctcctgtccctgtggcagagcctccccaagacaccagctggtggaaggtgctgcccccagcctgttccctttctccctttcttctggtacctgcttagagctctgtatcccaaaaggaagctcaggacggactctgtgactcctggtaccggcttagagctctgtatcccaaaaagaagctcaggatggactctgtgattgtgttttagtgaatgaaacaagtcatgtaactcaggagaggcagaaccactccaagcctccaggaccccagcatctgccccagccccaggcactcacacttggaacaccctggccttggttcagctaaatgggggacatggggacacttgaacattcaagtcccccaggacctcattcatgtccctcctgaccactccctttcacaccctactcccagcccaaaacagtttggttagactgtgtcagaagcatccagtcgttagccgcttattgaaaccaacagccaattaagggtgattacctggtaacagtcagatgatcatgagcgttgctgaataatacacagtttggccactg

SEQ ID NO: 1116 - DNA, 2856 bp, Homo sapiens
ctcagagacttggctaggcgcggcgcgaggcgggcgctgcggcgccagcagccctgtggtggcgacgacgatggaccaggagccagtgggcggtgtggaacgaggagaagccgtcgcagcctcgggagctgcggccgccgcggcattcggggaatctgcagggcagatgagtaacgaaagaggctttgaaaatgtagaactgggagtcataggaaaaaagaagaaagtcccaaggagagtcatccactttgttagtggtgaaacaatggaagaatatagcacagatgaagacgaagttgatggcctggagaagaaagatgttttgcctactgttgatccgacaaaacttacctggggtccctacttatggttttacatgcttcgggctgctacatcaactctctcagtgtgtgacttccttggagagaagattgcatctgttttgggtatcagcaccccaaagtaccaatatgccattgatgaatattatcggatgaagaaggaggaagaagaagaagaagaagaaaacaggatgtctgaagaagcagaaaaacaatatcaacagaataaattgcagactgattccattgttcagacagatcaaccagagacagtgatatccagctcatttgtgaatgtcaattttgaaatggagggagacagtgaagtaattatggaaagcaagcaaaatccagtctctgtcccaccataaaatgaaatgactatcaagcttcaaactcttaagttttttttttttaatacaaaaactttcacattctttattcagtgggacttaatacaattatttatattttaaattattaaagtatctggaaagggaaaatgttttcttcatttttaggatctatctagcaaaagccagatctgaaattcagatatttgtactgtttttactgtgtatagaaattagtgctttggttttaaaatgatcttttaaaaaagttaaggacatcctagagccttaatagttaagaagagttaaattatcaagcctatttgtgtatttgctttttttgaaaaaggtaagttgctgattaagtctaattggaattgataattccatagtcttagattaaaatgaggatattttctcctagattttctcatgttatgccatgcatttatatatctaaccattaatttcacactaaggatgcttcaccatataataaaaggagcaagatggaagcactttgaattttctttcattgagaataactgttttatgtaagaatctgtatttataacaccagatattaagataggcttccattttttaatgcaagccacttacttaatcttgtattctttttcaggactcaaataactagctttgaacataatattaaaacactacttatagaatagatttattaatgttaatacctagtgaatatccatgtggcatcctggttatcggttcagcgttaatcctatagaaaagtggtttggaggggattgggggatagtgggacaggtatagatttaatccatcaggagcaattagatattgtataaggtgcaatgatagcctaatgaaattacccgtcattcatcatttagaagtagcaacagtgaagactggacagtttacttgaatctggttggccactcctctacctacttggttatttgtaaaccttacaaatgtatatattgtgaagctaattttgaaaatattcctaaatatggccaggtacggtgctcacacctgtaatcccagcactttgggaggctgaagtgggcagattacttgaggtcaggagtttgagaccagcctggccaacgtagtgaaaccccgtctctacaaaaatacaaaaattagccaggcgtggtggtgcacgtctgtaatcccagctgctcgggaggctgaggcaggagaatcacttgaaccagggaggtggaggttgcagtgagccaagattgcaccactgcactccagcctgggcgacagagtgagactccatcttggggggaaaaaagtatatatatatacacacacacagacacacacacacacacatatatctctaaatgtgtgtatagaaccttttatcagtataacattgatttataattaaatgtgggtgaggaagaatgtgtggagtgtttcagaaattttgatcttaaaagccttttcagaaactcaaagctttcagaaattaatagttatattaatagccttctaaacagcattaagttttcaattttaatatatctatataaaatatagtgtcaaagaaagtaacatcaatatagtgggtctgtaatggaaatctgtcaatgaacatgaactgagttcttcaactacaggttgaaggataattaaacttttcattaggagtgttcagctacatggattcatggaatggtggttcatagtaagtgatggtaatctttttattcatgggtgtaaaccctttataacttagtgcttaaaatattaatcttttgattatataatgtcccatgaattatagtttaccaatagttctaaaacatgctaacctgaccttttccttctaatttgtttttaacttcattcgagatagtacctctcactcacagatatttatttggttatcaagtgaagataggtgtgtctaaaagtgatcttctgaatcctgtctccctagaggtactagtatctagagtttacccagaaaattttatgattgtaacaaaaggaagtagtgacttatgaaggttttgtttcttgaattttacttttgctacttgtccaatagtggctagtttatgtttatcaatatagttattcactgtgccttaagtttatactttgtttatgcaaactataaaatttcccataaatgt

SEQ ID NO: 1117 - DNA, 2975 bp, Homo sapiens
actgcccggcccggcacgggcggcgcgatgtgaggcgtccgagcccggagcctccgcctggcatcagctccacgtagcccagcgccggcacgcgcgaggccccccttctgcagaggccgggctggaggagaagatggcggccaagcagcccccgcctctgatgaagaagcacagccagacggacctcgtgagccgcctgaagacccgcaagatcctcggcgtgggcggggaggatgacgacggggaggtgcatcgctccaagggtctggcagttcgtctctgctgtgctcttctccggcattgccatcatggcgcttgccttccctgaccagctctatgatgcggtctttgatggagcccaggtgaccagcaagacccccatccgcctctacggcggtgccctcctcagcatctccctgatcatgtggaacgctctctacacggctgagaaggtcatcattcgatggaccctgctcaccgaagcttgctatttcggggtccagttcttggtggtcactgccacgctagctgagacgggcctcatgtccctggggatcctgctgctcctggtcagccgcctcctttttgtcgtcatcagcatttactactattaccaagtcggccgaagacccaagaaggcctagttgcccgctgggcctggggccctgcccatgcctgggccagagtggcgctggggcctcggcttccctttggctcctggaaggcaggagggtcccctgccctgccccagtcctgccccagggaggcagggggtggggggccttcctttcctcctgggcaccccgtgtgctgtgatctcctgggctttcaggcttgacatgctggtctggggagagacagggcctctgctgccctgttcttcaccctcacagtgatacctcctttccttgggtctcttggcctccagaccccctcaatagacactgactaaagtcaagctggagtcatgagggtagtgggctaagtcgagggtccagcctcttctgccaggaagcccttcttgcttttgagagaggctgtgaccaccccccatccttctccctacactcccagccaacctagtgcccaagcagctaaacttggcttccttctaatcctggaaaaccctgtacccctcctcctcaatctggccctctccacatgcacaccctgaaaacacacacagacacacaacacacacacatacacacccctgaacacacacacagacacacatacacccatgatgtgagcaaacacacacacgtgcgccttcatagcccagccaagggcatgcaggcagggtgtgctgcctgagatggcacctccctttcagccattcttcaagaatgggccacacacagctagaagtcctctcccagctagaagtcctgtccccactctcctggcctgacaagatgagctctcctgggaccttgctctagggcactctgcctctaccctaggacactggaatgccctgggagccccctccctgcaaccagcctgagttcagccccacggacaaagggacacacagcccccaatggagaccattgtaagtggtggggctgggagaggaggaacagaaggaaagccatagcgctctcttgccccttggcatgtaccccaaggcctgatggccactgggctcagcctgtcccccactcctgcctgcttcccggtgagctgccccccacacgtgcagcccgggctgcctccagggtctggctgagtgggatcaggtggccctccaactcagcacaggaaataagtagaaacatttcagcaggccacctcccctcatcttccccgccctgtccagcgccctggcaaaggctgacaactggctgtcttggggccgaacagcccctgccctgcctctgagggcccaccagcctgtgctgcatacccaccgcccagcttctccctgagggcccaccagcctgtgctgcatacccaccgcccagcttctccctgagggcccaccagcctgtgctgtacaccccgttagtccctgatcccaaccttctcacccctgccagatacagcaacatggcctgtacccagcagagtggtggcaccaccatggttacagcggatgccccgagactctgcttggtaaacgtggcagagcagaatgggaggctggaccctgaggaagggcccctctcctggcatctgtctcttgctacctaagcctgtgcctctccctaaagagctgcctccctgctgccgagccctggtctggccacgagccactactgcctcccacaggcaccactgcctcccgctgctgcccacaggtggtgccgccaatgggcagtgccctcaggccgaagcctcaatcccccatctgagccaggcctaatcctctaatagtgatggttggtttgtcctcccataactgcaggtggattccacctggggaatgaggctgcgtgtcgggcgtctgctggccctgagacatccagtcttccacactcaactgtgggatgggagggtggcgtggccttaccccatgaggctgtccaggctctggcacacagctgtgctcacaaaatactgggtggcttggttagagctaattgtagtggagcctgcaggtgagggtgagggagggggctgcaggtcaggtaagatctggaagacagacgtacagcttggagggcagggggactctaaggcaaggagatttacagttgggaaggaggcagtggcagaggggtgagggacaggggcccttaagtccagcgaggaaagctcggtgtgggcccgctctacgctccgtttggggtgacctggaacgcctcttctcccagctccctccagccatcagcagcctcttgtcaagcttctgcctcgccccagtctatccccaaccccaaatcaagaccacctttcttcacggtcactatttattctttgttcctttttctttttgtaagaaacattcacaaaaaccagtgcaaaac

SEQ ID NO: 1118 - DNA, 3441 bp, Homo sapiens
gagagaatggccgctgccgccgccgctgctgccgccgccgccgccgccgctcagtgccggagccctcggtgcgcggcggagagaagaggattccggcgggaactcgactcttggcgccaccgcctcatgccctgtgtaggttttgagagtattttagaagggctttatggaccacggctacgaagagacctcagtttatttgaagactgtgaaccagaagagctgactgactggtctatggatgaaaaatgttcattttgtaacctacagagagaagcagtcagtgattgtataccatctcttgattcttcacagtcaacaccaacagaggagctatcatctcagggccagtccaacactgataagattgaatgccaagcagaaaattacctaaatgcactctttcgaaagaaagatcttcctcagaactgtgatcctaacattcccctagttgctcaggaattaatgaaaaagatgatacgtcaatttgcgattgagtacatttcaaaaagtggtaaaactcaagagaatagaaatggttcaattggaccaagtatagtatgtaaaagtatccaaatgaatcaagcagaaaactcccttcaggaagagcaggaaggccccttagacctcactgtgaatcgaatgcaagaacaaaatactcagcaaggggatggagtgttagatctctctacaaagaaaaccagcataaaatctgaagagtcatccatatgtgatccttcttctgaaaattcagtggctggcatgctacaagtgaaaactgatgagaaactgaatgtgtctgatgagaatacagcaagttgccctttgagccccattaagatgtgccttaatcgtcccattgaatggaatctgaatttgacaacagcatctctaacgagctgtacagttcataaccaaaatctcaaaagcgaagagaaatagattgcagttcttcttgcactatctttattttgtatgtcagtattccttctgaacaataagcatttatcaattgatcttgaagtatttctagtcctgtgatttgtctttatattaaatcattagcattaatcattttgattatattctttatatgtttttttacatgttttacatcagatcattgtggaattttgtaaacggattttgatgtttctcttttagtggtattatgtgaattttttatgccctaagtttaaatacgtaattgtccctagttttatttctgtgcacaaagttttaatatatgacacattgtgatttataaagctagtattgtaaagatttgtgatgataacctgacccatgagcagttgtaaaacaggtggataccaactacctcgaagcaaattggtgaaagaaaaggcaaaggtatctcttagaagtaaatctccttcaacgttatatatgtacagaagaaaaaaagttgatcatagctttttgtcaagtagcatgtttcccattcacaggaaaatgtgagcttatcagttctttctctgtattttaaatctaagtctgtgggctttaagagcaatggcacaattgcatgtttactgttcagcaaatctgtgcctcttgatagagaaaaatactatgtggtttctgtaagttaccagttttgaatgaaaaatggtaaatggatttacatctgttttattgtaccttagccttttattttaaagttaaagggatgacttttaaaagcaggacattccctacctttaatagtgcaaagcacagtttcagcaatggctacatgactatgtctaaaaactgaatactcagaatactaaaggtttggtgcttaaatttatttttcccatgccagagaaagcaagctttggtatggtaaaccacatgagaacatggctcctttctttttggatagcctggccatgtgtgaatgggattttagcttattatgtttctaagacttttccttacagcacacttaatgtaccttttcagtccttctcccaaccccctgcaaattgtctttaaaacaacaacacataaggaatctgaagcacaggagaacacagagccaacaaacagaatgaagaacaatcatctatttttaactgactttctatcattaccatttttccttttgcttaataactatcttgctttgaaactttgactccttttataagttctatgaggcacatatgtatagcaatttggttctaaaaaccagtgatcttactttagctccatcttaaaatttcaccttaagtaaatggcctctagtagatgataagcctaaaaaaagcacaattattaaaacaaacagatccatgttaggacatttctgaataataaagagaaaaggtgtttcgttgggtattgcagaaaagaggaccaatttcatatagtacaagtttcgtaagtcaggccaagtgtcaatttcaaaagacaagaaatgaaattgacagtgaatagtgctcataaattggtagcgtatataaagagaagttcctgtcacattatattcccactagaattattatccacagtaaataaatattattttgttatgccaaaaatatagcgagcagcttcatggttaataatacatttatgttgacacctccctaatccaggaaacattcacaaacaaggactcccatatacaaatactttaggaagagagatttcccaggcagatatcaccaaaaatgttttcactgtaggaatcacaaaataagtttttgtcaaaataactgttgttgaacgttatactggtcttcctcactggtgattgataagctcctttctagccagtttgtggtacttccttcattttccctagaaatgttacttgttaaatgtgtcctcaggcggtttcatctttgttgattctgcccatctaagtcataagcttctcaaatgcaagctactagctagttacacttgtaagttttccataatgacatgattttaaacataaagagttcataagaatcacttggagagactatttaaaaatgagattcctaggcccacctcagattgtgataaatctgtgtgactgactgatgcacactttttctggactataataactgatgctgctctgctgctttaatacaggccaaagtaacgtggaagcgcacagcagaaaatcttcagaaagacatcaggtttgttctgattttgacaagggtaacttcttctttattaaagcaaataactggacataatcttaaaggattccacctccatcgtctttcctaacttagatcttcattgagaaattgggcaaggttaagtttacttttttctagtgctgcggttttggctcgtcttggtagtctcatcttcatttctgattctggttctggaacttcatgatcactaaatagatgttgaaaatacacgaatttagatacaagctttaaaaccagtttatttataaataaaacttttttgtttctg

SEQ ID NO: 1119 - DNA, 2766 bp, Homo sapiens
gctctttctcccgagcccccgcgggggaagattcagagggactgaccggcaggcgcgggagtccgcccgggggtttctggcacatgcagggatggaggtggagacggaggccgggtcccctcgcgtcggcgccccggggagtcagggcccgggatggtgggacgggaggcgggacctcggggagcggctcgcggggatcgcgggcggcgaccgccgaggggatggagttcgtggcaccgctgtggccgcaggcgacgcactcatcaatgcaaacgatgaagccaccgccacccccgccccgtctgaactttgcagtttcccgcctgggtggtggggggcttggagcgctgcggaggggagggcagttcgacttcccaggcctccgccaggagtggggaggggagggctgtggcggaagcttcagtctcggcccttgggctggtggggctgccacgggagggtgacctggtttcgggcggagtcatgcgtttccctccctcctgcacaggcctctggcagtgctggctggggcagggtgaatggcagaggagctcaggcctgaaagtcatcggccccaaggggctccagcaccccttcctctgggcccctagcctgggagctctcggggactctgacccggtcagatcctgaggcataagcagaagtccactgaggatgtgggtgtctcaggctctctacaagggggtttactttcaacacagaaggtggggtttttatctgctctctcagaagatgaagcaggctcagagaggcttgaacctaccctgatgggtcctcagcctcccctctgtgcctgccgtcttcccttggcagggcctggcactgtgcccaccgagggtggctttgcagccagcatcatcgcagacactccccgaggggacagggctcctggagggcagcccacccacagccccctcacctcactctcccgtcccagttcatgaggaaggcccagggacactgctgggtgagggaacctacacgagcaccctcttcgggaggcctggagaggggaagaagcttccacttccagggcctgccgagactccctagccagtgctcccaccaggtgggggtagctgagaagcgacctgtagaccctcccattcctccataaagggccgggttctgagccattccatttgccagcagccgtgctcctggtcagagaggccctgagcacaggaataccagcccttcccctgtctctgcgcctagtgcctccctgtgggagggcagggctgccctagaggactggctgtccaggcgaatgggctcacacagaacttctggagccaccctccatggtgggccggggctgggcacggcgggggagccgggcctcacggtcccctgcccgcagtgctcggtggcatggaggtgcggtggtgcgccacctcggacccagagcagcacaagtgcggcaacatgagcgaggccttccgggaagcgggcatccagccctccctcctctgcgtccggggcacctccgccgaccactgcgtccagctcatcgcggcccaggaggctgacgccatcactctggatggaggagccatctatgaggcgggaaaggagcacggcctgaagccggtggtgggcgaagtgtacgatcaaggtaagagggtgcagtgggaggagagaggacagcctgcgctggaagtcagctctccaggctgcccttgctgggcctggcctgagctggccatcagccctgtccacagagcagtcctggagtcccagccagaagaacgccctaaggctctctcaaattccccagggacaggagctccggggacacagagagctgccccaagtctgctcttgcccgcagggagcccagcagccccctagcctgtgcccactcagctcttactgcgggctgtcccgggcctggcgtggtgccgggcacggtgctgtgtgcgtaactgccttgggtgagcaaggcgtccttaatgccgagccacctgcactctcagggcctcccttcagaagcccggctccgggtagggaggtgctgtctggcagcggcacagctcagcagacccagcccttccccttcccatgacttctgtgaccttggccaacctccacttcccagactgtataatggggatagtaacacctgcgctgtcacccagactaaatgagccaggccgtgtgcccacctgacatgtggtatgtgctggaaagtgtgagttcctttgcccagtccccgcatcacacatgggacctgcctccagctcagccagctcctgtgtctcccccgccacctctgcttggccggtgcctggcctccatcacagtccagcgcaactgtcacctcctccaaggtgctccctgagcccctccctctctggagcagggcctctcttgcccgcacccacatggcctctgcaagcctctgcctgctcagtctcgttagtcctcagaggagggtccagtcttcccctgtgtctaccctctggaactccacacagcatctcgcttggagaaagcactggctggttccttgttgaattaatggccatcaaatgacacacggcacagtccaaccctgcacacccatcagccagaaacagctctgcctccgaggccccacgcacctcttcccctttaattaactcgacacctctactgagcacctgctacccgctggtcataagcatgcagcagtaaacgaagagaccttcctgcccccacagagcagagagtaaataaacacacccaaaacaaaaaaaaaac

SEQ ID NO: 1120 - DNA, 2648 bp, Homo sapiens
atttacacatttccctcctcagcaatgggtacacagacagccaagctcctggactaagtctctgaatgtgtatctgacacttccccttactgagctccggaggctccttcttgccgagctccggaggctcccagtgacctcttgataatcagccttggcggggcccaaataccaccccttggaaaactcactgagcctgacatctgcctgtaagcagctttcaggaaggatctcacaaacacccacccaatctctcttggtagcaaattgtcaaatcatacccatttcctcaaaagatggtggaggacttagcagcctcctatattgttctgaaattggagaatgaaattcggcaggctcaagtgcagtggctgatggaagaaaatgctgctctccaggcccagatcccagagcttcagaagtcccaagcagccaaggagtatgatctactccgaaagtcctcagaggccaaggagccccagaagctcccagagcacatgaatcccccagcagcctgggaggcccaaaagaccccagagttcaaggaaccccagaagccaccagagccacaggatcttctaccctgggaacccccagcagcctgggaactccaggaggccccagcagccccagagtccctggcgcctccagcaacccgggagtcccagaaacctccaatggcccatgagatcccaacagtcttggagggccaggggcctgcaaacacccaggatgccacaatagcccaagagcccaagaattcagaaccccaggatcccccaaatattgagaagccccaggaggcaccagaataccaggaaactgcagcacagctagagttccttgagcttccacctccccaggagcctctggagccttcaaatgcccaggaattcctagaactctcagcagcccaggagtccctggagggtctaatagttgtggagacatcagcagcttcagagtttccacaggcccctattgggttagaggctacagatttccccctgcaatacactttaaccttcagtggagattcccagaagcttcctgagttcctggttcagctgtatagttacatgagagtcagagggcacctgtatcccactgaagcagccctggtgagctttgttggcaattgcttctcaggtagggcaggatggtggttccagctcttactggatatccaaagccccttactggagcaatgtgaaagtttcatacctgtgctccaggatacttttgataatccagaaaacatgaaagatgccaaccagtgcatccatcaactctgccaaggggagggtcatgtagcaacccacttccacctcattgctcaagagctgaactgggatgaaagcactctctggatccaatttcaagaaggtcttgccagttctatacaagatgaactgtctcacacaagcccagccaccaacctatctgatctcatcactcagtgcatcagcctggaagagaagcctgatcccaatccattagggaaaagttcctctgcagagggagatggacccgagagtccaccagctgaaaaccaacctatgcaggctgcaatcaactgcccacacatcagtgaagctgaatgggtccgttggcacaaaggccgcttatgcctctactgtggttatcctggtcattttgccagagattgccctgtcaagcctcatcaggccctgcaggcgggaaacatccaggcctgccagtaagggggaccccacgtgggccaatctacaaatatgcgtccccctctcttccaatatccatgtctcatacactatggcttactgttgaaatccaactgggaagaagataattctttgagcaagcaatggtagattcaggctcctacagaaacagcattgatcatactgtggttcttcgagagaagctgcccatccgcagtaatatcttccctctgatgctggaaactgtcgacggccatccacttattaatggacccataactaaggaaacatcacctgtccaagttcaaattggaaaccatgttgaagagctccagtttgacattattcatgcaccacgataccctctgattattggaatccattggcttgagacacatgacccaaacatagaatggagtacccgcactgtgtcctttctatcacgttattgtcactacaattgcttcaggcacaggtggaatagaagaaatcgtgatgaaataatttctgggtagatcctgtgtcctagtgactgttcctggcaacctgtcttctgttacctcagctgtcatcagcatttgctgctccctgaatcttctactgaacatcttgctatgtactaaggctacctgtacaacgactctgcctcttagatgatagactgaacctgatgactttgagctgcttttttttttttcactaactctgcatgcctctatctcagaaccctgcatcctgcggaactgttttaattacaattatactaacaatacacatgagaatagatattagaaactaataatgaaaaagcatagctgttaaactgacttgatttttttcttatcaatattttctatatcacaaaaatggcaacatcttttacataaagaaaataagtttgtaagtgatatttcttaaaagaatcaataaatattagcaatttct

SEQ ID NO: 1121 - DNA, 2233 bp, Homo sapiens
acacacgcgcgcacacacacgcgcacaccggaccccgcgcgcacacgcacggagggcgcgagcgagcagacgcgcacaccggcgagccaagttccgcagcctggcatggcttctggggacctttacgaggttgaaaggattgtagacaagaggaagaacaagaaaggaaaatgggagtatcttatccgatggaaaggctacgggagcaccgaggacacgtgggagccggagcaccacctcttgcactgtgaggagtttattgatgaattcaatgggttgcacatgtccaaggacaagaggatcaagtcagggaagcagtccagtacctccaagctgctgcgtgacagtcgaggcccgtcggttgagaaactgtcccacagaccttcagatcctggaaagagcaaggggacctcccataaacggaagcgaattaaccctcccctggccaagccaaaaaaagggtattcaggcaagccctcttcaggaggtgacagggccaccaagacggtgtcttacaggactacccccagtggtttgcaaataatgcccctgaaaaagtctcagaacgggatggaaaatggggacgccggctctgagaaggatgagaggcactttggaaatgggtcccatcagcctggcttggatttgaatgatcatgttggagagcaagatatgggtgaatgtgacgtggatcacgctacactggcggagaacgggctcggctctgctctgaccaacgggggattgaacctgcacagtccagtgaagaggaagctggaagcggagaaggactacgtctttgacaaaaggctcagatacagtgtccgccagaatgaaagcaactgtcggtttcgagacatcgttgtgcggaaggaagaagggttcacgcacatcctgctgtccagtcagacctcggataacaatgccctgacacctgagatcatgaaagaagtccggcgagcgctctgcaacgcagccacagacgacagcaaactgctgctcctcagcgcagtggggagcgtgttctgcagcggcctggattattcctacctaattggccggttgtccagcgaccggcgaaaggagagcactcggattgcagaagccatcagggactttgtgaaggcctttatccagtttaagaagcctatcgtggtggccatcaatgggccggccctgggcctgggtgcctccatcctgcccctctgtgacatcgtgtgggccagtgagaaggcctggttccagacgccctacgccaccatccgcctcacgcctgctggctgctcctcctacaccttcccccagatcctgggcgtcgcgctggccaatgagatgctgttctgtgggcggaagctcaccgcccaggaggcctgcagcagggggctggtgtcgcaggtcttctggcccaccacgttcagccaggaggtcatgctgcgggtcaaggagatggcatcctgcagtgccgtggtgttagaggagtccaaatgcctcgtgcggagcttcctgaaatcagtgctggaagacgtgaacgagaaggaatgcctcatgctcaagcagctctggagctcctccaaaggccttgactcccttttcagctacctgcaggacaaaatttatgaagtctgaggggccccagctcacgggcccccaacttccagctctgccctgtgtttcggaaaccagagcacagtgtctgccccggccaaggagtttgtcaaggtgtctctttatacgtagggttgtgtccatttcctcgtgtcctttggttgctcctccttggtttgattttgtgtaatggatggaaaacgcagcatacttggcctcccccacctccctgcccttcctggccagagagctgtccaaggctgtatcttcccagggctccgccaagcaccgctgtcctttccccacttgctgaaatgcaccatgacggtccaggaaggggaagaccactttcacattcttctgactcaggctgtgtctacacagtgcctctgacttggagacttggccatcatggctctctctggttgtatttagatcgggtgtcagaggacgaccaatcttagggaatttccagaccaatgagcaaaatgattgtgcacacctggcctcagtctcctttccgacgcaaatctgtgtgactattagggcttggtcttaaaacccaattgagtgatttgcaaacccagatattgtacatttagaaatgttttgttaaatatatattttt

SEQ ID NO: 1122 - DNA, 3547 bp, Homo sapiens
cacaactacatacctttgctgttacagcatgaaagcagccatagacaatatataaatgagtgagtgtggcagtgtcctaatgaaaccttatgtacaaaaacagtggttgttgtcttaacagtggggttttactgttttgacgttttaactcataaatacagtttgctgtatggaacatgttaagattttacagtgtcaaatccatttagaatgacctttccagaaacttagctgtatttattgttttagaacaggagttggcagcctttcagaaatgatttgccaaaattatggcctctgtccttctagcattacattttgggtacaggaaatttgatacacaagttgacttttttctacttctaataggacctgagggccttgaaaatatcttttcccaaaactggttttgttatattgtcagaagaatctcactttgtcacataaccagaaatcctaagattcaaatgattcctaatcatcttttataaaaattgaaatgtccttgggaatgttaaaggaatgagattgaatatttataccttcaactgaattacctgaaacagattgcagcccccattataccaggctgaaatcagcacacaaggggatgatactgacacaaagggaaccatgccaaaaagtgctttgaaggttttatggttgttttgaagggaatggggtgaggaaagtagggggaagggagtcctgagaagaatatagatgaaagagggctctctttgattagccagagggcaacataagatttggagaccatgggaaaggagctctggggtgccttcctgcttctcctgtgagttaagctttgacttcttataaatgttgtttcacacctcttctggacaggctcctaattaatgggagacaagagagcaaggtagttgtgtcattgatgctcacaagtagtgagaagttaaaaaaaaaaaaattaattgtcattaaaaattggtcacctgccttcttttgcaaaatttttaacagatgccaacccctgttctggaggttccttaataccagaattcaagattccaaatttttagatgttacttacctcgatccttcggtttcaaagagaatcgcttattttaaaattaacatttaaacattatatatcgcttaaataactgaattacataaccagtttatttcttatttcatttgcaggtaaaagtagtttttctttcttgtttttatccattcttgcagctttaacagttacatatcaataggtctatatagttgtgactccagacttatgactataactatagctgtatctcattttgaaatcttattttgtttacttcagcatacctcatctcagaactagaagctgccagaatgctctgtgtgaatgctcctccaaaaaaagctcaagaaggaggcggtagtgaggtctttcaagagttgaaaggcatatgtattgctctaggaatgtccaaacctccagccaatataactatgttccaattcttcagcgggattgaaaaaaaattaaaggaaacattagcaaaagttccacctaatcatgtgggaaagcctttactgaagaagccaatgggaccagcccactggagccagacagaaaaattagccaaggtttaccagccgaaacgttcagtcttatcccctaaaactactatttctgttgcccatcttttggctgcaaggcaggacttgtcaaagattttaaggacaagcagcggctctataagagaaaagactgcctgtgccatcaataaggtgttgatgggcagggtgcctgacagaggtggtagacccaatgaaatcgaacctccacccccagagatgccaccgtggcagaagaggcaagatggcccccagcagcaaacaggaggccgaggaggagggagaggtggctatgaacattcctcatacggaggacgaggaggtcatgaacaaggaggcgggagaggtggacgtggtggctatgaccatggtggccgagggggaggaagaggaaataagcatcaaggaggctggacagatggagggagtggtggaggaggtggctaccaagatggtggttatcgagattcaggtttccagccaggtggctatcatggtggccacagcagtggtggctatcaaggcggaggttatggtggcttccaaacatcttcttcatatacaggaagtggataccagggtggtggctaccagcaggacaatagataccaagatggcgggcaccatggtgatcgtggtggtggtcgtggtgggcgaggtggtcgtggaggccgaggtggtcgtgcaggccagggaggaggctggggaggaagagggagccagaattatcaccaagggggtcaatttgaacagcatttccagcatggaggttatcagtataatcattctggatttggacagggaagacattacactagttgaggctaccgaaccttacattttgctagagctcaagtaatagaaacttagtttcagaatcctgaattcagcacctattttgaattaatgtgagaccacaggtggcaggcagattcctgcttggcataagcatttgtaggtcttcattcaattctgttagatttttttattggacttacataatgccgtttatttgagaaacacataacatctctcctttctatgaaaaattttttaaaaggtggttaaaattgcctttaattgcccagtagactaattccacagtcagaacatgcaaacttttttgaagaaattacttgaataagtagttttcatgttttcaatatgcagttttgaaaatgaggattcacctagacttttttagatttactactaggaaaccttcctcatatgaataaccatttatatgtgttttgcttaaagtattccaatgcctattttccaagcacagttctgccccccggttgacttttatgccacgtgtgcttcatgatggaacttttaggtcagttcctattaaatgagctcttctgcagatagcacattcagtagccttattttgttgatggaatactgtatcatatgctcaactctgaaaaccttgaacacggccaaaatccataaagattataaaagcaaactaagttgtgaagctatagtacatgtaggcatttagttaagtatagcaattcaaactgacctgcatccatccaaaacaaattcctccttcaaccttatttttacttgaaatttgctagaagaaatagcaaaccgaaatttgttttatgcatgagttaataccactggctcagcaaatacaagttagtttgctttaagcaggtaactttttttgtaatggaagaaatgcactacaaagttaagacagatttttgctaagtgcaggaggccctttattattgctgcagaaaacaaaagcctggctgagttgatgttttacattctcccttactgaaatctacatgacatgatgcttcttgctgggtttttgtacatgtaaacattgtcaagctgtgaaagaaaatggctggaggtgtgctttgtgtgaaaggtgagcaataaagtatctgttaagttc

SEQ ID NO: 1123 - DNA, 3381 bp, Homo sapiens
agaggaggaggaccggtcgtcgctgctgctgctgtcgccgcccgcggccaccgcctctcagacccagcagatcccaggcgggtccctggggtctgtgctgctgccagccgccaggttcgatgcccgggaggcggcggccgcggcggcggcggcgggggtgctgtacggaggggacgatgcccagggcatgatggcggcgatgctgtcccacgcctacggccccggcggttgtggggcggcggcggccgccctgaacggggagcaggcggccctgctccggagaaagagcgtcaacaccaccgagtgcgtcccggtgcccagctccgagcacgtcgccgagatcgtcggccgccagggttgtaaaattaaagcactgagagccaagacaaacacgtatatcaagactcctgttcgtggtgaagagcccatttttgttgtcactggaaggaaagaagatgttgccatggccaaaagagagatcctctcagctgcagagcacttctccatgattcgtgcatctcgaaacaaaaatgggcctgccctgggaggattatcatgtagtcctaatctgcccggtcaaaccaccgtccaagtcagggtcccttatcgtgtggtaggattagtggttggacccaaaggagcaactattaaaagaattcagcagcagacccacacctacatagtaactccgagcagagataaggaacctgtctttgaagtgacagggatgcctgaaaatgttgaccgagcacgggaagaaatagaaatgcatattgccatgcgtacaggaaactatatagagctcaatgaagagaatgatttccattacaatggtaccgatgtaagctttgaaggtggcactcttggctctgcgtggctctcctccaatcctgttcctcctagccgcgcaagaatgatatccaattatcgaaatgatagttccagttctctaggaagtggctctacagattcctactttggaagcaataggctggctgactttagtccaacaagcccatttagcacaggaaacttctggtttggagatacactaccatctgtaggctcagaagacctagcagttgactctcctgcctttgactctttaccaacatctgctcaaactatctggactccatttgaaccagttaacccactctctggctttgggagtgatccttctggtaacatgaagactcagcgcagaggaagtcagccatctactcctcgtctgtctcctacatttcctgagagcatagaacatccacttgctcggagggttaggagcgacccacctagtacaggcaaccatgttggccttccaatatatatccctgctttttctaatggtaccaatagttactcctcttccaatggtggttccacctctagctcacctccagaatcaagacgaaagcatgactgtgtgatttgctttgagaatgaggttattgctgccctagttccatgtggccacaacctcttctgcatggaatgtgccaacaagatctgtgaaaagagaacgccatcatgtccagtttgccagacagctgttactcaggcaatccaaattcactcttaactatatatatatacataaatactatatctctatatggactcgtaaaggcatgggtataatggtaccccccagtaaacttcctaatgatttcttatgactgttatcaggctttattgggattaggctaaagttgttagtaaacttataaaaggctgctatggtaacactaaacctaagtggtctcttgtctattagtttggtttgaattattagtactatcctgtagacccagagacatagtttatataagaattgctaaagctgaagttcaacttggctgagtgaagataatcataggttgtgtgagcctatgaaaaagtgtatacgtctaagatttcaaaacaatgggtcccaaagcctaaccactttaagagtttatggagggtacttggcattacagacgattcatacacttccagtgctgccttctttacactgccagttttgacaaaacaggtttgttttttattttacaacaacatatgcctaattctgcaggattgcaagtaactttttaatgcattgtgattacttattggtaatgatagggctgatggcagtttactagatcactggttataatttgggacaaaaactgctacatcaactttcatctcgcccagagtgctcaaggctggtatgatcagtggatcaggaatgcaattgtgaattcctgcccattgcctctcttggtgaatgtggaaatggccacctgggttttcccatatcaggaagggctttgggatggcacctatattggctgataattgaggatgcaaacattccattcattagtgtgatcgagctgttaatttttagactatagatcaaaatgtgaaacattttatgttcaatccatatttgtcttgcacattataaatatatttttattttttagtaatttaggggagggaggagggagaaagggataatgatgcccttggcataattcacaaaaacagctgtgacaacctccaatcagtttacttcatttcaaaactatttccaatcacaaggaaagatttatttaaaatatactcgtacatttcacctgtggatgtctataacttcatcctcagtatgttcccaaatctgtgctggcattgaaaggacaaaacattatactagtgggtttttctactaattattttttgaagcattattttcccaacacaaaagagcttttttctcggtataatgaaaattgaaatcctatgtgtattcaatagtaaatagacaaattttattttttatttccacttgaagagttacatttcgtataaaagtttacaaataacggtttttattttgattttttcagtataaaaaaagttgccttgatggcatattatgatgtaatgctaattgcttgtaggatagtaaatggtcagtattgaaacctaatctctagctgccgtcttgtagatatgaacgaatgttcaccaagcatgtattttgtattttgttgcattgtacactgcaactaataagccaaggaatcgacatatattaggtgcgtgtactgtttctaaaaaccacaaactaagaatgataaattatcaatatagtttagtatttgctaattttactacactcttttgttatgtatatgtagggaagtcatagggattataaattcaatttgagtaaaatttaaaaccatatattttatgataaagggcctttaacttaagatggccaaagcactgatattatatatttgctgtaaagagaattataagagttttatttttctgatattaaaagttacttaataaagacttgtttccattaacttg

SEQ ID NO: 1124 - DNA, 2625 bp, Homo sapiens
agtgcccccgccctgccctggcctccacagccttcgggagctcccagacccagtgctgagtgaggaggtggtggagggcattgctgctggcattgaggcagccctctgggacctgacacaaggcaccaatggccggtacaagaccaagtatcgcagcctgctgttcaacctgcgggaccccaggaacctggtgagcagggctttgggctgggctgcgtcccctctctgaatctcagagcccctgcaggatgctagggtgggggagctctttcagcgtgtggtgcagccctgccccctgcccccaccaggacttgtttctcaaagtggttcatggagatgtcaccccctacgacctggtgcggatgagctcgatgcagctggccccccaggagctggcccgctggcgggaccaggaggagaaaaggggcctgaatatcattgagcagcaacagaaggagccgtgcagacttccagcctccaaaatgacccacaagggcgaagtggagattcagcgggacatggaccagacactgaccctggaggatctggtggttaagttggagcctgacctggtgctgggcagagcccatgcctgggggtcccacgcctcgcctcaccagcagtgtggtcttgggcatgtcacctgactgctctgaggcccaccttgtttgtgataaaacggggacagcgatccttaacgcataggggaacatggggtgggacagtgctgctggcacaggcctgccagcgccttgtcactgtcggtcctcctccttttggcctcaccccaaggcccccacatgagtggtattaagtcccatcatcatagtcatccccaacctggcattctgcccagatctctgctgggaagcagcaggctgcgctgttccaggcagtgactttttcagatggaaggaacgaagacccactgtattcagtggattggtttagggatgctccaggcagggaaccacccggcaccctggcagtccatccagagggcctcctggaacttgtcctcagacctgggaagccaacgggagtgacaatagtctagggctcttggcgctgaggatctgctccatcctcatgtccatcctgctccttcctctcccttggccctggcttgcacatagcctgacatggtggctcagcagccccagaatccatggagccatcatctcagactcctgcagttgattagaactttcccttggcttccttcggtcactctcagaaggccactctggctgtagttgaatgttctgtgggtcagatgttcaccagggtctcatcagctgcctgttcaggagaggggtgcagggcaggtccctttaactatattcagtcagtcagtatatttatggggcacctaccaggtgccaggcacggttctaggcactggggaagtgacagtgaacgacagaaatccctgctccccactcctaccactaatattcaggccaacgactgggagaacctctacctgtgccaagaggatccctaaggggtgtggctgctcctcagtctaaatcagtttgtattccctgaacaaactgaatggcaatgtaggagaaagacctagatagccccagagaggaagagagagaggaggtgggaggggaggggaggggaggggaaaataacacatgatagctatctttactgtttattgaacacctactgtgtgcaccttttacaagcagtgtctcattcacatctcacaatggcctaggaggttggtgctattccctgcccatttctgggatgaggaacctggcaccaaggtcacatatgtgcagtggggaagctgagatttgaacccaggctggctgactccaaagcctgtgctttgagactgttctggaggtggctgataagagtagagtttcaaaatctctttaaaccttcctaaagcaatgattgttttatgtttaaagctatttctagtatgaggaaaaaaagtgatttggcaatagacgtcaagagtctttaaaatgttccttctccctgattctgtcatctgcttctgaaatcttgtcctaaggacataatttaaagtttaggaaactactttctgcacaaaaaatgtcctcagtgctatttagtaatagtgaaaacctggaaatgacctaaatgtatagcaacagaggtgagacgtccactccagtctcaccccatcacagcagtgtctacggggactatatgatgtgacaaatgcctctgctattattagtgaacaaaaagagaacaccaagttgaatatatgatcccagctgtttcaggaaaaggacccccaaaccctgtgtatagaaaaagattataaagggctgggcacggtggcccacacctttaatcccagcactttgggaggccgaggcgtgtggatcatgaggtcaagagatggagaccatcctggccaaccaacatagtaaaaccccgtctctactaaaaatacaaaaattagctgggcatagtggcacacgcctatagctactcaggaggctgaggcagaagaatcgcttgaaccggggaggtggaggttgcagtgagccgagatcgagccactgcactccagcccaggcaacagagcaagactctgtctcaaaaaacaaacaaacaaac

SEQ ID NO: 1125 - DNA, 3010 bp, Homo sapiens
actctcgctcggctccccctcctgccatcttccgttgcaaagcatttctgggagctgcatgtgggtgacgcagcagcattgttcgcaggcacaggaagccgcggctgagctgaagggctcgagaaggagcccagagcgctgcacgctgctccctctgggtagtctgaagggtcagagctggactgccctgccctatgtgctctgggagattccagaatattcaagtaaatccggattttcccagaggcagaatatctaactccttcaggagaacttccagtacagaaaacaaaacaaagacgctggggaaacttcaccaagagcctcggcagctccagagcgacgggaaacgaaaggtcagggggtcgatcggcaaaccctttctggtttggggtgcgtgtaactatagggacttttgtctcagtgaagaggcaggagaaactgcctgccgggcgagtccaggacaatgctatgttacttcgtgttgcttgagccgtcattgcacttgttccctcacctggtgggatgtgcttttgaattgggttggttggcttttgagaatcctttccctctctgcccaggcaccttctgttctctttcccttcctgtgatctgtagggtgtgggcttgtgtttaaatgttctcccgaatgcctggagccgagataggcgtcagcctttcccgcactccacccccgctctcctatcccaaaccccctttagtgaagggtggtggcttctttatatggtttcttgtagggcctcagctggagtctgccttttttgatgaaagcagggcgtgcttggttgaatggccccagcaaaataaggcttggaaggaaatctgcatttccctccacacccacacataccccagtaactgagtcttgtatgtgtgaacagctgccaccccccacacacacaccgacacagttttccgcctacccttccctattccccacaaaaatcttgcaggtagaattagactgcttttggtgaacagttaagttccttttctactcttgaacaatcgcagatcttactgtgcagtctgttttgctgaaagtggaaagtccccgtttgtggacagctcagttcacttcagcagaggaaatgggcagagtcctactcttcgtcagtgcgaagtgggggaggggagccatgcactccctagcacacattttgaatggacctgaatttttcaccctagggagattaggagcccataccagagccttgtcccacgtggcaccacaccccgcctcttcacccccacgctgtatggtactaacagaaaaggatgccatagcaacttgaagtaaataaaacatccgcagatgaaatgagtttgggggaaggtgagaggcatctggagacttggcaaaaggggatcttagtagaggagcttcttggctatgagtgaaagggtctttctgagacccaactttgggatttggagcaggatccttaggttaagaatgaaaatacataaaagtcctggtctccgggacagagcacacaggattatgagaaaaattattagcaatggcccagacttgctaacctgtccaggatcagagtttagtgtttgccgaaacagttaccatcctgtacatacatacctagggtagccagaaaaggaatcatgtaacttgtctcccagatttattttgctgttggtgttgctttagggctcataaggtcagaagaagaaggattccattatactagaagatttgggtttcaggagtttctgtctaaaacgaaaagatttggccaggtgcagtggctcatgcctgtaatcccagcactttgggaggccgaggcaagcggatcacctgaggtcaggagttcgagaccagcctggccaacatggtgaaactccgtctctactaaaaatacaaaaattagctgggtatggtggcaggtgcctgtaatcccagctactcaggaggctgaggcaggagaatagcttgaacacgggaggcgaggcggaggttgcagtgagccgagatagcgccactgcactccagcctgagcaacagagtgagactccatctaaaaaataaaaattaaaaaaaatatatttgtttcaaaataacagtcaaccagtgtgattcacttaagtggcattttctcactgtagcattgttcgtaagtcatttaaattttattggtaatgccatgagaacttttgcccctaagattgttcctttcccccatttagaggaataaaggcaaatagcagactctgtgggtgtgtgtatgtgtgtgtgtgtgtgtgtgtgtgagagagagagagaaagaaagagatttgagattgagatttctgtaatcagccttagaagaaaagagccctgggttgaatctgcacattaggctgtaccattcatctcattaattctgtattagcaaatcatttttatgccacttggttcacatctgagaaatgaaggcaattacctgataatattcactaactggtgtagaaaagtgaagaagcaataataaagttttactgtcatatgtagaactgtatgagaagtaacacttgtcgccacagtaagttagttgtttcagtgtgttagtataattagtacacaagtaagggattgggaacaaaggtgagtttgaagtcctttctgctcccccaccaccaccatccgcccccagtagagatgggtcttgctgtgtttcccaggctggtctcaaactcctggctcaagtgatcctcccacctctcacacctgtaatcccagcactttgggaggcccaggcaggtggatcacctgaggtcaggagttcaagaccagcctggccaacatggtgaaacaccgtctgtaccaaaaatacaaaaattaagccaggcgtggtggcatgcgcctataatcccagctacttgcaaggctggggcaggagaatcacttgaacccaggaggcagaggttgcagtgagccgagatcgcaccattgcacttcagcctgggggacaagagcgaaactgtctcaaag

SEQ ID NO: 1126 - DNA, 3069 bp, Homo sapiens
ataggccgggcgcgctcagcgccccgctcgcattgttcgggcgactctcggagcgcgcacagtcggctcgcagcgcggcactacagcggccccggcccggcccccgcccggccccggcgcaggcagttcagattaaagaagctaattgatcaagaaatcaagtttcaggaggaagagcagaaggcaaccagactagagaaggaactgcaaacgcagaccacaaagtttcaccaagaccaagacacaattatggcgaagctcaccaatgaggacagtcaaaatcgccagcttcaacaaaagctggcagcactcagccggcagattgatgagttagaagagacaaacaggtctttacgaaaagcagaagaggagctgcaagatataaaagaaaaaatcagtaagggagaatatggaaacgctggtatcatggctgaagtggaagagctcaggaaacgtgtgctagatatggaagggaaagatgaagagctcataaaaatggaggagcagtgcagagatctcaataagaggcttgaaagggagacgttacagagtaaagactttaaactagaggttgaaaaactcagtaaaagaattatggctctggaaaagttagaagacgctttcaacaaaagcaaacaagaatgctactctctgaaatgcaatttagaaaaagaaaggatgaccacaaagcagttgtctcaagaactggagagtttaaaagtaaggatcaaagagctagaagccattgaaagtcggctagaaaagacagaattcactctaaaagaggatttaactaaactgaaaacattaactgtgatgtttgtagatgaacggaaaacaatgagtgaaaaattaaagaaaactgaagataaattacaagctgcttcttctcagcttcaagtggagcaaaataaagtaacaacagttactgagaagttaattgaggaaactaaaagggcgctcaagtccaaaaccgatgtagaagaaaagatgtacagcgtaaccaaggagagagatgatttaaaaaacaaattgaaagcggaagaagagaaaggaaatgatctcctgtcaagagttaatatgttgaaaaataggcttcaatcattggaagcaattgagaaagatttcctaaaaaacaaattaaatcaagactctgggaaatccacaacagcattacaccaagaaaacaataagattaaggagctctctcaagaagtggaaagactgaaactgaagctaaaggacatgaaagccattgaggatgacctcatgaaaacagaagatgaatatgagactctagaacgaaggtatgctaatgaacgagacaaagctcaatttttatctaaagagctagaacatgttaaaatggaacttgctaagtacaagttagcagaaaagacagagaccagccatgaacaatggcttttcaaaaggcttcaagaagaagaagctaagtcagggcacctctcaagagaagtggatgcattaaaagagaaaattcatgaatacatggcaactgaagacctaatatgtcacctccagggagatcactcagtcctgcaaaaaaaactaaatcaacaagaaaacaggaacagagatttaggaagagagattgaaaacctcactaaggagttagagaggtaccggcatttcagtaagagcctcaggcctagtctcaatggaagaagaatttccgatcctcaagtattttctaaagaagttcagacagaagcagtagacaatgaaccacctgattacaagagcctcattcctctggaacgtgcagtcatcaatggtcagttatatgaggagagtgagaatcaagacgaggaccctaatgatgagggatccgtgctgtccttcaaatgcagccagtctactccatgtcctgttaacagaaagctatggattccctggatgaaatccaaggagggccatcttcagaatggaaaaatgcaaactagacccaatgccaactttgtgcaacctggagatctagtcctaagccacacacctgggcagccacttcatataaaggttactccagaccatgtacaaaacacagccactcttgaaatcacaagtccaaccacagagagtcctcactcttacacgagtactgcagtgataccgaactgtggcacgccaaagcaaaggataaccatcctccaaaacgcctccataacaccagtaaagtccaaaacctctaccgaagacctcatgaatttagaacaaggcatgtccccaattaccatggcaacctttgccagagcacagaccccagagtcttgtggttctctaactccagaaaggacaatgtcccctattcaggttttggctgtgactggttcagctagctctcctgagcagggacgctccccagaaccaacagaaatcagtgccaagcatgcgatattcagagtctccccagaccggcagtcatcatggcagtttcagcgttcaaacagcaatagctcaagtgtgataactactgaggataataaaatccacattcacttaggaagtccttacatgcaagctgtagccagccctgtgagacctgccagcccttcagcaccactgcaggataaccgaactcaaggcttaattaacggggcactaaacaaaacaaccaataaagtcaccagcagtattactatcacaccaacagccacacctcttcctcgacaatcacaaattacagtaagtaatatatataactgaccacgctcaccctcatccagtccatactgatatttttgcaaggaactcaatccttttttaatcatccctccatatcccccaagactgactgaactcgtactttgggaaggtttgtgcatgaactatacaagagtatctgaaactaactgttgcctgcatagtcatatcgagtgtgcacttactgtatatcttttcatttacatacttgtatggaaaatatttggtctgcacttgtataaatacatctttatgtatttcattttccataactcactttaatttgactgcaacttgtcttggtgaaatactttaacattataaaacagtaaataatttgttattttt

SEQ ID NO: 1127 - DNA, 3072 bp, Homo sapiens
gcgctcaccttgaggccgcggatctcgccgaggtgcagctgcaggcggcggttcacctcgcggatgaggttgctgtggtccagcatcgcgctcaccttctccgcctcggcgcgccgcaggctgcggatcagctcctccttgctccactgcagcagctcctcgtccgacactttggacaggtcctccaccggcgcgggcggggccgcggacgagccggccggggctgaggaacaactttccgccgccgccgcagccgccgccgcgcctccggccgccttcgacatggtactatggcagaaatggccagggaagggtttatctaaccaccaggagtacgcaaagaagagaggtccagccagcctgcctctcagattgttaagatgccaggtgtcttttggctcatggaaacagctgttctgccccctcccgaaccctagactcacagctacactctatggggaaaggacaaagggaaggctgcttcctgaagagatctccatatggaagagctgcagatcacaaacaacccacacagccattgtaacgcctgcttgcctggtcacttgtgtttctgagaagccataactccaagaatagcgaagggaagaaaatgccaaaaagcaggggctgcctaacaggtctgacttgcaaggcaaactcctggcaggcctggccagcttctgcttgtcccagtgcaatcccacccccataggatctggaatttttcagtccctttgctaagattcctgaaatagacttaatgaagagcctcagaagtgaaaattcctcttcacacatttgctcaagaagattgcttttctcctaacacagaaatcagctgccttgaggatgtgcaagttagattagggagtctgctcttgcctatttctcaaacagttcaggccctgacagaatcagtgtcacccctaaggtatgtgcttcaaatgccccccatataatcaaaacttataaatgataaaccaaaagttgaggtacactcattgcctttcagaatgaaaccttccaaggggccatgatcatattgtgactggacaagaactatcatggatgaggcacatcatcttttggaaccatctatggaacagatattattattccattttgcggaagaggaatctgaggctcaggccagacagatgcagctaacgttgagtggcatcctgatgatcaccttcatcacaaaaggaaggagtgctctgaggactgtaggtggctctcagaaccctgacctccacggcagccatcaaggagtggcaaagggggtccacagtggcatatgcagtgagatccaagttttaggcattcggagtagagcaagccacgaatgagaacaggttctgaaagtgacagaaaaggagtcacttttttggttccatatgaactttaaggtagttttttcccaattctgtgaagaaagtcattggtagcttgatggggatggcattgaatctataaattaccttggacagtatggccattttcatgatattgattcttcctacccatgagcatggaatgttcttccatttgtatcctcttttatttccttgagcagtggtttgtagttatccttgaagaggttcttcacatcccttgtaagttggattcctaggtattttattctctttgaagcaattgtgaatgggagttcactcatgatttggctctctgtttgtctgttgttagtgtataagaatgcttgtgatttttgtacattgattttgtatcctgagactttgctgaagttgcttatcagcttaaggagattttgggctgagacaatggggttttctagatatacaatcatgtcatctgcaaacagggacaatttgacttcctcttttcctaattgaataccctttatttccttgtcctgcctaattgccctggccagaacttccaacactatgttgaataggagtggtgaaagaggacatccctgtcttgtgccagttttcacagggaatgcttccagtttttgcccattcagtatgatattggctgtgggtttgtcatagatagctcttattattttgacatacgtcccatcaatacctaatttattgagagtttttagcatgaagcgttgttgaattttgtcaaaggccttttctgcatctattgagataatcatgtggtttttgtctttggttctgtttatatgctggattacatttattgatttgtgtatattgaaccagccttgcatcccagggatgaagcccacttgatcatggtggataagctttttgatgtgctgctggattcggtttgccagtattttattgaggatttttgcatcaatgttcatcagggatattggtcgaaaattctctttttttggttgtatctctgcccggctttggtatcaggatgatgctggcctcataaaatgagttagggagtattccctctttttctattgattggaatatcaccaagtccatcctaagccaaaagaacaaagctggaggcatcacactacctgacttcaaactatactacaaggctacagtaaccaaaacagcatggtactggtaccaaaacagagatatagatcaatggaacagaacagagccctcagaaataacaccgcatatctacaattatctgatctttgacaaacctgacaaaaacaagcaatggggaaaggattccctatttaataaatggtgctgggaaaactggctagccatatgtagaaagctgaaactggatcccttccttacaccttatacaaaaatcaattcaagatggattaaagacttaaacgttagacctaaaaccataaaaaccctagaagaaaacctaggcattaccattcaggacataggcataggcaaggacttcatgtctaaaacaccaaaatcagtggcaacaaaagccaaaattgacaaacgggatctaattaagctaaagagcctctgcacagcaaaagaaactaccatcagagtgaacaggcaacctacaaaatgggagaaaattttcgcaacctactcatctgacaaagggctaatatccagaatctacaatgaactcaaacaaatttac

SEQ ID NO: 1128 - DNA, 2486 bp, Homo sapiens
ttgtgcggggctggggctttcctctcagtctctccacaaaggccgcgaatttgtctctaaatggtacatggcgatctgcctgtctttagtgacccccctgaaatcctaccagggaggcctgagtgccttcattagggaatatgaagggacccctggtctgggctggggatttggggggctccttctgcatcctctccctcaccctactgctctcagtggtgtctgccctggaaccgaaggcagtgtggcctggtgggcagagctgcccacagccaggctctcagtgttccagccctcaatgtcctgtccgcacatgggaatatgagggggcgcatcacagggttgtggggatgaagcgagggcctgggggtggagtgctcagcaacgtgaattgtcattgttgctgtcatcagctaaggggctattattgtccaggcctctaaggacctacctgggtggtgtgagaagcaggagagagaacagagccctgagccccagcctgggagggccagcgccaggccactgtgtttccacggctccacccacaggcccgggtgcctcgtctgggctggacgagaatctccctgtcctgatggcagccccacctacccctaaatcagatgctcagtcagtgcggttcagggacttttcctgaactcccagctggccttcctgggcctcccagggccgggagcccgtgggatggctgtgtcaggccgggagtctgtgggtttaggggagctagctccggctgccttccacctccaccaagtaccgaaggagaaagggcttcagaccctgggagaatttcccagcaggaccctttgaagtctctaagaacaggaccagggcccgagtccaaggacagcttgagggtttagcagcctggaggccagggcaggggcaataggctcagaaatgccccagctctgatgatgatgataatatcatcatatgaaggccactctctggcaggcctcctgggatttctggctctcacagtaatcctgaggccttattattcccattgtccagaaaagttgtgtttgcagaggtcccctgggggtctggacgccttgctgtgggttcctgctctcccctgtgggccctggaggggcactgtcctgggagttccagtcctgtgggttggcggggagggggagggagaaggaagggagggagtagggagaaagggaaggggagccagataaaatacaggacacccagttaaattagaatttcagacaaacaacaaatacttttccaatagaagtatatgtcctatgcaaaatttggggcatacaataaaagtatattcagtgtttatctgaattcggtttaacttggcagtcctgtattttcatttgctgtatctagcacccttgggaggggagagagggatggagggagtaggcaaaaggaaggggaaaagagggagaagagactaaggatggggagggcggcatgggcggagagtgaccagacgctgctgaccctccctctgggccgtgtgcagagtacaaggaatgcttctccctgtatgacaagcagcagagggggaagataaaagccaccgacctcatggtggccatgaggtgcctgggggccagcccgacgccaggggaggtgcagcggcacctgcagacccacgggataggtgagtggtggtgggaacaacggggagaggggaggggcccagcaggtgggtgcagacagtagaggtgtgaaaagctcagcagtttgaggggcaggtggcagggaggcctcctggggatccagctgtggcagccccagaccaggagtgccgtacctcacttgggcttcctggaatcctcatagcaaccagtgataccccatctcacagacctcgggatctaggcgttccaacagacttaccaaacccagagaaaaatcgcgctgacagcgatcccatgttgctttataggaacatttccctttgttgagtatttgtcatgtgcttagctccaaaaaccctatgaagtaggcattctcctaaccttttttttttgaggggggacagagtcttgctctgtcaccgagaagctgacgtgcagtggtgagatctcggctcactgcaacctctgcctcccgggttcgggtgattctcctgcctcagcctcccaagtagctgggattacaggtgcctgccaccacgcctagctaatttttgcatttttagtggagatggggttttgccatgttggccgggctggtcttgaactcctgacctcgggtgatctgcctgcctcggcctcccaaagtgctggggttagaggcctgagccactgcgcccagctttctcctaactccattttacaagcaaagatcaaggtttacatccattaagttcttgagccaatgatggcatcaggattagtacccaattcttctgatatcaaagactgacctaaaaactatgcaatagtttttagaaaaactattgctagaaaaaaaaaaaaaaaaag

SEQ ID NO: 1129 - DNA, 2401 bp, Homo sapiens
ttttttttttgggagccagcggtatggcgtcgggctgcaagattggctcgtccatcctcaacagcgacctggccaatttaggggccgagtgcctccggatgctagactctggggccgattatctgcacctggacgtaatggacgggcattttgttcccaacatcacctttggtcaccctttctttgacatgcacatgatggtgtccaagccagaacagtgggtaaagccaatggctgtagcaggagccaatcagtacacctttcatctcgaggctactgagaacccaggggctttgattaaagacattcgggagaatgggatgaagtcttgctctgtcacccaggctgaagtgcagtggcacagtcagggcccattgcaggttggccttgccatcaaaccaggaacctcagttcactggttgaggacccagttcccatctttggatatagaggtcgatggtggagtaggtcctgacactgtccataaatgtgcagaggcaggagctaacatgattgtgtctggcagtgctattatgaggagtgaagaccccagatctgtgatcaatctattaagaaatgtttgctcagaagctgctcagaaacgttctcttgatcggtgaaaccataaggagcccagtgttcctgttcatgaaatctcccttttactggaaaacaggaatattgactaccaaatcacaatgcaattgaagccgtactgcttttttgagcagttattcattccagtgattaaaactgattgtgcagaatattctaagaggtcagaaattggtgtgtataactacatttttagtgatgcaatttattgattagtgagtaagatactgtttttattgagagatttgatttttataaagtaaaaatacggctgcattagggttacaaacagaaaagtgtcttaatgtctaaggagggcatattagctacactacaaaaacaaattttgtctgtacttctgaaaagaattttgttgtttctcagctgttttccaaaagcaaaggaagtctttatggtttttttctatttcatgttattgtgatttgtttataagtttgggtggggtgcataccatattcttggttcttaaaatctatcacttttcaccttatacttgatgtgtgaaaactataaaaacaatgtgtgaaacccaggggttctaaaatacaagcatagattttatcagggtgttttgtcaaagcaggttattcagtgattcctccccaccattcttaagaacgttaaataatgctgttgtgttagctctgagtagaaaggaaaaagtaaaacctctgtttggaggtaatattgggttgaattctgactgcccctttctagctggacctttaacaaatcacccaatcttttttgtgtttctctaaagtcatttatacattaaatgtaattatagcaactgtggggttctgttgagaattaagagctaacactatatatgtaaagtttccagtactagtcccagaatttagaatatgctcaacacaaagtaaacagcattatataagtttatatttttgtgagttataaagtactttgatatattctcattaaatctgtaaatcacctctataagtaagtggtaataataaagcagatatttttgtccccatttaaaaaatgaagaaattaatgcttaatagggtggtaccctggaaaggatctgggaagtggtagaatttctggtctgtacttttacaaatggagcccttgggaggtgggttaggtaaaagaagctttttacttaacgttgtcttatttccagtctaattttacgctgtagcagaaccagatggctgagaaaattctggaactatggatcttgaccccaaggatatattattttattccaagaaagatcaggtaggcgaaaagatgacaggatacagagtcaatccataaactaaatatttataactgttctgaattatacagagtctaaaaatatgtgtcagctacttcattcctgtaaatactcttgctgtgttataaatatggcaagaaataaacatgaccaatatcaatagacttcttgaggctactataagttttgagaaataaggttcaaaaaataagaatgctaacacttaagcacagactagagcttgcttgggtttcttcctgcattacaaggtaaaaatttgttaatgtttgtttttattcagcttgggaaagctttgtgccatgaatacgtcgcatttaataacaagcaacacacggcatatagaaataactttaattaaaaaacttacatagaagattataatatcagacgtgacaaagatttgagtttatttgcctggacaacttgggtttgtctggcttttgttttctttttctttaaaaataaatgtacagtaaaactacaagc

SEQ ID NO: 1130 - DNA, 2517 bp, Homo sapiens
actgttttgattcctgatgctgcacatctgccacgtttctgcacagagctaccagcccgggcagacactgaggaccctcctcgcgcactggagctgtggcctcggcagctgtgggaatgcggacaggaagcaggggaccctggaggcgagaggaggaggacatcctgcggggatagataaaaaataacggccgggctgtgggaacctcttccgagcaaacatgtgagcccaggaatttcctgagccagagatctgactccggttatttgttgtaactgattatttgttttcctggagattttgcataattttgacaaagggaaagaagatataaagccaagacatgcatgactgcccttctgaagcctctgctcacagagcagagggataggaggctgtgattcagattatggggcctgcaggctggggagggcgaccctgcaggggcccaggagcaggcagagtgtgccccacagacccctccctggggcagagggacagcagattactgggcccgagacgcattaggtggcacatgctggttccctctgtccagcgagcctctcccccagcatcatccagccctgggcctccagcaggcagaggagatcatgaccaggaagcaattcatcaccatccaaggccttagcagactctggctttcctttgaatttccaagaaaactgctccataatttttatcaagacttatcatttgcccatctcaccctacacactagaattttaagcgatgaagtacatgtggagacttactttgtagtcttttaagataatgaccaaatgaacatttctggcctcactcagcatctgctctgacacgggtttaaggggctgccgcggccaggaagaggtgggcctggtcctgtcggtggatgcgcattctgcttcccttaggcggggctgggcatgctgggacctcccctgtgaggggacagcggaactcgcagggcagacccatgtccctggtgtcttccttctgatgggccttcccctcatgtcgggatccaccttacagggcatctggcctggtgtctgcacatagtgaaacatggctgagtgtcccttgcattaaatgcatgtccttgggatcgcggtttccctctcctctcccttgtctttcccaagaaaccctccaccctgacgacaccccactaatatctccatgtggccaattcctcacagggtcaaatatgctgggccaccccctctgaggccgcagctgcatctcaggtttgcattctcaccacggccgttctactgatgggagcttcatttctatttgctcgaggtattacacctattttatttttctttaatgaaatcctcctcacttccatcacctcagtgcacccctctcttcagagctttccttctctcccctcctccctccccatctttcttccttcctgtccccaaagaccaggccatggtgccctcgaaggacacaacagagccccatgtggactgggaagctggccctggcccagggcccctccagcacagcctttccccaactggccttaggcaagtgccctgcagtgtctatctgcagccatctctgcctcatgtgtttacaaattcaccttctgctgtggatccctgtcaaccgcaggtccgcccaacacatttcgccctggatctcactgggtggacgtgaatatccacctgcacgacagtaaaggaaaaaggacaagatggagttgtgggggcagggggtggttcttcccataaaaacacagaagcatcacaagaataatatttgttaaaagcctccaggatttggtgccgaacatctctcaaggcatctcctgatttcccagagctgatggaaatattctgaaggtattaatagaatgcagatgttggagaatgcgacttagaatcctactgaacaaatgaccctgttgggaggcagtttgcagtctccagggacattccacagagggcccagctgattgtctcatattgaaacagcatgtcccagcattccagctagaagaagcggaacagggctcctccaccagatataaatcacaaggcaaagggcaactgaactccttcagtcctgccctccctccttccttggttcaccctccaccccctcccccgctcccgccccccaaggaaaacaaagcttgagtaagaggctgccaagccaagccacgcaggcgccagacggccgagcgcggcacacacgacggccgtttgggaggctcacagctttcggcactgtggccctgatgtttttgcttcactgcaatttgtttctgatctccagtcaagtccttacaacgctgggatcctctagagagtttatactttgacctcgtgacaattaacaccagaggccaagaaaaaaaaaaaaaactcgataagagagaaactcaattggtgggaggtggagggtgggaggacgggcgggggcctattactaaagtaaatgcgttacttgtgaaattatttcccatccaataaaaagaatgcagtgtctttaaag

SEQ ID NO: 1131 - DNA, 2469 bp, Homo sapiens
aggctgcctgggagcccagcccgggcagggcgaactttccagcgagggttggtctcaaactcctgggctcatgcaatcttcctgcctcggcctcccaatgtgctggaattacaggtatgagctaccgcgctcagcccaaacccagggctcttaaccaccctactatgtactgtgctggcccccggtcaagggagagaactcacgtcaggcaaaaatgttttacagagaggcagctaagtcttttccacagtggatgacacagtccccctcacaaaccaccccacagatccaaccccaaggaactctgcttctacgtgtgcccttggggcaagggatgcaaagcaccaggcgatggagctcagaggatggcactcttccagagagctgtgtgtctctgggaaagctaacacacctctctgagcctgttgctacagctttaccatcagcgatgtgactgcaagccttctcagctgcctgtcagcagatgcacaggcctgtgcacagagctctgcggagaccacgccgacatcgccgcacacccaccctcctgctcatgggacagaccattcacacctgcttcaccaccagccacaggcttgtcggaaggagcagactcttctccacggacaagccactgcccctttgagggcctcagcttccttaccctatgagatgaggaaacagatcttcacttcccacaggacttggggggatgaaaaggtaacctccataaagctgcccctggtgtggggaagccaccccatagatgacattgcccgccctccccctaggcccagagctctacagagtcctcaagctggtgtccctccaggctaaaacacttccaccccctgggcagtgcactacagggtggtggggaaggggccatctgtggaagaaacacagggcctggcctggggtcctgggcaagacctctgtgacctcagtttccccagatccctccaggtgtgaccttgtagatggcctctattctggattcacagctgctgaggaggaggaagaggacactgaaggcattccttcagtcccctggggaggttcagatgctcagactccctgacaccacctttcctgggcagaataaagtccccaagatgtccaagccctaatccctggagcctgggaaagtgttacctcccagaccaaagggactttgtaggtgtgtgattgagttgaagatctgcagtgagagggtagcctggattagccacgtgtgcccaaaagcagagactccttcccagccgtggtcagagacagaacaaggggacgctgctggctttaaagacggaagaagggacgaggagccaaggagtgcaagtgccgccagaggccagaaaaggcaagggatggatttttcccctggagttccaggaggaaccagccctgccaacacctggattttagttctgggaccccacctcagacatctgacccccttgactgtaaggtaataaatgtgcgttgcttaagccactgagtcagccataagttgttacatggctgccacaggaaactaacaggccctcccctctggccccaacatgcccagctgcctgtgaaggggaagaaggatggcacaaggcacggccctcatcgatgtgttcacacaccttgctcccctactgagctggccctggggctgcagacctgatccctgctctcaggagccttcgccagctgagagacgcccgcagagcctcccctccactgcggaggctcgaaccttccctcctgctgctgctgccccatcctctcctcttcctcctgctgctgtttgttgagtgctccctgtgagtaggcaccaggctagtgtcctcctcccaaccccagcctcataggctcagcggtcaggccacccgagcagtcacattgtagacccctgaatcctgcccatggtttggcaggacaaagggccttttctgcttcagagtcacaaatgtgtcctcctcacaataagggtggcatggaggtccctgggccagtgcctcagcctattgagcctggggtccttgtctgtacagggggatgaaggtagcacctcacagatggcgataaacccagccagtgcagggcaggcagtcagcgctccaaactcgcttcaagtctttgcctatgctgccaatcaagtcagctgtgggaagagtcaggtttttctcttgaaagtcagggccgggcacggtggctcatgcctgtaatcccagcactttgggaggctgaggtgggtagatcacaaggtcaggagaccgagaccatcctggctaacacagtgaaaccctgtctctactaaaaatacaaaaaattagccgggcatggtggcacgcacctgtagtcccacctacttgggaggctgaggcaggagaatcacttgaacctgggaggcagaggtttgcagtgaaccgagatcacgccactgcactccagccctggacgacagtgagactctatctc

SEQ ID NO: 1132 - DNA, 2557 bp, Homo sapiens
gtctggtggcccgacccgcgccgcccgcggctcccttatgtctctcgccgtctccagcctcagtccctctctgtctctctctcagtctctctccctgtcctccccggccgctcctccgagatgacgccggggtcggtgccccgggcctgccctatcccctggctccagggctaggcgggaccgagggctgccccagacagacggacccgcggacccacagaccccgcgcccaggagaggagccgcgccgcccgccgctggcagcccgtcaccatggaccctccatccctcgacacagccatccagcatgccctggcgggcctctatcctcctttcgaggccacagcacccaccgtcctgggtcaggtgttccgtctcctggactctggcttccagggggatgggctgagcttccttctggatttcctgatccctgccaagcgcctgtgtgagcaagtgcgagaagcagcctgtgctccctactcacactgcctcttcttacacgagggctggccactctgtctgagggatgaagttgtggtccacttggcacccctcaaccctctcttattgcgccagggtgacttctacctccaagtggagccccaggaggagcagtctgtctgcatcatgatcaaatgcctctccctggacctctgcacagtggacaagaagcctgttccagagccagcctaccctatacttttcacccaagaatggctggaggccatcaacagtgactttgagggaaatcccctacacaactgcttggtagcatcagaaaatgggattgcccctgtgccttggaccaagataaccagcccagagtttgtggatgacagaccccaagtagtgaatgccctctgccaagcctgggggccccttccattagaggcactggatttgagcagccctcaagagttgcaccaggccagctccccagacaaccaggtgcttcctgcccagagtttggccaagggtaagggcaggacatatgggagcaagtatccaggactcatcaaggtggagcaagcccggtgtggggaggtggctttcaggatggacgaggtggtcagccaggacttcgagggagactatgtggctctcctaggcttttcccaagagagcagaggagagtctcccagtagggaggcaggcacatccagtgggtgtacttctggggcactagaggagatagctggaactaaggaaactcccttatttcaaaagatactgcctctctcagaggccaatgaaggaccttccttgggaaatcgggcttgcacaaagccagaaagctctgaggagaggccctataatttgggcttcaggagaaaggtcaatcttaaagcacccacccacaactcagaaaggccgccccaaggctcctacatgaatgtccttgaggacgcactggactgtgcctctggtctcagggcaggtgtctcacaagagccagctgcctccaagatgcagggacctctaggaaacccagagaatatggtgcagctcaggcctggaccaagacaagcctcctctccccgcctgtccccagcttctcctgcagctgcagcctctgaaacaaagatagaggtgaagaccaaagagagaaatgggagacttcccaagcccatgccctgccctagcagaaacacctcctcccctgagccccccactcctgggctcaaattctcattcttgagagggcagaggcaaccctctgtgaccccggagaaagcctcactccagcacaatgggccctggaaagtcctgtgttccctctactctcctaaacccaaccgagccaaatctttggggaaagctggaacaactcagaccaaaacatctggcccagccactgcccccagcccactgactgaggaaaaggctgccttgccagaagcttctgcaggctccccagaaagaggccccaccctggaggaggagcccccagggcctgagcccaggattggggctctaggtgtcaaggttttccgctccaggatagcatgcctgccaggtggccgggacagggccgggcggcccctgcttctggtgtcaactacagagggggcctgggaggcaccatggtgcacagtttcagaggtcaccaagctactgtcctacctgtgtaccatccccaggcctgaagataaagccaaggggctggcggtcctgattgacgccaggagacagcccccacagcccggtctggtcagcgccctgcaggccacccaggctcaggtcccagcctctatccgggctattctcttcctgggggagaaggaggcggctctccagctgcagacattacctgacgtccaggtggaggtgctgacctcattgaaggccctcagccaccatgtggaccccagccagctgcccgcagtcctggaaggccccttcccctactgccacaccgagtgggttcatttcttccaggtgtttaccgtcacagcctttagcccctgacccccactccttctcttcttctcttcactcttctgtcccatggatccatcaaccctgctatgctaaaaaataaacggtcactcaac

SEQ ID NO: 1133 - DNA, 2390 bp, Homo sapiens
agaacgcggagagtcgccgcctggccgggcgtagacgcggtggcagagcccgcgcggcgctggaagcgagtggcggagcggcgggacctcggcggactcgccatggaggaggagggtgtgaaggaagccggtgagaagcctcggggagcacagatggtggacaaggctggctggatcaagaagagcagtgggggcctcctgggtttctggaaagaccgatatctgctcctctgccaggcccagctgctggtctatgagaatgaggatgatcagaagtgtgtggagactgtggagctgggcagctatgagaagtgccaggaccttcgtgccctcctcaagcgaaaacaccgctttatcctgctgcgatccccagggaacaaggtcagcgacatcaaattccaggcacccaccggggaggagaaggaatcctggatcaaagccctcaatgaagggattaaccgaggcaaaaacaaggctttcgatgaggtaaaggtggacaagagctgcgccctggagcatgtgacacgggaccgggtgcgagggggccagcgacgccggccaccaacgagagtccacctgaaggaggtggccagtgcagcttctgacggtcttctgcgcctggatcttgatgttccggacagtgggccaccagtgtttgcccccagcaatcatgtcagtgaagcccaacctcgggagacaccccggcccctcatgcctcctaccaagcctttcctagcacctgagaccaccagcccctcctcccacctattctgagtagctgcagaggccttgggtccaggctctaggttcatccctcagttggggggaacgtaggacccagctggagcctcttgagggagatgagaggcctctttgtgaggaggacattagctgtgtggcctctctctctttggccctgtttccttttttgcaaaacaaggacattttctgcagccccttcctctcagtgagctatgattggagggcttaggtctggaggattcaagagtggaagaggaatttaaggggtcccctagtctagtctctgcccctggatagtgtccagccttgtatatttctgaagaggtggatcccagagtggctctgatgtccacattagaaaaacttacttgtaatgatcatgtcagccttcagaagagaatccccaccaacttctgtgcctcctcagatggggatttatctggatctctgtggttccttctcagccgaaacaggtccagtatcccagtcatttcttcaaatgctgataggggtatgttggaatccgaagccacttccccgccttcaagccccagatgggctgctctcctgtaactttctaggagaagagacattttcttctttccctttcctggtccatccctgcaccctggtcctctcccagcctctcccccacattgtccctgactctaggggcacatccagtctccatcgtgctgcagcagctggactgagggcagagcctgtaggtgcagaggccctggctcccgaggtccagccactctccctggggcctctggggtgagagcagcttccgataggacctgcccagatttctgcatgtgcacttttgtttactgaaagagagaaaggggggggtcacagcaacatgccctggcctttctgctctgttccccaaccccactgaggcctgctgcacaggtcaatgccttcgttatcgttattgtactgtcactttgttcttgaggtagtagtcaaggatcaggaggggcagatgtcttctctgggctgcggggggccggagcagaggtgagcagcaatgcactggttcgggagcccccatcagcctccttgtgcaaactgggcccccatgccacagtctggctttccctccatctgccccaggacaagagcaagaaggacatcagttgcccagtcatgtgatcccctgccatcttgccttaggaacagccttcccccaccagcagccatggctggctggggctttagccaagccacctactgccaggaattggagcctcagttccctcctgtgtcaagtagctaactgcagcagctggactgagggcagagtctgtgggtgcagagaccctgcatgtaggtcacaggttgaggcccagccactctccctggggcctggtgggtaggcaagtagctctggggccacctcaagtgaccaaatgctattaatttccatcctttagcaggctgggccctaggcaggaagctggcttctgggagaggagtgagaacgtgcagggcctgcctagcttgcgtgcttgaggaaggtggcattccgtgcttgcctccttgaggagggtggcattctgtgtcttctgcttatgaagcgcctttcttaaagtttggcaataaatccatttttatgg

SEQ ID NO: 1134 - DNA, 3769 bp, Homo sapiens
gacgctcagaggattctgacaatatctttaccggagaagaggcaaagtacgctcaaagccgaagccacagctcctcctgccgcatttctttcctgcttgcgaattccaagctgttaaataagatgtgcaaagggcttgcaggtctgccggcttcttgcttgaggagtgcaaaagatatgaaacatcggctaggtttcctgctgcaaaaatctgattcctgtgaacacaattcttcccacaacaagaaggacaaagtggttatttgccagaggtaagagaaaaggccttggtgaagatgtacttagtattaactatctgatgatggggatgttctgtgagaaggaacttgtgctcctagttaagccagatttggatcaagatagcctccattttcatggagatcataactacatttgaaatttctatacatttagtgaaaaactgccctcatcaataacatattttgtcataacgatggaaaataaaatctttgccttcattcaggatcttagatttcttgccccaatttttttaccatggcattccaattattctgtttctctctattttttctagagtgagccaagaggaagtcaagaaatgggctgaatcactggaaaacctgattagtcatgaatgtgggctggcagctttcaaagctttcttgaagtctgaatatagtgaggagaatattgacttctggatcagctgtgaagagtacaagaaaatcaaatcaccatctaaactaagtcccaaggccaaaaagatctataatgaattcatctcagtccaggcaaccaaagaggtaggttttttatggatacataaaaattgtacgtatttatggagtatgtgtgatattttgatacatgcatacaatgtgataacaatcaaatcagggcaattgctatatacatatctcaaacatttattatttctacgtgttgagaacattccaaatctcctcttctagctatcttaaaatatacaataaactattgataactatatcaccctaatgtgctatcaaacactagaacctattccctctacccaactttctatctattccttctacccattagccaacctgaccaaaaaggtaagcttttatggcagagaactctctggatcttagtgaaggttcctagaatagtggagctgactatcataatcttgacaaccccaaataaatcagttttttaaaaaatctcttttatccatgtggcttaccataacctccctgcatgaatttttctgatgaatctccccaatttgttagacagaacagaagatcttgccctgctctctctaaagcagaaaggttcattctgaacctttcatactctctcacatgtgccaaggaggaccccaatgtcacttttgttttttgcttctcaaatacagagggtgcactgccacttacaagtcactacaaagcatacaggcttgcatcctcaacagggatataggtctaatgaagccttggcctttgcccctcaggtgaacctggattcttgcaccagggaagagacaagccggaacatgctagagcctacaataacctgctttgatgaggcccagaagaagattttcaacctgatggagaaggattcctaccgccgcttcctcaagtctcgattctatcttgatttggtcaacccgtccagctgtggggcagaaaagcagaaaggagccaagagttcagcagactgtgcttccctggtccctcagtgtgcctaattctcacctgaaggcagagggatgaaatgccaagactctatgctctggaaaacctgaggccaaatattgatctgtattaagctccagtgctttatccacattgtagcctaatattcatgctgcctgccatgtgtgagtcacttctacgcataaactagatatagcttttggtgtttgagtgttcatcagggtgggaccccattccagtccaattttcctaagtttctttgagggttccatgggagcaaatatctaaataatggcctggtaggtctggattttcaaagattgttggcagtttcctcctcccaacagttttacctcgggatggttggttagtgcatgtcacatgacatccacatgcacatgtattctgttggccagcacgttctccagactctagatgtttagatgaggttgagctatgatatgtgcttgtgtgtatgtctatgtgtatatattatatatacattagacacacatatacattatttctgtatatagatgtctgtgtatacatatgtatgtgtgagtgtatgtatacacacacacacacacacacacacttttgcaagagtgatgggaaagaccctaggtgctcataactagagtatgtgtatgtacttacatgggtgttttgatctctgttctttcatactacatttgaacagggcaaaatgaactaactgccatgtaggctaagaaagaaatgctaacctgtggaaagttggttttgtaaaattccatggatcttgctggagaagcatccaaggaacttcatgcttgatttgaccactgacagcctccaccttgagcactattctaatgagcaaataccttagctcccttgagctggttttctctgatggcacttttgagctcctaagctgccagccttcccttcttttcctgggtgctcagggcatgcttattagcagctgggttggtatggagttggcagacaggatgttcaacttaatgaagaaatacagctaaggccttgccagcaacacctgccgtaagttactggctgagtgagggcatagaagttgaaggttactgtttttatcctctatccttttttcctttcctgatcaaggtgctcttctcattttttcctgagaaccttagccatcagatgaggctccttagtttattgtggttggttgttttttctttataatggctctgggctatatgcccatatttataaaccagcagcaggggaaagattatattttataagagggaacaaattttcacaatttgaaaagcccacataagttttctcttttaaggtagaatcttgttaatttcattccaaacatcggggctaacagagactggaggcatttctttttaggctctgagactaaatgagaggaaaagaaaagaaaaaaaaatgattgtctaaccaattgtgagaattactgtttgaaacttttcaaggcacattgaaatacttgaaaacttctcatttatgttatttatgatgttattttgtacgtgttattattattatattgttttataaatggaggtacaggatatcacctgaattattaatgaatgcccaggaagtaattttcttctcattcttctaaaactactgcctttcaaagtgcacacacacgcgtccacatacactgcattcgttgctccagtataaattacacgcatgagcacctttctggcttttaagccaatataatgggctgcaaaatgaagacaccagagtgtatgcatacaaatctcactgtattaaagatgcaggttttctaattgtacccttcttgtctctctggcaatcttgcccttaatatccctggagttcctcatcagtgtcattttctgttatacacagttccacaattttgtctctagttgacttcaaatgtgtaactttattggtcttgccctattataattgtcatgactttcagattgtatctgaactcacagactgctgtcttactaataggtctggaaggtcacgctgaatgagaagtaaattattttatgtaat

SEQ ID NO: 1135 - DNA, 2440 bp, Homo sapiens
tgtcatgctgttcccgctccaggtggccgctgtaacctcttcggtccgcgacgatcctctagagcactgtgtgtctccccggacgcgagcccgctcccctgaaatctgcaaaatggctgataatttggatgaatttattgaagagcaaaaagccagattggccgaagacaaagcagagttggaaagtgatccaccttacatggaaatgaagggaaagttgtcagcgaagctttctgaaaacagtaagatactgatctctatggctaaggaaaacataccaccaaatagtcaacagaccaggggttccttaggaattgattatggattaagtttaccacttggagaagactatgaacggaagaaacataaattaaaagaagaattgcggcaagattacagacgttatcttactcagaaaaattttctatctacgagtgaaacagatccatctactttgggagtttctcttcctattggtgagaggttatctgctaaggaaaggttgaaacttgaacgtaacaaagaatacaatcagtttctcaggggtaaggaagaatccagtgaaaagttcaggcaggtggaaaagagtactgagcccaagagtcagagaaataaaaaacctattggtcaagttaagcctgatctaacttcacaaatacagacatcttgtgaaaattcagagggtcctagaaaagatgtcttaactccttcagaggcatatgaagaacttctgaaccaaagacgactagaggaggacagataccgacaactagatgatgaaatcgaattaaggaatagaagaattattaaaaaagcaaatgaagaagtgggcatttccaacctaaaacatcaaaggtttgcaagcaaggctggcattccagatagaagatttcacagatttaatgaggatcgtgtttttgatagacggtatcatagaccagaccaagatcctgaagtaagtgaagaaatggatgagaggtttagatatgaaagtgattttgatagaagactttcgagagtgtatacaaatgacaggatgcacaggaacaaacgagggaatatgcctcctatggaacatgatggggatgttatagaacagtcaaacataagaatttcatctgctgaaaataaaagtgctccagacaatgaaacatccaaatctgctaatcaagatacctgtagtccttttgcagggatgctctttggaggtgaagatcgagaacttattcagagaaggaaagagaaatacagactagaactgttggaacaaatggctgagcaacagaggaacaagagacgagaaaaagatttagaactcagggttgcagcgtctggagcacaagaccctgagaaatcgcctgatagactaaagcagtttagtgtggcaccaagacactttgaagagatgataccacctgaaagacccagaatagctttccagacacctctccctcctttatctgccccatctgtcccacccatcccatcagttcatcctgttccttctcaaaatgaagatttgcgcagtggactcagcagcgcccttggtgaaatggtgtctcccaggattgcacctctgcctccacctcccctactaccacctttggctactaactatcgaactccttatgatgatgcatactatttttatgggtccaggaatactttcgatcccagtcttgcttattatggttcaggaatgatgggcgtacagcctgcagcttatgttagtgctcctgtcacccaccaactagcacaacctgttgtgaatacggttggacagaatgaactgaagattacaagtgatcaagtgataaattcaggattgatttttgaagataaaccgaaaccttccaaacagtcacttcagtcttaccaagaggctttgcagcagcagattcgggaaagagaaaaaagaaggaagaaagaacgtgaagaaaaagaagaatatgaagctaaattagaagctgaaatgagaacatataatccctggggaaaaggtggaggtggtgctcctctcagggatgcaaaaggaaatctgataactgatttgaataggatgcacagacaaaatatagatgcctaccataacccagatgcaagaacatatgaagataaaagggctgttgtatctctagacccaaatttagccacttcaaatgctgagaacctagaagatgctgcaaataaaagctcaggtcatatgcaaacacagagctctccttttgctcggggaaatgtatttggtgagcctccaactgaacttcagattaaacagcaagaattatacaagaattttcttcgtttccagattgaggaaaagaaacaaagagaggaagcagagcgagagagactgagaattgcagaagaaaaagaagaaagacggcttgcagaacagagggcacgaattcagcaggagtatgaagaggaacaggaaaag

SEQ ID NO: 1136 - DNA, 3058 bp, Homo sapiens
gtttcgcttcgaagattgtttcagaagcgttgggcggcgggcgtccctgagagaaattaacacagtctcactctgtcacccaggctggagtgcagtggctcaatgtccattcactgcgacctccacctcccaggttcaagcgattctcgtgcctcagcctcccgagtagctgggattacaggaatctggaaactgttcttcaggaagaaacccattagtttggaactggagaattcctttgcatcagatactaaaatgaaagaaccacttttaggtggtgagtgtgacaaggcagtggcatcacagctggggctgctagatgaaattaagacagaacccgacaatgctcaagagtattgtcataggcaacagtccagaactcaggagaatgaactgaaaataaatgctgtgttttcagagagtgcttcacagttgactgcaggcattcagctttctctggcatcatctggcatgaataaaatgcttccttcagtttcaaccacagctattcaggtttcctgtgctggttgtaaaaaaaattctccagaaggggcaaactgcttatcagaggaaaggatctgctcaacttttctgctccataccatgcatcactgaatacatttcatctgccagttcaccagttccttctaagagaacttgttcaaactgctcaaaagacattttaaatccaaaggatgtgattagtgtccagctggaagacactacctcttgcaaaactttttgcagcctatcttgtctttcatcatatgaagaaaaaagaaaaccatttgttaccatatgtactaatagcattttgaccaagtgcagcatgtgccagaagactgctattattcagtatgaagtaaaataccaaaatgtgaaacataatctttgcagtaatgcctgcctttcaaagtttcactctgctaacaacttcatcatgaactgctgtgagaactgtggcacttactgttacaccagctctagtctgtcccacatacttcagatggaaggacagtctcattactttaatagttcaaagagtattacagcatataagcagaaacctgccaaaccacttatatctgttccttgcaaaccattgaagccctcagatgaaatgattgagactacgagtgatttggggaagacagagcttttctgctctattaattgtttctctgcatacagtaaagctaagatggaatcttcttcagtgttgtttctgtggtgcatgatacttcaacagagcttctttctccaaagaaagatacgactccagttataagcaatatagtgtcattggcagacaccgatgttgccttgcccatcatgaacactgatgtcttacaagatacagtttcttcagtaacagcaacagcagatgtcattgtggatctttctaagagttcacctagtgaacccagtaatgctgttgctagtagtagtacggaacagccaagcgtttcaccatcttcatcagtattcagtcagcatgcaattggttccagtacagaagtacaaaaagacaatatgaaatctatgaaaataagtgatgaactatgtcacccaaaatgtacatccaaagtacaaaaagttaaaggtaaatcacgaagtattaaaaaatcttgttgtgcagattttgagtgtttggaaaacagtaaaaaagatgtggcattctgttattcatgccagttgttctgccaaaaatattttagctgtggaagagagtcatttgcaacccacggaacttctaattggaaaaaaaccctggaaaaattcagaaagcatgaaaaaagtgaaatgcatttgaagtcattggaattttggagagaataccaattttgtgatggagctgtcagtgacgatttatctattcattcgaaacagattgagggaaataaaaagtacctaaagcttataattgaaaatattttatttcttggaaagcagtgtttacccttaagaggaaacgaccagtcagtttcatctgtgaataaaggcaattttttagaattgttagaaatgagagcaaaagataaaggagaagaaacatttcgacttatgaattcacaagttgacttctataacagtacacaaattcaaagtgatattatcgaaataataaagactgaaatgttgcaggatattgtgaatgagatcaatgactcctcagcattttcaatcatatgtgatgagacaatcaatagtgccatgaaagaacagctttcaatttgtgtaagatacccacaaaaatcatcaaaggctatcttaattaaggaaagattcttgggttttgttgatactgaggagatgactgggacccacttacataggactatcaaaacttatctgcagcaaattggagttgatatggataaaatacatggccaggcctatgatagcaccactaatttgaagataaaatttaataaaatagcagcagaattcaagaaagaagaaccaagagctttatacatacattgttatgcacactttttggatttatcaataattaggttttgtaaagaagtaaaagaactccgaagtgctctaaaaactctcagttctttgttcaacactatttgtatgtctggggaaatgttggcaaattttcgaaacatttataggctaagtcaaaacaaaacatgcaagaaacatatatcacaatcatgttggacagtccatgatcgtacattactatctgtgattgacagtcttccagagattattgaaacattggaagttatagcaagccattcttcaaatacaagtttcgccgatgaattgagtcatttgctgacattggtttccaaatttgaatttgtcttttgtttgaaattcctgtatcgagtgctgagtgttacaggaattctttccaaagagcttcaaaataaaaccatagacattttttctttgtcttcaaaaatagaagcaattttggaatgtttatcatctgaaagaaatgacgtatactttaaaacaatctgggatggaacagaggaaatatgtcaaaaaataacctgtaaaggttttaaagttgaaaaaccttctcttc

SEQ ID NO: 1137 - DNA, 1625 bp, Homo sapiens
atgttttccatgttttcttctagtacttttatgggtttcattttcatattgaaatcattgatctacttctagtttttgatacaaaatgtgagccaggaaacccagtttttaaatttcaaatagctgtccaggtgtccctgcacctcttatgcatgagccctcgctttgtgccaatgtggagtgcccgcctgctcacacgtgcccatgtggagtgcccgcctgctcatgtgcccatgtggagtgcccgcctgctcacacatgtcgatgcggagtgcccgcctgctcacacatgcccatgtggagtgcccgcctgctcacacgtgcccatgtggagtgcccgcctgctcacacacgtgtccatgtggagtgcccacctgctcatgtgcccatgtggagtgcccacctgctcacatgtgccgatgtggagtgccacctgctcacacacgtgcccatgtggagtgcccgcctgctcacgtgcccatgtggagtgcccgcctgctcacacgtgccgatgcggagtgcccgcctgctcacacgtgcccatgcggagtgcccgcctgctcacacgtgcccatgcggagtgcccgcctgctcacacgtgcccatgcggagtgcccgcctgctcacacgtgccgacgtggagtgcccgcctgctcacacgtgcccatgtggagtgcccgcctgctcacacgtgccaacgtggagtgcccgcctgatcacacgtgcccatgtggagtgctcgcctgctcacacgtgccgatgtggagtgcctgcctgctcacacgtgcccatgtggagtgttcgcctgctcacacgtgccgatgcggagtgcccgcctgctcacacgtgccgatgcggagtgcccgcctgctcacacgtgcccatgtggagtgcccgcctgctcacgtgccgatgtggagtgcccgcctgctcacacgtgcccatgtggagtgcccgcctgctcacgtgccgatgtggggtgcccgcctgctcacatgtgccgatgtggagtgcccgcctgctcacacgtgcccatgtggagtgcccgcctgctcacacgtgccgacgtggagtgcccgcctgctcacgtgcccatatggagtgcccgcctgctcacacgtgccattgtggagtgcccgcctgctcacacacatgccgatgtggagtgcccgcctgctcacacgtgcccatgtggagtgcccgcctgctcacacgtgcccatgtggagtgcccgcctgctcacacacgtgcccatgtggagtgcccgcctgctcacacgtgcccatgtggagtgcctgcctgctcacacacgtgcccatgtggagtgcccgcctgctcacacaaagccctggcatggtggttctgtaggtttcctgtcctgccggccgagtcagacgctgttaccgtacattctactcatggtggctttttaatacgtttttatgtcaaggatcccttttatatttctctgcacctcgagataacgtaggaatattagggatgagatggaagaggagagggtgtttttgtaaaattgaattcaggactgatttgttagcctggtgcttttcgtatcagaccttttaatgaattttcatggatgctgattaaaagacaaacctgtg

SEQ ID NO: 1138 - DNA, 2406 bp, Homo sapiens
ctttgaactggctttcacatagttaagcattgctagagaaaatcaccccatctagcagataagtttggtgattgtgatttttgtagtttcatctcctgtctccattcttatcctcctcaaagcccttcttccactcaactgtcagaatgattcaaaatgcaaatctcatcatgttattccaatgctattttcagtgctatcccatttcttaaaatactcttgcctttcagacttaaaaatgaatatgaagcacctaggaatcttgttaaaatgcaagttctgcttcagaaggtcagaagtagaacctgagattctgcatttccaacaaacttctttcaccatcacaaaggacaaacacatcctcttgagagtagtagcttttggtctttattttgaaatgacctacattttaactcaacccagaccttatttttctcatttttatgaaataagctcaaggtttgccaatctagaccagaaatctcaaactcctaagtaaaacaattataagcacttaacacctatcttatcctgaagtcctggaatgtcagagttggaagagatcttagagctcattttgttttatctcctcattgtatggataaagtgtagtgcaaaagagtgagttctaggccagaggtaggccaataatttaattttcccaactcacgggccaaggttctttccactgcaccataatactgatccccaattttaaggttccttgtctgtccttctaaaccatcaattcactcaacaactgcttaagtgtatatagtatgtgcacatctgtgccatttgttgggtatgcaaagtctaaaagacagggtgcctgccctgagatgctcatgacctaattcaaatgcatccttcctgtccctctccccacttctcctggatcttctcatctgtatccttttccacgtttgtaaatataaattcaatagaaataaacagttttatatatggcaaatcatgatgagctatgaaagaaaggtgagtagggggattaaattttaaaatagatacaaaaggataaatgcactatttcttgagagcaatggctttcaatctttattttgaagtgacctatattttgattcaatccagttcccccaacttgctcacaattgtgtaagtgaaaaaaaactgtgtctaaacaagtgcactattacttacccagagtatatggttctgttaactaagtgttctgtttctttttaaagcctggttaatggccgggcgctgtggctcatgcctataatcccagcactttgggaggccaaggcaggcggatccctgagttcgggagttcaagaccagcctgaccaacacggagaaaccccgtctctactaaaaatacagaattagtcaggcgtggtggtgggcgcctgtaatcccagctactcaggaggctgaggcaggagaatcgcttgaacccgggaggcggaggttgcgacccaaagcttatgaaagaagaacaaatgtcacaggcccagctcttcaccagaagctttgatgatggcctgggctttgaatacgtgatgttctacaatgacattgagaaaaggatggtttgcttatttcaaggaggcccttacctggaaggaccacctggattcattcatggaggtgccattgcaaccatgattgatgctactgttggtatgtgtgcaatgatggctgggggaatcgtcatgactgccaatctcaacatcaattataaaagacctatccctctttgttctgttgttatgataaatagccaacttgataaagttgaaggaaggaaattttttgtttcctgtaatgttcagagtgttgatgagaagaccctatactcagaggcgacaagcttatttataaagctgaatcctgctaaaagtctgacataaagagctgctggtgaactccatctcattctcgcccctccagaagaagcagttgtcccccaaatactctgctccctcactgctgaatccctgtagggagaagcctgccaacagtgaccttccgaaacagccttctgaatacaaagaggattcagtttccatcttctcaactttttaacacagaaacacttcctgcgagcatatcgacaactctcgggccaggcgctgtggctcacacctataatcccagcactttaggaggccgaggcaggcggattgcctgagctcaggagttcaagatcagtctgggcaacacgatgaaactccgtctctactaaaatacaaaaaattatccaggcatggtggcgtacgcctgtagtcccagctgctcaggaggctgaggcaggagaattgcttgaacccaggaggaagaggttgcagtgagccaagatcatgccacatcactccaacctgggcaacagaacaagaacccatctcaaacaaacaaacaaac

SEQ ID NO: 1139 - DNA, 1587 bp, Homo sapiens
agctgcgagcgcgccgcgccaccgagcctcctgcagcaatggctcgtccgtgaaacgcgagccacggctgctctttttaagagtgcctgcatcctccgtttgcgcttcgcaactgtcctgggtgaaaatggctgtctagactaaaatgtggcagaagggaccaagcagtggatattgagcctgtgaagtccaactcttaagctccgagacctgggggactgagagcccagctctgaaaagtgcatcatgaattccggagttgccatgaaatatggaaacgactcctcggccgagctgagtgagtgcgagcagtcccacctcatgagagagcatgaggatgtccaggagcgaacgacgcttcgctatgaggaacgcatcacagagctccacagcgtcattgcggagctcaacaagaagatagaccgtctgcaaggcaccaccatcagggaggaagatgagtactcagaactgcgatcagaactcagccagagccaacacgaggtcaacgaggactctcgaagcatggaccaagaccagacctctgtctctatccccgaaaaccagtctaccatggttactgctgacatggacaactgcagtgacctgaactcagaactgcagagggtgctgacagggctggagaatgttgtctgcggcaggaagaagagcagctgcagcctctccgtggccgaggtggacaggcacattgagcagctcaccacagccagcgagcactgtgacctggctattaagacagtcgaggagattgagggggtgcttggccgggacctgtatcccaacctggctgaagagaggtctcggtgggagaaggagctggctgggctgagggaagagaatgagagcctgactgccacgctgtgcagcaaagaggaagaactgaaccggactaaggccaccatgaatgccatccgggaagagcgggaccggctccggaggcgggtcagagagcttcaaactcgactacagagcgtgcaggccacaggtccctccagccctggccgcctcacttccaccaaccgcccgattaaccccagcactggggagctgagcacaagcagcagcagcaatgacattcccatcgccaagattgctgagagggtgaagctatcaaagacaaggtccgaatcgtcatcatctgatcggccagtcctgggctcagaaatcagtagcataggggtatccagcagtgtggctgaacacctggcccactcacttcaggactgctccaatatccaagagattttccaaacactctactcacacggatctgccatctcagaaagcaagattagagagtttgaggtggaaacagaacggctgaatagccggattgagcacctcaaatcccaaaatgacctcctgaccataaccttggaggaatgtaaaagcaatgccgagaggatgagcatgctggtgggaaaatacgaatccaatgccaaagtgctgggattacaggcatgagccaatgtgcctggccattcctgtgattttttagaatttttcacttttcatataaagttgcattttatcatgaggaaaatgttttggctgaaaaacatatgcccc

SEQ ID NO: 1140 - DNA, 1789 bp, Homo sapiens
aatgctcaggtttttggatataaatccactcagccagtgcgtacctaaaaataaatatcttcctgtactctcatattggtctcgccattcctcagtttcctgcaacatttcttggcaagccagccaggagtggagatgacaggcttactgtctcctttgcctatagggggctggagccctgggccaagggagacctgtgaccccaggtgccgccgggagaacttcagcccagaggggaaatcagctctccgtgacccagcacccctacccagcagcgcaacagatcctgagaggagctacaggatgattctagaaacagcgcacttcaggaatcatgttgcaggtgttgtgcattggatccaccacagtcggctgaaactgacaactcaagacaagtggaccagccagcaggacccagatcatccaactcggctgatcctgagacgggaccaaactgctgccgaagacgaccgccctgttctggtcactccggaggctaaccagcctacgcatggctgaagtttgaggaaacaacaagccctgctctagtcacacactgaaagctgactagtctatgcacggccaaagcttgaggactcatcaagcaagtaaatgtagttagaaatcttagaactagtagttttccttgtaatattaactgttttactattgttctgtcactgtgctcaacctcctctcccaaataaggacctcttctgtccttactagatatgaatatactgtacattgttttactgttgttaccccacttaaccatgctagaagaaacacccatagaagggtgtccccatcgtacacatactacatggtcagaaaacagtataaccaggactctattataccatacttattatgagtatacagggactcacctaggaacttgtacttacaatcagatcacctattcaatttatgacccaggaaatggccagctacctaggtggaagataggtcatggagttaccgtactcctacttacgtgcttaagcgcatcataaggttacaggcagggcttgagatcatcactaataaacatcaaatgcattagatttactgacccagcaagctacaaaaaatgaggaatgctatctatcagaacagattagctttagactatctcctagcccaggaaggaggagtatgtggaaaattcaatctaactaattgttgcctggaaatcaatgacaatggaaagacatttatggaaataactgcaagaataagaaaattaacccacgttccagttcaaacgtagaaagggtggtctccagattctctctttggaggctgtttttcatttttcggagggttcaagactttaataagattgattctggccatactaggaagttgcctaatactaccttgtctcttacctctccttgttagaaacattcagtcaactatagaggcaatagtagctaggcaaactaccagtcagctaatggctctatgtaaatgtcaacctttgtctaaagaagaaaacttgtctcttcatgcaaaattaaataatagtgatgcctcctattaaatttcttttataaaaggcatcaaaggggggaaactgaggcagaaatttaaaaataaatatgcattcattcactccaagaaaagttaacaggcaaggcaagggttaaaaagaaaagaacaagttttcctcggcctagcaagctcacttcaaggacagttataagataatgttgtttgagaagccaagtccaaaggaatgggttccagacatccctcccctctagaacaaggttgaagg

SEQ ID NO: 1141 - DNA, 2025 bp, Homo sapiens
gtggtaggagaccaagcacctcatgaagatgcagtggttagtagggaattttggggtgagtgagggaggagggttggggtcctaaagtggtggtcagaagagtatcttgccaaggggatgtcctgtttggcacagggagatcaactttggggcactaagaatttgattcctggtaaggaggaactgggtagggagctgatagaaaagggactggggtctgggttcctgggtcccttacgggggaggcgccacagtgggcgtgacctcattcattcagcctcctgcttactccaggtggaatgtaactcaaaactggaccccacccagacctcgttcctcaaggtcagtaacctgttcctgggcccccgtccacagtcatatatcctctctacatgcagctgctaagcctccagggcccggcatgggagcaaatggggtgaacgaagaacaaaacaaaggggctagagtggagaagctagggaagagagaccctttccacctctctgcatggctcatttatgtgtgtttcactttttctgggtggtgctctcctgaacagatggctgactccggaggtcagccccagctgactcaggtgagtgccgctgccgtccatgggatggggaagggacataggataccggtggcactgggctctgccctttgccacacacccggccccacagtgccgcagcctcaggctccagctcttcctctaacctcatctcaccgtctccctcgcctcttcttacttccgcagccaggcaagctgaccgaggccttcaagtacttcctgcaaggcatgggctacagtgagtatggggacaagagcttgctgcactagaggagagataggcactgacggggtggaaccgttttaggtgaatgcctggactcaccgctatctgcccaatcgagctcgttgatcccctggcttagttataactagtccataatccaaggaccacaccctgagtcgccagccccccttccccacttcctctctgactgcttgtgcatcgtgctgtctccacagtggcctcatcctgcatgactcgcctgtcccggtctcgtacagcctctctgaccagtgcagcatccgttgatggcaaccggtcccgctctcgcaccctgtcccagagcagcgagtctggaactctttcttcggggcccccggggcacaccatggaggtctcctgttgaatggcccttgttgccctagagtgggacccagccctcacctcccccagagctaacctgggaggtgctgaaggggcattgggccaccgtaagcaagggaaaaagggcagatcatgcggggagatgaccttgatctttgattgctaccctaaccttgacctttaacccgtgattccccccagctcctggaagagatgtcctaatatctcttagggacccagacccctaaattctcctcctcccccattttgatgttaaggtggagagggcatatgcatcctctgtcctgatctaggtgtctatagctgaggggtaagaggttgttgtagttgtcctggtgcctccatcagactctccctacttgtcccatatttgcaaggggaggggatttggggctggggctccattcaccaaagctgaggtggcttctcattaaccctttaggactctgaagggtatggacctacgtgaatgtgtgtcagggggagacttgctggtgggttagtggtcctcaggatgtgatagaaacatccagtgtaaaaaggaagttggaatgggagttggcgggcagtgaacgagtgtggggaaggattggtgctggggcaacaggaaggggcctggggccgtttggctgcactaactttggtagctcagtgtgcatctagagtgggactggggagggagctaagcttgggctgggctgcttggggcttggcatagggtggaaagggctaccctggggctctgaccacactgtagtatgtgtggagggtgccctcccgtctcccacaacttctgctataacaataaactgtagaggaatct

SEQ ID NO: 1142 - DNA, 1579 bp, Homo sapiens
attgcgtagttccgaataccctcggccacacctggccttctccatgctcggaataacttcctgcagcgaccaacaggctaaagagggggaagggatccagcaccggctcctcctccggcaaccacggtgggagcggcggaggaaatggacataaacccgggtgtgaaaagccagggaatgaagcccgcgggagcggggaatctgggattcagaactctgagacgtctcctgggatgtttaactttgacactttctggaagaattttaaatccaagctgggtttcatcaactgggatgccataaacaagaaccaggtcccgccccccagcacccgagccctcctctacttcagccgactctgggaggatttcaaacagaacactcctttcctcaactggaaagcaattattgagggtgcggacgcgtcatcactgcagaaacgtgcaggcagagccgatcaggtgagtctctgtcctcaagttaccctgcagggcccttggtcccccttggccttgctcccggatctgggcaatctgaaattctctttcactcctccattcaatggctttctcagccgggtgcaggatggcaggaggtggcagctgtaacttccaaggtgagacatctaccatggacccgctgggttacgtcctggcacttcttttcttggtctcctaccctcacctcccaagtaacacttgaagagttggcagaggtcttgagggcaggaggaggagtaggaggaggaggcggcggccatttgggctaggacagtaaaggcaggtgagggtgggggccctggctggctggaggagattgtataaaagaaaacacgtgacacaaggaggggagaaggcaggtgttttaggaaaggtctggtccaggcaggaaggtgggatgtttattccagagcaaaatggccttcgtccgtctgttctaaccgccatgcccacttcttccacagaactacaattacaaccagcatgcgtatcccactgcctatggtgggaagtactcagtcaagacccctgcaaaggggggagtctcaccttcttcctcggcttcccgggtgcaacctggcctgctgcagtgggtgaagttttggtaggtgagtgtcagagtgagccgacccaggccacatcctggcagtggaggcacagtcacccggggcagggccaggatcttggtatatcctcagatctcagtgggcagcgacatgaagtcaggcggagcaaaagtgaggggcaccacaggcgaacaggcaatttcttgcaaccaccaccgaggccccgaaaagcactggtcatcagggagctcctccccttggcccccagcctgtgccagccctggcccggctgccacacctctgtttcctaggctggggacccagcttgtctctccttgtttcttcccactgcactgtggtgcttcagtggccaccagcctcgtcacatacaccagcatctttctgtacctcctccctttggtgacctgaagtcactgtgacagttctccaggaaggaggagcttcctacttttgagtttctctgtggaaataaaacatgaatcttgtttccct

SEQ ID NO: 1143 - DNA, 2052 bp, Homo sapiens
gttgggggcagccaggcctggctcgagatgccgaagtcgtgcgcggcccggcagtgctgcaaccgctacagcagccgcaggaagcagctcaccttccaccggtttccgttcagccgcccggagctgctgaaggaatgggtgctgaacatcggccggggcaacttcaagcccaagcagcacacggtcatctgctccgagcacttccggccagagtgcttcagcgcctttggaaaccgcaagaacctaaagcacaatgccgtgcccacggtgttcgcctttcaggaccccacacagcaggtgagggagaacacagaccctgccagtgagagaggaaatgccagctcttctcagaaagaaaagacttcaccctgccgttcccaggtcctccctgaggcgggggccggagaggacagtcctgggagaaacatggacactgcacttgaagagcttcagttgcccccaaatgccgaaggccacgtaaaacaggcaatgttgtttaatgtagaaaatggaaccccagcttcacgtgaagccttgtggttgagtgaggagtgaaggatggggaggaggcctctggggaaggggttccctccctcctgaagatgaacacacagtacacggaagagcgccagcctctgctttcaggaaaggtttattgtggtgagtgccttctgtacagtcgactgcaaatgaaacgcagaggatgggtgcccagaagcacctgcggcagaggcgcacgggaagcccggggcccaggctcatgcaacacgacgctcaccgcggctcgggccgtggggccgtcagagaaacctttttaaaaaatggagatgaatgttacagaattggacaacccgaactgcttttcaaaaccagaggaaggaggttcttagccgttactcagataccagtgctggggagggaggcctgacttcagcaacagctgtgggtgggctggaggccggcgcagcttggggccccccacgccagctgtctcagccaccacctgtgcggcgcttgctccgaggggtcagcaagagcaactgatggctgccacttccaggccccgagagacaggcctcacgtaactttactgcagccgaggtccaggccgtggagggggtcctagctccgctgcattctgcatcccaagtgggcacgtggaggaagggtctgaaggaaggctccggagcacaggccctggtgttcctgtgaggacgctggacctgcaggagcggggagctgcagtgccacctgctgggtaccacgggccgggcctggggtccacgcctttgggttgggtgtgtctgatgtcttgccaagcgcctggtcctgtcctcttgagctgcccttgcccagcactgcactctggaggtgggtggtgcaggcagtggagggacacaggccagctcaagcccgctggtggcagggcgttttcccaccgggatacgggaagccacctgtgtcagggctaggccctgggatcgggagttacactaccctgtcccaagccgagggggccggtggaatgatttgagcagctctgggagtggggaaaaaagacgactaatttccaaacccgtttgttctcagataaaaagcagttttataaacccgcaatctgctccagattcaagcagtaatatttcagcaggaggaggtggtcatgggaagccagcacagcagaggctccctgaccgggaggcctgcctgcttttcaggttgtttcccatgttcagcttggactgcagaagtggctcacgctcctgtggtgagggcagggtgctccacagacacctccagacccagccaagaactacagggcggcgggctgcggtcagcacgtgtgctcgggacacagcggagtcagggccagagcccttccctccaggaactgatccttgggaaaacagccatgggccaggctgcagtctggttcccagtggggctgcctcagtcctacccccagcaccctcaaaagctggggtgtctgcatgtcccttcacataattgataatggtaccaccttctataataataatataaaataaaaac

SEQ ID NO: 1144 - DNA, 1875 bp, Homo sapiens
tagtagagacagggttttactgtgctggccaggctagtctcgaactcctggactcaagtgatcagcccgcctcggcctcccgaagttctgggattacaggcatgagccactgcaccaggccgtgttaatgatattaatgaccatattgcccttgggggtgagggagagccaggcagctggtggtggtgtttgtgggagggggactgtccttcctgccccttacccctccaggggcctgaggagaccctggccacccctgtgagccttttttcctcccaccgagggcaacctgatggtgccagtgttcattggctgccccccaggcaagcgcctggccttcgacatcacctacacgctggaatacagccgcctgaagaacaaacactactttgactgcgttaacgtgaacccggagatgccctgctttctcttccgggacagtgtgtgtccagtcccttcccctgcacagttcactgccctcttgcccccactactttgtgctctccctccccattcctctccccgcagactacccaccctttttcctgcggcatctcactttcccccgtctcggtcctcagcttctcgggccaagctaatttcttcttctggtctcaatcccctccaaccccatagttttctaccccttcttcttgattcaagatttggtgacaggagactccggcagtttccagggcaggtaaaggcgtggccagcttgcagctagggcaggtggagggagtggaaggagatgggtgcaggactcgagacccggaggccagtctgtgtgcacttctgtccctggtggctatgttctgctggtggtgggtggcgggcccacactggacagcctcaaggactacagtgaggacgaaatctaccgcttcaacagccccctggacaagtaatccccgtggggtcccacgtgtaatccaccttgcttcccctggaggcctttcccacttccaagccaagcccacctcgcaagcccccacctctgcgtctcaggccctgcccacagtggggctcttaggatctcacaggcaaactcctgcccgcccctaacaccatgtcccctgcacccacctgtggcctccctccacactgaccactgaggtcatacctcccctacaccgccccccaacccccggctgagatgacctgggcctgcacaggaccaacagccttatctggaccacgaggaccacaaggaccaccaaagactcagcctttcacatcatgtcccacgagagcccaggcatcgagtggctctgtctggagaatgccccatgctatgacaatgttccccaaggcatctttgcccctgaattcttcttcaaggtgttggtgagcaatagaggagtggacacgagcacctactgcaactaccagctcaccttcctgctgcacatccacgggctgccactcagtcccaagcgggcccttttcatcatcatggtgtcagctagcgtgtttgtgggcctggtgatcttctacatcgccttctgcctcctgtggcccctcgtggtgaagggctgcacgatgatccggtggaagataaacaacctcattgcctcagaatcctactacacctacgcctccatttccggaatctcgagcatgccatctctgagacattccaggatgggctccatgttcagctccaggatgacagaggacagggctgaacccaaggaagccgtggagagacagttgatgacctgagtgtcccacctgccccagcccccagttactgtcacgcctctcttatgaggcccatcttgaagatgcaacctgtcacccagcccaggcctctctttctgttttgcttgatgtttacttctcgttcagactcaaataaagccttttttcagg

SEQ ID NO: 1145 - DNA, 2109 bp, Homo sapiens
tacaaactttcttatcttccatcgcggcgacctggaggtccgaggcttcgtgctgcggttgaagggtggggaatacgactaaaaactgcagcccagcgcgcgcgagacgacccaagacccacgcgcactcgcacgagcgcgtgcacagacttggagcacagaccctcccttcagatccgcagtctctagctccttccagcagtagattttagagtggccagcggagtcttatgcagccctttcaaatgcccttggggatctgccagcttccctccctgcacccagcccacctccccgacccactcacggttgaggaggccgagctgcaggagcgaggccagggcggtgaggatcatgaagagcagcagccctcccctgcgcccgaggaatcggaccaccacgcacatggccaggcaggacaccagcgcgatgctggccgtggtatagtagtcagcatagaagttctccaggagcggcaccttcacctcgtggcccatcatgctcctggcaaagcagtggtggatcccgtaccccgtcagcctgtggagacataccgagcggcagtgggtgggctgcccccatgccaggggctgcgctgcctcctgggagttcgtgctgtcaggtgaccaggagatgaagaagcaactcaatgtgtcatagaaaagcccatcatgaccgaaccacgagcagattacagagccaatgcaaaagaggagacgtgggagaaatatggaatgcttctcctgatggaggtccaggctcatgccccactaccatggctttaatagacaggtgtgggcacaagagcagtgagtccttttgttaaaacacacactttcatgggaatcctccaagacaaagcgctttccaggtactgactcatttaacccagggctgcaatccaacagccactgcacacccacttcacaggggcaggggggcagagcagctcgcacgaggctctcggcgggtaagcggcaactcagagacgcagcttttctgggcacttagggttctggaagggtggagatctatccataccagcctcaactccacccacacagcctggaggagtcgggcagaagccaggccaatggaagacatatagggtccacaggaaactgtttttttttttgttttgttttgtttttgagtagagccgtgttctgctacccaagctggagtgcagtggcaagatctcagctcactgcaacctccccctccctggttcaggtgattctcctgcttcagcctcccaagtagctgggattacaggcacctgccaccatgcccagctggtttttgtattttttggtggagacagggtttcaccatgttggacaggctggcctcgaactcctgatctcgagtgatccgcctgccttggcttcccaaagtgttgggattacaggtgtgagccaccgcacccggcctccgttttgattcttaatttatccctgtttcccctccactgccctgggtcaagcttctttattgccccacacgagcgtatcaacctgctggaaaaacgtgtctgccctgaaaacaggaacaaaggcgtggctgcaccctcccacggaggctgctgatggccatccatggggtgcctcagggctctcaggaacctttggggtgtacctgtgatgcacccgtggtgcctcgagggacccttcttatgtctgctcttggcaaccatcccagagccaaaaactgcccccttctctccccaaacaccctttcgtgcttcagggaaatctacgtccttctcatctaaccttgagaatgcatcaaggtcaactgtaacagaccccgtccctgccccatagggggaagccaccccttgccaggtgaatgcctttcctcttgggaaataggcagaggccccagcccccgcacaatggctttataatccagcaactgatttggttcagttagcctccagagttcctcttctggcctgctgagatagcagggcaatctcctaccttcttgctctggtagaaatgaagtctcccctgaccacaacaggtcatctgaagataacagagccagagagctcggttccccgtctccacaaaacgaatcattaaaatggaaactcaccatctt

SEQ ID NO: 1146 - DNA, 2872 bp, Homo sapiens
ggattcgaaggcacagggccgcctcaccgcacttccccaggatttcagggaacaggctcctgtgacttggaaatgaaaatggatcacccaacctggaggaacagtgaggctggtgtccaagacttgccccttgcctgcacttccagcaaagatttggagacactcagtggaaaccaatcgagcccccagcccacccccgcccagactcagccaccaaagttccctcactgcatgtggcacacgggctcatgggagtttctctgcctgcgattgtccacgttgacaccttctgcacaggtgcatttgtgagtcccctcggtgtctctgcagcatctatgtgtggatgaatagtgaagccacatgaggcctggtctgaagcagagaagatccgctcagcatcacgttgaatcccaagcccgcatctccgtgggctccaggacaatcctatgaaaatgacaccgtcggttcattgttcacatcggggaggagaattccgtctgaaaatgagcgtgacttcactgacacccaagtccgtggcacagccctgtgctgagctccacagacctacagtccatcgcctccccttcgagtgggcccagggctgcagacagcattgtccaaagaagacaccctgactcgatgaatggaacaaactggaaactccagaaacaagcccttctttacatttctggtgtttggcctaaatggaaggtgccaaggaagcagatgatgccccgagtacatctacacttgggctgcaacaagaaacaacagagcccatgaaaactgacagtgctgaaagtgaagactgagattcgggagctgaggtgtccctgtgatccaggtcttccaccctgaaaccccatcctccatcaaggtcctgcctgtagagtctaccttgcaaagcctcctgctcctacccatgctacaggccaggaaccagagcccatcatctcagaggcccctggatgtccttcgaaggaaccaggaccctcagagcccagcatccatctctgtcatcatcttcatcacacccaaagaagagccagccttgcaggagggtttacatctccaggatgatgggctgccagcaactgcagaggatgcagccacctgcttaactgtgctgtccagccagccagccagctgcagggcctcttgccgcttaagaagagctgatgggctgggcgtgttggctcacacctgtgagcacagtactgagaaatgggagcacagtactgggaattgggagcacagtactgggaaatgggagcacagtactgggaaacggcttacagcactgcaaaatgggagcacagtattgggaaatgggagcacagtactgggaaatgggagcatagtgctgggaaatgggagcacagtactgagaaatgggagcacagtactgggaaatggtagcacagtactaggaaatgggatcacagtgctgggaaatgggagcacagtaatgggaaatgggagcacagtgctgggaaatgggagcacagagtactgggaaatgggagcacagagtactggggaataggagcacagtactgggaaatgggagcaaacagcactgggagataggagtatacagcactgggaaatgggagcacggcactgggaaatgggagcacagtactgggaaatgggagcacagtgctaggaaatgagagcacagttttgggaaatgggagcacagtactgggaaatatgagcacagtactgggaaatggaagcacatggcactgggaaataggagtatacagcactgggaaatgggagcacagtactgggaattgggagcacagcactgggaaatgggagcacagtactaggaaatgggagctcacagcactgggaaatgggagcatagtactgggaaatgggagcacagtactgggaaaggggagcccacagtactgggaattgggagcacagtactgggaaatgggagttcacagcactaggaaatgggagcacagtattgggaaatgggagcacagtactgggaaaggggaacgcacagcactgggaaatgggagcatagtactgggaaagcggagcacagtactgggaaaggggagcccatagtactgggaaatgggagcacagtactggaaaatgggagctcacagcactgggaaatgggagcatagcattgggaaatgggagcacagtactgggaattgggagcacagcgctgagaaatgggagctcacagtactgggaaatggagcacagtatttggaaatgggagcacagtactgggaaatgggagctcacagcactgggaaatgggagcacagtactgggaattgggagcacagtactgggaaatgggagctcacagtactgggaaatgggagctcacagtactgggaaatgggagcacagtattcggaaatgggagcacagtactgggaaatgggagctcacagcactgggaaatggagcatagcattgggaaatgggagcacagtactgggaaatggaagctcacagtcctgggaaatgggagcatagtgctgggaaatgggagcacagtactgagaaatgggagcacagtactgggaaatgggagcccagtactgagaaatgggagcgcacagtactgtgaaatgggagcacacagtactgtgaaatgggagcacagtactgggaaatgggagcatagtactgagaaaccccagacctggattctgagtttttcagtctagcccagacttcttatcttagtagacaaaaagagtcaataccagagaaccagaggcatcctctgtattttaatgaactctgcgttttagtctgtttagtagtcatattttaaaagataatcagttttctaaatatatctataagttactac

SEQ ID NO: 1147 - DNA, 2675 bp, Homo sapiens
cgttcttacttctcctaaaggcccaggctgtgtggccccgtgtcctgcaggtattgggagatccatagctaagacaccgggacctcctggaagccaaaaatgtaatgtgttctcattttgcccaagacctttggccagagcagagcatgaaagattctttccaaaaagtggtactgagaagatatgaaaaatgtgaacatgacaatttacagttaaaaaaaggatgtataagtgtggatgagtgtaaggtgcacaaagaaggttataatgaacttaaccaatgtttgacaactaccccaagaaaaatatgtcaatgtgataaatatgtgaaagtccttcatcaatttccaaattcaaacggacaaaagagaggacatactgggaaaaaacctttcaaatatatagaatgcggcaaagcttttaagcagttctcaactcttactacacataagaaaattcatactggagggaaaccctacaaatgtgaagaatgtggcaaagcctttaaccactcttgtagccttactagacataagaaaattcatactggagagaaaccctacaaatgtgaagaatgtggcaaagcctttaagcactcctccactcttactacacataagagaaatcatactggagagaaaccctacaagtgtgataaatgtggcaaagcctttatgtcatcctcaacccttagtaaacatgagataattcatacggaaaagaaaccctacaaatgtgaagaatgtggcaaagccttcaaccggtcctcaacccttactacacataagataattcatactggagaaaaaccctacaaatgtgaagaatgtgacaaagcctttaagtactcctatacccttactacacataaaagaattcatactgaagacaaaccctacaaatgtgaagaatgtggcaaagcctttaagtactcctctacccttactacacataagagaattcatactggagagaaaccctacaaatgtgaagaatgtggcaaagccttcaagcggtcttcagaccttactacgcataagataattcatactggagagaaaccctacaaatgtgaagaatgtggcaaagcttttaagtactcctctaaccttactacacacaagaaaattcatactggagagagaccctacaaatgtgaagaatgtggcaaagccttcaaccagtcctcaatccttactacacataagagaattcatactggagagaaattctacaaatgtgaagaatgtggcaaagccttcaagcggtcctcacaccttactacacataagataattcatactggagagaaattctacaaatgtgaagaatgtgacaaagcttttaagcatttctctaaccttactacacataagaaaattcatactggaaaaaaaccctacagatgtgaagaatgtggcaaagcctttaagcactcctctaaacttactacacataagagatttcatactggagagaaaccctacagatgtgaataatgtggtaaagcttttcacctatcctcacaccttactgcacataagataattcatactggagagaaaccgtgtgaatgtgatgaatggggaaaatcttttaaccagccctcaatttctaactatgagaattgatatgaaatataaaccctacaaatgtaaagaatgtgacagattttttaaggaacttctcaacctttattacacataattcatactggaaagaaaccctacaagtgtgaagaatgtggcaaagcatataacaagttctgtctttttttttttttttttgagatggagtttcaactcttgtcacccaggctggtgtgcaatagcacaatctcggctcactgcaacctctgccttctgggttcaatccattctcctgcctcaacctcccaagtaagggggattacaggtgcccacccccatgcccagctaacttttgtatttttagtagagacaaggttacaccatgtttgtcaggttggtatccaacccctgacctcacatgatccacccacctcagcctcctaaagtgttgcaattacaggcatgagccaccatgcctggccacaagttcttactattaagagacatggtgataattcattctgaagaggaactctacaaacctgaaagatgtgacagtgcttttttcaacacttccatcctttctatacataaaaaatttatactagtgtgaaaccctagaaatatataaaatgtgaaacagcctttatatggttgccacatttgatagtaagataattcatactggcaaaattcctacaagcatgaagaatgtggcaaaacctttaatcaatgtgtacatcttattttgcaggaaagctattatccctgagaaaaattgtacaaatataaagaatatggaaaacccattaatgcctactcacatcttactcaacataagaaggttcatagttaatgaaagcattaaaagtgcaattactgtcaaaaaatctttcagaaaatataagcctttaaagtgaagaagagtatttattctgaagacaaccattacaaatatacaggaggtttattacacacattttgtactagaggaaaatcctgaagcagttgctcaagctttgctcaacatcagagaacttatattggagaagagtcctgcaaatgtaatgaatttggaaacacttt

SEQ ID NO: 1148 - DNA, 1807 bp, Homo sapiens
aaaaaattaaaatttaagagcaagcccgggaatttacggtggaggggtgcaagttccgaggggacgccggaaaagcctgcgacgtccacccctgacgaccgccctcgggggcgaactgccgctcaggagggcgatccggacgccctgcccgcggccccggcacggcagccccggcgcggcggcccggcttcggcttccgccccagcccggtcccggcgtcctgcaccgccggcccggcctcactcacagcatgatccgcgagacgtgcagccgcaccgggacgctcctgtctttgaaggcggtggtgatgaagcagccgaaggtgagcgccgccatcacgctcagcgagaaggcgaacagtgagttcgcccgcgacagcaccgtgttcatcgcgatcgtctcccacgagtccggactccacacgcacacccaggctcccgttccggcggcggaccggctccctgcgatccgcgccgtctgcggtgcgcgcgttccgggagcgcgcgccgccgcagccccgcctcctttccggtcctccgacgcgagcgcgcgcgcgcccgcttcccgaaacacacccacagcgcgcacggggcggcgcggaaagggagagactcagccgcgggcccgcccctccgtcgcggcctaacgccgctaccaatcagcgacgagtgagggaggggcggggtttgttgtggaagacccaccccctcctcttctaaattgcttctccgacctttgggttcagagaattgggaaccggtcgttcgctgtcctttttcggttctttggtcagaggtctgggactgcgacttcttgattacttatgtaccatttattttcacttgaaaccggcagcaagttaaggtggtttagaatctgtcctgacgggtggcgtttggaagcagcactttacaaaacgcctggtcctctcccttctttgtcaaacctggtcaaagttaggacttgagctttttttggaggatctgaggagcagtggggagtggggaattagccgcccaagtccttaaagctgtcacgtgcatcagtatttccacctccaacgtcagtccaattcctattaatgctttgctttgtatggatagctaaagatgttttagaagataagggttgaggctaccgatcctaagtatttgcattttaacatggtgatttctgataaataaaaggataacctttctgggttcttaggagcaaagaagataatggctgcggaattgctctacagcataatgtataagaatttcgttgggtcattaataaataatgcaattattttatcacattttcaatatcctgaagggcattagggttcaaaccgagccaatcctgactctgattatactatctgccaaaacctttgttcctttcacagctaagggtttttataaaaatggattcagggtctgctgaaataaattttttttaaaaatttcagtccataaaccaaacaaaaatatctgtcctggaatgtgatcaggaacaaaccagaaaactgtgaacatctgatcttgatactggcttatgttgtctcttgttaagcttttgcttctttgcattattcatgaccattcaattaatttttgtatagccatacaggtaggattattaccaagtgcctaccgtgtaccaggaatagttctaagccttgagaatacagcactaataaggcagactccctgctcaaatagagccaactaatgaaaaatcgataaaatagagactaaagagagatccttagttgcgtttaaaatcttagtttttaacttccaggctggcacagtttgtt

SEQ ID NO: 1149 - DNA, 2545 bp, Homo sapiens
tatatataaaatctagtgatttcgatgtgtttgtataatttttagaaaatgggattctaccagaatgtgaacatttatggtcacctgcctggcctaggactaacccaggagtttgtgtttcactatggaactttgtcctgtagatctatagcaatcccttgctttaacaacccagttgactactattttagattccaggataatatttttgatgtgctgattttgacagagtaatggtcctgtcagtaaacagtgctgcatttgtgattgtggtacgttttttctctatgcatctcaggtacaattccagcactccccaagaatgtctagattctctaggagtgcctctgacatcattgcatgcacaaaagtgctctattccagcagcagcactgtcatggtgagatctagtgagatagaatatgaatattgttagttttcaaatgcgtggagagagattcataaaggaagaatggaaaaagacatttgttattatttaaaggggtttaagtctaaatttgaatagttttttttcctccttcagcatagagatgtctgaataaatgaagtctgcatgtaaaaatgcactgttggaagttctgttagcatgaattgctgataacagtgatttgagtgcaaacactttagaaatccgtcatccattcagtctgccctgaactttgacactgtcattctggtgatgatgagaaggtggagctactcttcccaatttcctgctttggcaaggctctcagacctagaaatgggatgagtaggcagctgcatggtgcctcttaacattgagatatgtgctctttttaagtcttacctcctaatctgcctttgggattatgctactggtgtcatactaacatcagaggtggtacaaacccaaggggctaattctctcactctcctttcccttgcagatgatcccagccctagactcagtgcacaagctcaggtggctgaggatattctggacaaatacaggaatgccattaaacggaccagccccagtgatggagcaatggcaaactatgaaagtacagaggttatgggtgatggtgaaagtgcacatgattctccccgtgacgaagcactgcagaacatctcggctgatgatctcccagactctgcaagccaagcagcccacccgcaggattcagctttctcttacagagatgcaaaaaagaaactgaggcttgctctttgctctgcggactctgttgccttcccagtgctgacccattcaacaaggaatggtttaccagaccacacagacccagaagacaatgaaattgtatgcttcttaaaagttcaaatagctgaagcaattaatttacaagataagaatctaatggctcaacttcaagaaacaatgcgctgtgtgtgccgttttgataataggacttgtaggaaactgctggcttcgattgctgaggactacagaaaaagagccccatatattgcttatctcactcgttgtcgacaaggactacagaccacacaggctcacctggaaaggctattgcaaagagttttgcgggacaaagaagtggccaatcgatactttaccactgtctgtgtgagattactgcttgagagcaaagaaaagaagatcagggaattcattcaagactttcagaaactcaccgcagctgacgataaaactgctcaggtagaagattttctgcagtttctttatggtgcaatggcccaggatgtcatatggcaaaacgcgagtgaagaacagcttcaagatgcacagctggccattgagcgaagcgtgatgaaccggattttcaagctcgccttctaccctaatcaagatggggacatacttcgcgaccaggttcttcatgaacatatccagagattgtctaaagtagtgactgcaaatcacagagctcttcagataccagaggtttatcttcgagaagcaccatggccatctgcacaatcagaaatcaggacaataagtgcttataaaaccccccgggacaaagtgcagtgcatcctgagaatgtgctctacgattatgaacctcctgagcctggccaatgaggactctgtccctggagcggatgactttgttcctgtgttggtgtttgtgttgataaaggcaaatccaccctgtttgctgtctactgtgcagtatatcagtagcttttatgctagctgtctgtctggagaggagtcctattggtggatgcagttcacagcagcagtagaattcattaaaaccatcgatgaccgaaagtgaccaagaccaaggcccaccaaggcagcagactgttaatcagacaaacagatctctgagaaggtgcatcagctgctttgaaggctgaagattgttttgtatgatactgcacagcatcaggcattttaaagcagatctttactaaacaggttaatgagctaacaagcaggttctctcgtctttgggctctttcctttctgagttgcatattttattttcttgtccccaagtagagactagtactacaaaaagggaccacatttttcaagtatttctaagtat

SEQ ID NO: 1150 - DNA, 1923 bp, Homo sapiens
tgcaaagaaggtgcaaataagggtttggtggctcctcccaacctttctccaggacagcctgggagactggactgctgggagggtctagggtcaaaagcatgtcccaaagggtgtatcctaattctccaagtgagacagtgactgccccttaatcctgccagcctcgagggccacatggctttggcctcacttggccttaggatttgtctgcagagaagggaaaatccaggtagctgtggttccaatgaggtggtggtttattttctctcaggtagaagaatttcagaggctggtggtctcggctggaatgggtggctccacaaagtcatcaggcacccagctttcttctgtcactcttcttcatcatccttagcacagaccttctatctttaaagaagcctcatgattcaagatagctgctacagtgccagccatcgtgtcatgttttaggcaggcagagagagaggatgaagggcgaaaggacgcgtcttctagctgagttggtcctttaagatctttcctggaagcttcatccaagggcttctacatacctctctgtgaccattctgtctgcaagagatagagaatcataaagtcttttatctgaggaatttgctgcccagatggaatcagggttattttggaaagaaagaagggcagaatcgcttgttgggcaggcaacctgctgtctgtcctacaggtctcaacttgtcacactctcgggccatttggctctgcctctgggagggaggagactgggttggggaagagtcacagtggaatattcaagttgacctcacagcaaaggtgttggatgaagacagaatgtagatatctgaaaatagatcctgacatgccctcaggattcaggtgtctgacacagaaaaattatttttcgtttgttcctgtgtccaaggctggaagtgtggttacggctctgttcccaagtctgggtcctctaattgaacacgaggaaggttccactctcaaaggctctggccggcggccgcctagaacacctccccgtgcagccggggcatggaacccgcagggaaagcgaagcctgcagctcactgttgcccagctcggttcttggtcttggccagcaaggctatgggatgatcagactttgtttttgatcctcttcccacccgcggggagctcagcagccacactgggttttccaggccatgtccatttgtctgagtttgtggggggaaggcagaaaggggctgaaaagagacccagaaatgaaacttcccctctggggccattcactctgtagttttaacaaaaaggctggaacaggctgggcaccgtggctcatgcctgtagtcccagcactttgggaggccagggcgggaggatctcttgagctcagtagttcaagaccagcctgagcaacatggcaagaccctgtctctacaaacatttttttttttttttgaggcggagtcttgctctgtggcccaggctggagtgaaatggcgcagtctaggctcactgccacctccacttcccagattcaagtgattctcctgcctcagcctcctaggtaactgggactacaggtgtgtgccaccacacccagctaatttttgtatttttagtagagacggggtttcaccatgttggccaggctggtctcaaacccctgatctcatgatctgctctgccagcttcagcttcccaaggtgctgagattacaggcgtgagccactgtgcccagctccccccccccaccccgccgccccgtttttttttaaaattagctgggtgtagtggtgcatgcctgtggtcccagctgctcaggaggctgaagcgggaggatcgtttgagcccaggagttcaaggttaacagtgagctaagatggtaccactgcactccagcctcggcaacagagtgagaccctgtctccctgt

SEQ ID NO: 1151 - DNA, 4012 bp, Homo sapiens
cttaaccaatgagaatgtattgtcacagcatgtctcctggctgtgtgtggacaaggcgtcacctgacccttgcattggtcgaggattggcagatagtctcgggacctcggacccctgggggggcggtcaccaccctgcctctcaggctggggggctccaccaatcagaacatgccatttccaatcctcggcacagccccttgtgtgggtgccacacattgtcttttactcccagcccctctgctgtctctgacctgccgtcagccctgcaccatgggcgctgtggaggcggaagatcagcgtggaggggatgtttgctcagagtctgacgcctctcatccgccccctctgcctggcttcacatggaacactgagggttacatgaggccctctctcaggtctggggagtgctgaggtcaggagcactgactctgggcatctgctgctgataatcactgtgtgactttgggccagacacctcccctttctgcacctcggtgcttcaggacatagagcctggcctacaggaaggattgtccctgaaggcaatcctggccaatgccccagtgaaagcaggactggggatgagggcagcggtggagggaaggtgtgaggctgcttgcagaccccttcctgcaggaagccctcagcgggtaggcagcagattatgttttgcacatgtggaatccaggatctagggctggaagtaccccccagggtcatctagtcagcctccctgtggatgcagcaggagaagggacagagcccagcaaggcacaaggatagcctgagggccagggaacccacggggtgcagtgcttgtgcccaggagggtcagcatgtgaacgcgcctttctccctctgcctgagaatggtcaggccacagactagaggttcatggagcccaagtgctggtcccagctctgccttggtctctgagcttcatgaccagtctgccccatcggcacagcctggctcagggtggtaaactcgtgggtgcttacacaggcgagataggagtgtgttgggggtgataaacagcaggctcagacaggcaggagggacttcccggggacgtctagactctcttcagcctggcagctgccccacctcgctatctgtcggcagccaaggtacagaggacattgtgtggcttttagtacttggtggccattctaagcccctaacctgggaacagaggagcttagcttctgcttcggactctgtcagagccattgctgctatcactgtccacttcccttgccagatgccgtagaacaaattcatatgaaatgttgccttcacccatgtgagttactctcctaaccttgaaaatgaaactggcttgttcccctgcagcttcatacctgcacactggcagactcagttcccgccagcggctgtgaccctctgcctgacacctcctccactctgtcccccaggtatagatctgtgagaatcacaaagcctgctggtccagcaccccaaaaacgtaaggccactcagtgcatgcacgcagaggggaatgatgtgcccagggtcataccctcctccctgctgagtgtccctggcacctgcagcccctccttaccagccctgctctctcgcccttccacaccccttctccaggcaaagctgggcatgtggctctgagagctcagctttttaactcttctgctgttttctcagccacacagtttcagcgcattacttaagcaatcacagccctttccaaactggcacagatctgtggtctcttcggcgtggtgggtaggtgagtctttgctggaatggagttttacattcttcttgtaacacacatgccgtttcctttctgcagcctaagcgagtgcgccgcctgcttctcagacgtgtctaggcaattctccgatgaaatgacccttcactgaggagcagaacttgccacaggctctgtaattagaacattgccagccttaaaaaaaatcttgatttaaattccagttctttacaggaattagtctctcttgaaatgtaattggctctcccaacgatttcctttaagctaagggtgacatctctaaatacattattatgagcagacatattgcttagtgctcgcacttcattaagcatttgttctgcccatttaaaaatggtcctggagcccaaattaaggtgttaatagagtgggcacttgtaagcttgggaagcccagtcctgactggaagagatgtgttcaagccctgagagcccctgtgggagcgacagcggctaggggcggagctggagcggaaaggctgcaaaccttcaagtctgcttggagctcaggttgggggagtctgctggaggccgtggagatgggggcaggtgatttgtcagaagctccagctttctacctaagggacagacacccgataaagtggactgtgctttggaaaatctaaagcatccacacgtctggtggcagaatcacagtagaatcataaaaggcgtggaactgagtgggcaggcagaggacaggctggtggaggggtgagggatccagtgtggctgcagccctggtgagagctgggagaggtctgctggggctaggcaaatgctggtgggaggactgtggctttggccctcgtgagctgatgcaggcaggctgcaagggctgtgtgctctgatctctgagaaacccacccactgcttttccttgagcagacttcaggtggctcctcccaagcaggtctgaagccaagcatggtggacatagactgggccctgctccatggcatgctcagaggagccgggatggtggctaagtacctacagttcaggaaggcatgcgtgtcctcagtgccaccagatgaaggaaggagctctgcctgtgggagcctggaaaaccacccagcagaggcaacacaggctggaccttgcaggagacagggtttataaagaagggcaggtagtacagactttctgcccaccttccagtggctaagccaagtcacatggctaactgcctgcaagggaggctgggaaatgtagtccctggctgggtggccccttcccagtgacagtttcctactactgaaagggaagcacagatcacttgccatccctgccacacagtttcctcctctggaaactgggggtgatgacccctgccctacccacttgtcatggcattggggacatgaacacactttgcacctgtcaggcaaggcttaaacagggatatgcactggtaatagaaaagagggactaagttttgttttgttttgttttgttttgttttgttttgttttgttttgttttgtttttctgaagaagtccctagaagcgctcagtgttggaatgctctcttgtagcagtggcggctgctgctggttccgggtcagatgccggaattgggggtgcgcttgggtgcagctgcatttcatctggtcctgggcctcggtcctggcttggagaggtgcagctcacagccacttcatggctgggatcccttctgtcccagacagctgaggagacccttggcctcagcctgagtgtcaggggggtagttctgataactctgtgttttgttcacaggagcaaccagggttttatgcacatgaaactggccaaaaccaaagagaaatacgttctgggtcagaacagccctccgttcgacagtgtcccggaagtcatccactactacaccaccagaaagctacccatcaaaggggctgagcacttgtccctcctctatcccgtggctgtgaggaccctgtgagcggaccagacctgccctgctctgtgacagagcctgagacttggaggtgccagaggccccccaccaaccagcccagccactgttgctggctgtgtcgtttgtgttgtgtgtatggtactagcacaccactgcatgtctctagaatgctgttgccacttacgggggctggagaaggcctggataaagacagaagggcggcaacacaccaccccagcccccacccccaccctctccttgagtttctgtgaattaaaatatttgcaaatcc

SEQ ID NO: 1152 - DNA, 2210 bp, Homo sapiens
cggtgtaccccttcaccaccctctggtgtcccctgctctctggtgtcccaatactctctgatgtcccaatactctctggtgtcccctcattactctctggtgtcccctcactgccctctggtgtccccgcaatactctctggtgtcccctcaccaccctctggtgtctcaatactctctggtgtcccctcaccgccttctgatgtcccctcaccttctgatgtcacctcattactgatgtcccctcaccgccttctgatgtcccctcattactctctggtgtcccctcaccaccttctgatgtcccctcaccgccttctgatgtcccctcattactctctggtgtcccctcaccgccttctgatgtcccctcattactctccgatgtcccctcaccgccttctgatgtctcctcattactctctggtgtcccctcaccgccttctgatgtccccattactctctggtgtcccctcaccaccttctgatgtcccctcattactctctggtgtcccctcactgccttctgatgtctcctcaccgccttctgatgtcccctcattactctctgatgtcccctcattactctctggtgtcccctcaccgccttctgatgtcccctcaccgccttctgatgtcccctcaccaccttctgatgtcccctcattactctctggtgtcccctcaccgccttctgatgtcccctcaccaccttctgatgtcccctcaccaccttctgatgtcccattactctctgatgtcccctcaccgccttctgatgtcccattactctctgatgtcccctcaccgccttctgatgtcccctcactgccttctgatgtcccctcactctctggtgtcccctcaccgccttctgatgtcccctcattactctctggtgtcccctcaccgccttctgatatctcaccaccttctgatgtgccctcattactctctgatgtcccctcactgccttctgatgtcccctcattactctctggtgtcccctcaccgccttctgatgtcccctcattactctctgatgtcccctcaccgccttctgatgtcccctcaccgccttctgatatcccattactctctggtgtccccccaccgccttctgatgtcccctcaccgccttctgatgtcccctcaccaccttctgatgtcccattactctctggtgtcccctcaccgctttctgatgtcccattactctctggtgtcccctcaccgccttctgacgtcccctcattactgatgtcccctcaccgccttctgatgtcccattactctctggtgtcccctcaccgccttgatgtcccctcattactctctgatgtcccctcattactctctggtgtcccctcatcgccctctggtgtcccctcactgccctctggtgtcccaatactctccggtgtcccttcactgccctctggcgtcccctcaccttctggtgtccccattactctctggtgtcccctcaccaccctctggtgtcccctcagtactctctggcgtcccttcactgccctctggtgtcccctcaatactctccggtgtcccctcatcgccctctggtgtcccatcaccctctgatgtcccctcaccaccctctcgtgcccctcattactctctggtgtcccttcaccgccctctggtgtcccctcaccttctagtgtcccctcattactctctggtgtcccctcactactctctggtgtcccctcaccaccctctggtgtcccctcatcaccttctgatgtcccatcactccctgatgtcccattactccctggtgtcccctcactgccctctggtgtcctgtcaccaccctctgatgtcccttcattactctctggtgtcccctcattaccctctggtgtcccttcatctgctccatgtcctctactctttctgctagcaaagaccagcgactgcagcacgggggccacacctgggatggaccctggaggggcaagcatgtggttcctttgacactccacacagaaggcccatgcaaggccatgttcaaccagagggatggaagggggacactgaaccttctggtacagggtgggctctggtagggggcaagagcccaggagactgtgtggtttgtcctcagcctctcctgatgcttccagggcatgtccattttcatgtaaacttaagagacagtgtcaacagtaaagagcctgctgcctg

SEQ ID NO: 1153 - DNA, 2646 bp, Homo sapiens
aggttcttgttcttgggaactgtgagttcaggcactaccagcacgacagccagagggacggacggacggctggacaggctggaggcccctgccatgggcactcaccccgtgggacagacagaaggatggatggacggttggacaggctggaggcccctgccttggggcactcaccccgcaggatggacagaagggcggatggatggctggacaggctggaggcccctgctatggggcactcaccccacgggacagacaaaggatggatggacagctggacaggctggaggcccctgccatgggcactcaccccgcgggacagacagaaggacggatggacggctggacaggctggaggccccttccatggggcactcaccccgtgcgacagacagaaggacggatggacggctggacgggccggaggcccctgccgtggacactcaccccgcaggacagacagaaggacggatggacggctggacaggctggaggcccctgccgtggacactcaccccgcaggacagacagaaggacggatggacggctggacaggctggaggcccctgccgtgggcgctcaccccgcagttgctgggcctccgtggggtcctgggaaatttcaacagcagtccagtgtgcgggccgcgcctttgttctgtccagccagcggcccaggctgcgcctttgttgtatctggccgccggcaggccaggcaccttctgaggaagggttgctgcgtgtctgtggctcacggaggccttcctctgtgtgtgactcacaccccccacccaccccagcccacttctgggagcatcttcctgggggctttggaggcccatccattcttccctagggacaaaagtgcagggagcggcgtcccaggtgccaccgtctctggggaacgtgggccaggactccctttgctggacacagaccctgcccacactgggtgaccgtggggtgacctcacagggtgtgtggggttctgaagccgccaccctccttcctgagcctgcactttgacctgggactgctgagcccagaagggccttgagagggctggctcagtggcacgtgggggccttgggtggttgggtccccgagacaggccatctcgctccttgtgtggcaggctgcggggccctgcttgcctgggtcccacgtggtagaactcggcgtttggtgggggcctgctggggacaggaagggacagcaccccaccctgagctggcactcatgcttcactggagccaggcggaggggccgagggcaccggcacaaggtgcagacgtgtcggtccctttgaggaccgagatcatgaccaccacggagcaagcgcccgggtcctcagatcaaaggcccaatagccagtgaggcttctctgcactggtcccagcagaagcggggcctggctgaggcagtggcatcagagactcggggcaatgggagtgcgaggggggtctcagcgtcccacagctgctgtaacaagtcgccgtaaacacagtcactcaaaacggcacgagctgatggcagcagtggagctggaggtccaggatgggtctcaccaggctgaagtcaaggtaccgacctcaggggaattggtgtcctgcctttcccagcctcagaggccccacttggctgtacctgggcagctgctccgctccacgggcctagcctcgctcacagggctccaagaacagagcctggatcgtcctgagggccccgtgatgtccccgtcacagcaaaggaagatttaggatgcactggaagcccagaagtccagagaaggggctcagagccatcggtcgccacggggcacctcgggggtcccacgaacactgcagcgggcgtcagaccctcaagcgtcggtaagggcctcaccgccttgggaggggtcagcagttaccggaggactctgggcagtggcagggagcagcaacaagggccccccattcaggccctcacccccggcacttggaggaggtgccgcccctgcctcggaagcctcgagggcaacctgcaccctcaggaggcccagctgggggcgtcactgcagggcaccggcagaaactggggtctgaaaacagcagcccagagtggatttggaacagaacagggtgtcacagaaaggatgtttcatgaggtgggttttgatgagtatgtttaaataaatgtaacttaattgatgttaaatatgcatcttaatgcttttctaaaatgtgcaattgggccagttgcggtgactcatgcctgtaatcccagcactttgggaggctgaggcgggcagatcacttgaggtcaggagttcaagaccagcctggccaacacagcaaaaccccgtctctactaaaaatataaaaattagctgggcgtggtggcaggcgcctttaatcccagcactttaggaggccaagcgggtggatcacctgaggtcaggagttcaagaccagcctggccaacgtggcaaaaccccgtctctacaaaaaatacaaaattagctggctgtggtggtgtgcgcctataatcccagctactcaagaggctgaggagggatggtcacctgaaccccggaggtggaggctgcagtaagctgagatcgcgccattgcactccagcctgggcgacaaagtgagactctgtctcc

SEQ ID NO: 1154 - DNA, 2676 bp, Homo sapiens
tatcctgtatgaaaatgctatttttgttttcaaaacacttcctgatgtgttctcttattttcatttcaaaacatttttataaggaccccgacagggtgaaaaggccacgcagatgccaggagggcagaggtggcctcggaaggctttgcggctggatgtcctcagggctcctgacacctgaggcgggctcccctcttgttcccaggcccatccagcccctgtggcaggtggcaggggctgggggtgctccagtcctagagtcccagttggggataggcagccgagggcagtccctgaacctccttcggattctgagcctctgggtatggaggctagaggctgcctcccaggcactgtcttacaaccatttctgttgaacaaaagaaccttgcagaacccggagccaatcactggaagggtcagagcctcctaggcatcttcctctttgcagctggggtgcccagggcccggctggagtgacaggctccctgcggtgagtgctggccaggctttcctgggcatcaggggcctgcaggggaactggcacagggagaggcggcccaggctcctcccgcttcgctgccctcctcctcccctgccctgccctggaaggtgggtttccctcgagcctgcacgctgcccctctgttctgcatggaagctgtcacctgtctcctgtaggtgaatgattcccaagtctactgtcccaacctcagctctcttccccagcctttatccgaggcatcctgaccatctttccccggaggtctcttccaaatcccatcctcaattgaacggaaacccgtctcatgttcactcaggaaccactggctcctccagtgcacagatttgcaaccgattcccatgcctcctttctagcctgaagcccaggactcacccggggctcccctctctgctccacgccattcagcaagcttccacggagcgcctgcacgctgtgctcgccacggagtaaaacacaagcaggacatttcagcaagcttccacggagcttccacggagcacctgcacgctgtgctcgccacggagtaaaacacaagcaggacatttcagcaagcttccactgagcttccacggagcacctgcacgctgtgctcgccacggagtaaaacacaagcaggacatttcagcaaagcttccatggagcttccacggagcgcctgcacgctgtgctcgccacggagtaaaacacaagcaggacatttcagcaagcttccacggagcttccacggagcgcctgcacgctgtgctcgccacggagtaaaacacaagcaggacatttcagcaagcttccacggagcttccacggagcacctgcacgctgtgctcgccacggagtaaaacacaagcaggacatttcagcaagcttccacggagcttccacggagcacctgcacgctgtgctcgacaccgagtaacacaagtaggacatggatcctacaattagcaacagtagacgggccgggtaattgaacattacaaacagctgggaccctgaggggcagtaggactccaaccgcttgttttgtacatgaacaagaggagaccccaagagattagaagactgctcaaggtcgcaagctaaaaatgggcagatggggctgcgaccctaggtctccttggccccaggagttctcttcctgcggggtcacagcctttccctctccaggcaccgggttgagcaggcgggaacggcaaaacacagacagaaacctctcatcaggacctccaagttctgcagttttaccccgtttcattgcagaaagaaaacgaatacaagcaaacatatttgctggttggcctatcaacatcccaagatttctgagagctaaacacaggacttggcacacacctaaattgtatctgatatggtttggctgtgtccccactcaaatcctatcttgaattgtagctcccataattcccacgtgttgtgggagggacccggtgggaggtaattgaatcatgggggcggttcccccatactgttctcgtggtagtgactaagtctcacaagagctgatgattttataaaaggtttcccctttcacttggcactcatttctctcttccctgcagccatgtaagacctgcctttcaccttctgccatgactgtgaggcctcccctgccacgtggaactgtgaggccattaaacctccttttctttgtaaattacccagtcttgggtatgtctttatcagcagcatgacgatgaactaatacagtatcacacgtaaagaaacaaaaagcttatcactatcaaacaaagtgtttaccataacaaagtttaaggcttgaacatgtactctttaagataatgcaaagaacatacactctggtaattttaatttcagcctgaaatgtcctatatccacactgtttcctaatttcctaggggggaaaatcctatttaatctgcaccatgttcactcctctgtctgttctccgctggctacccagctgcgggaatgtctgatttttcacttgctgatttagaggctcgtatgacacattcaaccttttaaataaatcattcattttttttttaaaggttggctatgtcatagtgttgtgatgcacccaatttttaaaataactgtttatttgatgtcaggtacatcagacagaaaaataaatgtgacttggtagagctt

SEQ ID NO: 1155 - DNA, 2555 bp, Homo sapiens
tttcctcccgccgcgccctccgcctccgcccgcacctcgctagcgttcccctgtcttccccaacgccccggagccgccggccgctagcgtcagcgccagccagaattaaggaagttcactggagtaaaatggaggcctcagtaatattacccattctgaagaaaaaactagccttcctttcaggaggaaaggacagccggagtggcctcattttgacaattccattatgcctcgaacagacaaatatggatgagctgagtgtcaccttagactacctactcagcattccaagtgagaagtgtaaggctagaggatttaccgtgattgtggatggcagaaaatcacagtggaatgtggtgaaaacagtagtcgtaatgctacagaatgttgttccagctgaggtgtcccttgtttgtgtggtaaagccagatgaattctgggataagaaagtaacgcatttttgtttttggaaggagaaggatagacttggctttgaggttattttagtgtccgccaacaaattgactcgttatatagaaccatgccaattaacagaagattttggtgggagtctcacctatgatcacgtggactggttaaataagaggctggtttttgagaagtttacaaaggaatctacatcattattagatgaacttgctttgattaacaatggaagtgataaaggaaatcagcaagagaaagaaaggtctgtggatttaaactttcttccatcggttgatcctgaaacagttcttcagacagggcatgaattgttgtccgaattacagcagcgtcgatttaatggctcagacggaggggtttcatggtctcctatggatgatgaacttcttgcacagccacaggttatgaaattattagattcactccgagagcaatatacccgctaccaggaagtttgtaggcaacgtagcaagcgcacacagttagaagagattcaacagaaggtaatgcaggtggtgaactggctagaagggcctggatcagaacaactaagagcccagtggggcattggagactccattagggcctcccaggccctacagcagaaacacgaagagattgagagccagcacagtgaatggtttgcagtgtatgtggaacttaatcagcaaattgcagcactcttgaatgctggcgatgaggaagatcttgtggaactaaagtcactgcagcaacaacttagtgatgtttgttatcgacaggccagtcagctggaatttaggcaaaatctcttacaagcagctcttgaatttcatggtgttgcccaagatttgtctcagcagttggatggcttattagggatgttgtgcgtagatgtagcaccagctgatggagcatcgattcagcaaactttaaaactgcttgaagagaagctgaaaagtgttgatgtgggattgcaaggtttgcgtgaaaaaggtcaaggtctcctggatcagatctccaatcaggcatcctgggcctatggaaaggatgtaaccattgaaaataaagaaaatgtggaccacatacaaggagtgatggaagatatgcagcttagaaaacaaagatgtgaagacatggtagatgtgcgaaggttaaagatgcttcagatggtgcagttgtttaaatgtgaagaagatgctgcccaggcagtagaatggctaagtgaacttctggatgctctgcttaagactcacatcagattgggcgatgatgctcaagaaacgaaagttttgctggaaaagcatagaaaatttgttgatgttgcacagagcacttatgactatggcaggcagttgctacaggccacagttgtgttatgccaatctttgcgctgcacttctcggtcatctggggatacacttcctcgactgaacagagtatggaaacaatttacaatagcatctgaagagagagtacatagattggaaatggctattgcatttcactcaaatgctgaaaagattttgcaggactgtccagaagagcctgaagctattaatgatgaggagcaatttgatgaaattgaagcagttgggaaatcacttttggatagattaactgttccagtagtttatcctgatggaaccgaacaatattttgggagtccaagtgacatggcttctactgcagaaaacatcagagacaggatgaaactagttaatctcaaaaggcagcagctgagacatcctgaaatggtgaccacagagagctaatagctaccagctacctacagatttgcagttcataatcccgcatgttgtcaacatactacagcattagccaccacaccttaagatgcatttcacagccaaaataagtctcatttcttttcatgacacatttctctttacatgttaacaccttgctactaccaaggcataattacttaacatgcttcgaggctgtagattccaagtatcttaaaagaaggaactataaacattgcactgaaaacttgctttaaagctttacctgacctgtcagtttgtagacaaacaactgataataagctttgaatggtgctaataagagtaggaattctctctatt

SEQ ID NO: 1156 - DNA, 2843 bp, Homo sapiens
ttattgtatgtacaaatagagaatggaagaacaaaagaatgaggaaaggaagcaagaaaggaaggaagaaagggtgggagggaggaagaacggaagggagggaaagacaaatttcttctcattctttatccctctttgagatgcctctctgtggatcctgtcacctctactggggagcaaaaagaacacagaagttggagccgacggatcccatgcctagctgggtaattaggcaaatctcagcctctggaaatgcagcttcttctgtaacctacctcagagggctgttgtgaggattgaatggggtaacatttaaactaactggcaaaagcaggttctcaatatattaaaattcacatgaaaaagataaaccaggaagggagttggcaggaagccaggaagcctcctgtgttctctgcaggaggcttatctagttcttcaggatcttgggaacagctagtcttcctctgctgcattctgagagttaggtgatgagtcaccacctcaagaggccatctagttctggccgatctatctgactggatcgtggaccctaggacccagctaacttgttctccagccaatttagaagaatgagtagcaaaaataatatggcaagtatttcttgaagtgccctaaccctctgtccttattagtgtaccctgtcaggagtggcctgccttgactttctgtcaaactggagcagcctgagactaagggcaaatgccctcttggccttggccggccacaacttggatatgcaggtcaggcttattgttagggaagctctgagactcaattaatctgatgcctttttattatgagttcaggtgcagctccatttacaagtttttctttcaaaatcattcagccattaaagctgcataatcttggaaggttttgaagacacatgattggtaaatgtttttccccttcacacattatctctcatgtttattcatgaaaagtgaaccagtcttataatttaaacagtgtcttggggtatctggcctcctgtatttctaagggggaggaaagatgaggctatcccagaagccatttaaaaaggggatttgaggcctgaacgcagagaactcaatcccaggtactaatgaccttgctttggcttgcaagactaagcctgaggcctgtggcacttaagagggttactgggtacccagacaggcaaatgcctgttgattggatggctaaattgtgaagaaagcaaagcttacctgtgcaatgtgtccatgccttcattcctactttctgaatcaacagtgcctgttattgttctgcccaactgttaagatgttccacctgtgcctgctctttggcgcagtactccaggctatagaccaacatttctcaaacctggctgcacattagagtcatctggggatcttttaaaaacccagctgccttggctgcacatctgatcattacgtcagactcttgtagggaggagtatagacatcagcattgattaaaactcctgagataattccaatgtgcagtcaggattgagaacagctggtctacaccagttcctcttgaagtatggtctgtaagtcacaggctgcagaatctccttggatgtttgtgggaaatgcagattgctaggttcaccagccctataggcactgagtctcaaggtgagatctggaaaatgtgttttaataagctccccaggtgattcctaagctttttgcaagtaccgctgcttcttatgatatggccgttcttgcttcccatcagttatccttgtctttcagttcctcaaagatatcaagtttcattcatcctcaggaccactgcatatgatagtcgctctacttggaagacattttcctctttctccttgttattaggcatttggcagacttaacaatgaggctattgtaaccccagaaagtcattgcaaagtgcctgcttagggggttaagagtagacactgcagggccttggaatagtaatggtttactatttaatgagttccctgtcactggaagtcatagagagattgctccaggcatggtgggagaaaagccagtttgacaggcggtggagggataagagggaagacttgagtgacgtggcacaaactgggtcagatctattaaagaggcagccctgggcagctggcaagagatcatgtcaagagacacaatgcaggtgccagcaggaccagaagatcagcttcttagagcgagtgccacctggaagggggaaaccaagggaaggggcacagcaaagggcaaagctgggtggtggaggaagtacccaaacagagggaagagccactctggccacatcaagtgaatactgatgatcgggaaacattcatgggaagttatttcactctctcgagtccagtgtaagtgagaaagtgtaatttaatttaaaagagcctaatttagccttccatcaactgtagatcttttaacgagacctttattcttctaggacagcatttctcaaactttaatgtgcgtaggaatcttattaaaatgcagattctgattcagtacgtctggggtaagggctgagattcagcacttctaaccggctcctagatgcccccggtctgagcactacacttagagcaagcaggtttgaacattgcgacttataacagtggacccatggtgtagacaagtccagaaattactgctgaatcaacagtttttatgttagcttccgtataccttcagaattcagtgtttgtgtgcattctaattctctaaatgatgtatattagatttccattaacgaaaatatatgtttaagtggaactctccaattccaacttgccaaataaaataaaaaattcctgtcatttt

SEQ ID NO: 1157 - DNA, 2026 bp, Homo sapiens
cctttgtctctcgctgcagccggaggtcaaggtctcgtccttactgctgtgtgtcctctgctcctagagtcccagcctctgtggccctatgacctgcaggtattgggagatccacaactaagtcgccaggaccccctggaagcctagaaatgggatcattgacatttagggatgtggccatagaattctctctggaggagtggcaatgcctggacactgcacagcagaatttgtatagaaatgtgatgttagagaactacagaaacctggtcttcctgggtattgctgcctttaagccagacctgatcatttttctggaggaaggaaaagagtcctggaatatgaagagacatgagatggtggaagaatccccagggatggtgggatccagtggaccagaatcgtcaacaccttaccatgttcactgctgtcctttcgttctgtcactaagattagtttccgagactcatcaactctttctatcatgatgtgaactgttttgcactgcgttagcgtctgcctttggtttctgctcattttctttgactttcatttttcttgtccttctctggtgtttgctttgctgctccactttgaggagtttgggcagcttcaccctcagccgctccagcagttcctccatttggctgaagctctccgttcttctgttcttggcgtctgacatttgtcagcaaggcctggtttacagggaccacggctaccgcctcctctgcggggcacctccttcacttccggagggcgccagttccagtcgtgacccagctgagcacagcaggaaccgccgcagcagccggagcgcccacgcccacggtcgcccagcccggggatgcctcggctcaaagccggggtcgcggctcagcttagtgcgcagaaatccgaggtcaaccagagcatttcccacagctggccgagccctcctcgacctgcggggccagtttctcccactggctttctgctgccacctccccttccatcagagggacgctcaggattgtgcaggggcccgtagacaccgtgaggagtccagggaagtgaggaggggctgggccgggcaggctcaagcccagcgcacggccgcacccctcgcgcctgagcagagatcagccactgccaccgcggggaggacagagggacccaggatcccccagccagcctccctctgcttcaggagaggagggaactatttccaaaatatatatagagagagagagtagaactggcatatctgacccaatcgagttttcagtttttcttttctttttcgccttttcctctcaaattatgctcgcctaaagtgagagttcatttttcattctcacgtggcaatttaattttttaatggtcacaaacttagagactaaaatttttactctattttacctaagaatgatgaggtaacatcaaacttttaatagtgctttctgaattttacagtttattaccttagatttgattctatcaactaaacaataataactaaaaaagtcttggtttgcatagcttgaccatttacaaaggggatgtatttattcatttaaatgataaatgtgtgttgagcacacacgttgtgccatacttcttgctagctttaggagataaaatggagaaaaaaatattgctctttactcttataaaactttcagtcttgctacataaaattggccaggttgttctcgaactccccacctcgtgatctgccacctcagcctcccaaagtggtgggattacaggtatgagccaccccaccgagcctctcctagaagttttaaatcctcgatatacatgaacaatttttgtgttagttgctttgcaaggatccaatctacctaggtagaaccaatagtttagctattagtttattgactagttctgcttttccagtataattgtgtaactgatttctcattttaacctgttggctgaaaccatggatgcaatgtttaataaaaatcttgaacaccaacataattattatgtttatgacattaaaagacaaactttcagt

SEQ ID NO: 1158 - DNA, 1746 bp, Homo sapiens
atgcggagagtcggagggcgagctgacgaggacgctacggcggcgggaacctgggaaacaaaagtcaaatggaagcatcaacttgggatggtgttgggaaggaactatccaatttggtgaaaataaaaaggttcatcagggatgattcctgttttatctgcattaggagaggtctgggaatgtgaggaccaggtaaaaatgctccatagaaatccagaggtgcatttgaggcaaacagcatccacacacaaggacccagagcatctatgaggggctgtggtcaccatgaccattgtggtcatctgctcagtcctagcttcatgtcaaagaggtcctcaaacaacaggtttctgtgaacatgactcaaaggttaaacattttagttacatacataattgtcagaaaggctctaacggtcaaattcttgaggaaaatgatgactgtagagcagccatcagccagggtggacaacctagccaccttgatgaagatctaacaaggagatgagttcaaaatgtaacgaaggtggtaactccttcagcctttctacacaccttagtgaacaacatgtaattgccagagaaaggaacaacacaaaggagaaggacacgaggtggtgtttgatagggacacatgtccttatgaacacgatggaagtatctctggaaatgaatacaatgacagtgaatgtggactgtccgttagaccgaaatctcatttcatcagtcaccagaggactcatactggagagagcccttatacctgtaatgactgtggaaaatccctctctaagaattacaacctgattgtacatcaaaaaatccacacaggagagaaatcctataaatgcaagaagtgggaaagccttcaatgctggctccacctttaccaagcatgagaaaacccacataggaaagaagccctgtgaaaggaattggtatgggaagaccttcagctgccactcttcccttgttttgcatttcagaagtcatactgtggaaaaactattcgaatgtaatgaatgtgaaaaatccttttctgatgtctccaaccttattgtccatctgagaattcacatgtgaggggagccctatgtatgtactgggtgtagaaaggccttcattgatcacacataacttattaaacatgggagaattcacattggaaagagaccctatatgtgtatggagtgtgaaaaattctccaaccacaacagtcagctcttttgcatcaaaaaaatcattctggaaagaaatctcatgagttaaacaatgtgaaaaaatctttcactgagattatgtacctcatcaggcacaagaggattcatactggtgagaaggtctgtggctgtaaccagtgtcaaacttttcaggaacatcgcgggcctcatctggcaccagaggactcatactggtgagaagccctacgagtgtaatcggtgtggcaaagccttcagggacagctcctgtctgaccaagcacaagaaggtacatgctcaggcgaccttgtgccagtgtgtctagtgtggaaaagttttcccaagtatctgtgctctcgctagaaaccagagttgacacattggactgagacctatggggattcagtgagcatctgtggcagtgactgatctgattttctttgcctcctctttgtcagagacttcatgttgaagagtttatgttgtttgaaagtaacaaatatgtttttccatctataaatggaagaaaaaatcctggatgacagtac

SEQ ID NO: 1159 - DNA, 2227 bp, Homo sapiens
tgcgctaccatgcctggctaatttttgtatttttggtagagacatggtttcaccatgttggccaggctggtctggaactccaacctcaagtgatcctctggcttcagcctcccaaagtgctgggattacaggtgggagccatggtgcccaggtcagaaggttaaattgtttcagtaaaaagtcattctgttgtggaaatgttacaaatgcattgctaaaagggagagaaacatccaggcgtaaacacttattgtcagggatcccttatcctggtggaataagcataaactttggagtcagaattaatttgcattctcttttacttattatgagtcaggggacaagtttcttagcttctctaagcctcagcttcttcctttgcaataataacacttggctgacagtgttgtcatgaggattaaattaaatgacatctagtattctgcttggcctagagtacacactcagtaaaactgatccctttctcacttctcccaggcttagaagttttctggaggtaaattgcatagcccacagctgaagttgatctcttggttcttcctcattcttttttagtaacagaatgatagaagtttgaaaagtactggaggacaggagaacacctgagctcagggatcagactctaggataagaaactagttcagcaggaagtgtgcactgtcagcctcttaaggatcatatgctcaaggtgtccaatcccatcgcacatgtttaatacctcaaatgtcacttgatggtagaagactctctagggaactctgagaacagtacccagctgtagtggaaggctcacctgagagcaccttttagtctttctctatccttctttgtcctcatgtaatttaattatgtcctttcttgctgcagcttttaaattcaaagacctttgttattagtgtctgtcaccttaaattaccagatttgggctctcttcacttcctcccacccttatcctgtgaaacagacagtggtactgcctaatttgtttctggttgttcctcccatctccccaacacacctgacatttaacaattaattttattccaaaaagcagaaaaaacattttccaaatgccctagctatttattgagaagctctccacatccatattagcaaataacagattttcagttatgtgtgcaaatatctcaatgtactttagggatcatacagaataatggtcaatttttatattcagaatattggccaaaacataaaatagtctcaattggactggtcatactaatttatagttatatctgtatcagtattcccatattattgaagaacaaaatgaagattagacttttatatactgtttatgtactatatgctatatactgtttatgccctgagaatataaaaagtacaatatttggaccttatacctaagtttcaaggaaggcaagctagtgttagaacttaaagttcctaattctgtttttcattttgttttgttttgagatggagtctcactctgttgcccaggctggagtgcaaatggcgcggtcttggctcactgcagcctccgcctcccgggttcaagcggttctcccacctcagcctcttgagtagctgggattacaggcacccatctctactaaaaatacaaaaaattggctgggcgtgctggcgggtgcctgtgatcccagctgctcgggaggctgaggcaggagaatcgcttgaacctgggaggtggaggttgcagtgagccgagatcatgccattgtactccagcctgggtgacaaaagcaagactccgtctcaaaaaaaaaaaaaaaaaagaaaagaaaagaaactagtgttatctgagcattgacagcaaactatatactcaaggatcaattttctgttttaataaaaaatccaaatttttacttttagtataccatctgtgatggttttaaaaccacaaattccaggccgggtgcggtggctcacgtctgtaatcctagcactttgggagtctgacgtgggtggatcacgaggtcaggagttctggaccagcctgggcaatatggtgaaaacccatatctactaaaaaatacaaaaattggccaggcatggtggctcacacctgtggtccccgctactcaggaggcttaggcaggagaatcacttgaacccgagaggcagaggttacagtagtgagtcaagatcacaccactgtattccagcctgggcaacaagagtgaaaccccatctc

SEQ ID NO: 1160 - DNA, 2140 bp, Homo sapiens
gactgggatcccggccgcggctgctggaagcgtcgaagctcagcggggccgcggacactgacctgtgcttagaactcatcctggcccgcagagcctgccgcgagtccctggcgtcccctgtggcgggctcttggagccactttcccgagcggaagtcagcccgcggctcggactccggcgggacctgctcggaggaatggcgccgccgggttcaagcactgtcttcctgttggccctgacaatcatagccagcacctgggctctgacgcccactcactacctcaccaagcatgacgtggagagactaaaagcctcgctggatcgccctttcacaaatttggaatctgccttctactccatcgtgggactcagcagccttggtgctcaggtgccagatgcaaagatctctatttcaaatgagaccaaagatctgcttctggcagctgtcagtgaggactcatctgttacccagatctaccatgcagttgcagctctaagtggctttggccttcccttggcatcccaagaagcactcagtgcccttactgctcgtctcagcaaggaggagactgtgctggcaacagtccaggctctgcagacagcatcccacctgtcccagcaggctgacctgaggagcatcgtggaggagattgaggaccttgttgctcgcctggatgaactcgggggcgtgtatctccagtttgaagaaggactggaaacaacagcgttatttgtggctgccacctacaagctcatggatcatgtggggactgagccatccattaaggaggatcaggtcatccagctgatgaacgcgatcttcagcaagaagaactttgagtccctctccgaagccttcagcgtggcctctgcagctgctgtgctctcgcataatcgctaccacgtgccagttgtggttgtgcctgagggctctgcttccgacactcatgaacaggctatcttgcggttgcaagtcaccaatgttctgtctcagcctctgactcaggccactgttaaactagaacatgctaaatctgttgcttccagagccactgtcctccagaagacatccttcacccctgtaggggatgtttttgaactaaatttcatgaacgtcaaattttccagtggttattatgacttccttgtcgaagttgaaggtgacaaccggtatattgcaaataccgtagagctcagagtcaagatctccactgaagttggcatcacaaatgttgatctttccaccgtggataaggatcagagcattgcacccaaaactacccgggtgacatacccagccaaagccaagggcacattcatcgcagacagccaccagaacttcgccttgttcttccagctggtagatgtgaacactggtgctgaactcactcctcaccagacatttgtccgactccataaccagaagactggccaggaagtggtgtttgttgccgagccagacaacaagaacgtgtacaagtttgaactggatacctctgaaagaaagattgaatttgactctgcctctggcacctacactctctacttaatcattggagatgccactttgaagaacccaatcctctggaatgtggctgatgtggtcatcaagttccctgaggaagaagctccctcgactgtcttgtcccagaaccttttcactccaaaacaggaaattcagcacctgttccgcgagcctgagaagaggccccccaccgtggtgtccaatacattcactgccctgatcctctcgccgttgcttctgctcttcgctctgtggatccggattggtgccaatgtctccaacttcacttttgctcctagcacgattatatttcacctgggacatgctgctatgctgggactcatgtatgtctactggactcagctcaacatgttccagaccttgaagtacctggccatcttgggcagtgtgacgtttctggctggcaatcggatgctggcccagcaggcagtcaagaggatcgctgcagagcagagcagtagattggcaaaatataggacactacgaacagcacattagttccagaagaaagatggaaattctgaaaactgaatgtcaagaaaaggagtcaagaacaattcacagtatgagaagaaaaatggaaaaaaaaacttt

SEQ ID NO: 1161 - DNA, 2166 bp, Homo sapiens
agtgctcgttcgttcgcagggccagcaaggagagccccgcccccgcccgccgcccgccgcccgccgcctttggatcccgcggactccgcccggcccggcctccccaggcatggcgccgctgcgcttctccgccaatctgtcctggctattccccgagctccccggcctccccgcgcgggtgcgggccgcgggcagctcgggcttcgaggccgtcgaggtggcctggccgtacgcggagacgcctgaggcgctggcgcgctccgcgcgagaagcggggctgcggcttgtactgatcaacacgcccccgggtgcgtcgcgggccgggagggctgggagggctggggggtgccggggcgcgggcaggggagtgtccgagccgggggcttaggcccgttctctctgcaggagaccaagagaagggggaaatggggctgggggccgtccccgggagacaggcggccttccgagagggactggagcaggccgtgcggtatgccaaagccctgggctgtcccaggtaccccgctccaccccacccccacccctgtgacccatgaccctgatgcaggttcagggagtcgaggacgccagatctgagacgctcagaagtctgagcccactggtttatctctgcctctgcggtcctggtcctttgtaaattgccttttgtattttatctgtcttatgccactctgtttgccactctttcatgctcaccccatgctgggatcccatgctgggagctcagtctgcctaggcagataggagagtaaatatatacagtgatgcatttgaggacaggcctattccaggaagctgtgggagcagggtaggcacctaaccctgtctggatcagagaaagctgcttacaggtagtgatgcttggactgtcttcaaggagtgggcattgcttgatgggcaggaagttgagtgttccttgcaagggtgctgtggcaagaggaggcctggtgtatttggcagcgttcctgaggctggacatgtatgtagcctgttgggatggggaggcctggaatgtctgcttggagctggatttggctaagatcaggggatgatgggaggaggtggacggctcaaagtggggctgattcaaatgtcaaatcctgcagaggccaaacaggctcagaaggaactggcaagaggggatcactactggtcaatggtgggggcagaaaacagatgggaaaaggctaagtagatgcgatgagaggaagtagagacagcagcatggaatacctgagaagggcaagcaaaggtcaggacaatttttaaaggtgagaatttagcaggttacaggttgcggagaaggaccgagggaaggaaaggttttggaaagtactggatgcaggaggcggtgggtggacactgagatgtctgggaaagggcttgcccctcagccatcactgaagtgtctctgaaagtgctgggatacctgggcatcgtgacccaggtgccatggactggagacctggggagacggacgagggctggcacagtcagggaatcctggaagaggtgcagagagagccaagggaggcaaggcctccagtccatcttccccacaggatccacctgatggctggccgagtaccccagggagctgatcgaatagcagtcaaggctgagatggaggccgtttttctggagaacctgaggcatgcagctggggttttggctcaggaggacctcgtgggactgctggagcccatcaacacccgcatcactgacccccagtacttcctggacacgccccagcaggcggcagccatcttacagaaggtaggaagacccaacctccaattacaaatggacatattccactggcagatcatggatgggaacctgacaggaaacatccgggagttcctgcccattgttgggcatgtgcaggtggcacaggtcccaggccgaggggagcccagcagccccggagagctgaatttcccctatctgtttcaactgctggaagatgaaggctacaaaggcttcgtgggctgagacacagtagagggcttgagttggctacgttcatactgggataggcggggccacccagaggctggccagtgagggcccgcacaccacccacgtgcctccagacagcgagtgacatcccatctcctcctctgcattaaagatgacctgctg

SEQ ID NO: 1162 - DNA, 1678 bp, Homo sapiens
tcatttcatcctgttggctgctgccaccaaatctgtctagaatcctgctttacaggatcatgtaaatgctcaaagatgtaatgtagttctttgttcctgctttctctttcagtattaaactctcctttgatattatgtggcttttatttcagtgccatacatgttattgttttcaacctagaaacctttatccctgcttatctgaaacttcccaacttccctgttctttaagacttttttttttttttttttttttttttgagacagagtctcgctctgtcgcccaggctggagggcagtggcacgatctcagctcactgcaagctccaactcccgggttcacgccattctcctgcctcagccttccaagtagctgggactacaggtgcccgccaccgtgcccggctaatttttttgtatttttagtagagacagggtttcaccatgttagccgggatggtcttgatctcctgacctcatgatccacccacctcagcctcccaaagtgttgggattacaggcgtgagccactgcgcccgggcaagacctttttttaaaaaaaaaaaaaaaaaaaacttccattctttcttcctccagtctgttctcacataacagagtagttttggtttttaattttttttggttgtttgctgttttttgttttttaaggtgagttctcactatgtttctcagactggtctcgaactcctggcctcaagccatcttcccgcctcagcctctcaaatagctgggcttacaggcatgagccaccacacctggccaggatttggttgtttaaatataaatctgatcacccccctgcttagaacccttctgctttctattacccctcatttaaaatgtaaactcttcaccttggtttatgagaactggttcttgccttccccttgaacctcattaaatggtgatttcttgctaagctccagcccgagtggtctcctctcagcttctaattttgtgctctttcctgcccttttcctgggccttctcagctctccacccccaccactcttgactcaggtggtgtccttcttcctcaagtcttgacaattcccgggcccttcagtccctgagcagtctacttctgtgtctgtcaccacatcttgtcttttcccctcattgcatttattgcagtttatatatatgctacttttacttgttcatttctgtctcccctaccaggctgtaaatgagggcagaaaccttgtttgttttattcaccatcatgtaccaagtgcttggcacatagtgggccttcattaaatgtttgttgaataaaagagggaagaaggcaagccaaccttagctacaatcctaccttttgataaaatgttccttttgacaatatacacggattattatttgtactttgtttttccatgtgttttgcttttatccactggcatttttagctccttgaagacatatcatgtgtgagataacttccttcacatctcccatggtccctagcaaaatgctaggcctgtagtagtcaaggtgctcaataaatatttgtttgggtggtttgtgagccttgctgccaagtcctgcctttgggtcgacatagtatggaagtatttgagagagagaacctttccactcccactgccaggattttgtattgccatcgggtgccaaataaatgctcatatttatt

SEQ ID NO: 1163 - DNA, 3759 bp, Homo sapiens
acaggtgtatggtctcaactttggcagcaaagaggatgccaatgtcttcgcaagtgccatgatgcatgccttagaagtgttaaattcacaggaaacagggccaacattgcctagacaaaactcacaactacctgctcaagttcaaaatggcccatcccaagaagaattggaaattcaaagaagacaactacaagaacagcaacggcaaaaggagctggagcgggaaaggctggagcgagaaagaatggaaagagaaaggttggagagagagaggttagaaagggaaaggctggagagggagcgactggaacaagaacagctggagagagagagacaagaacgggaacggcaggaacgcctggagcggcaggaacgcctggagcggcaggaacgcctggagcggcaggaacgcctggatcgggagaggcaagaaagacaagaacgagagaggctggagagactggaacgggagaggcaagaaagggagcgacaagagcagttagaaagggaacagctggaatgggagagagagcgcagaatatcaagtgctgctgcccctgcctctgttgagactcctctaaactctgtgctgggagactcttctgcttctgagccaggcttgcaggcagcctctcagccggccgagactccatcccaacagggcattgtcttgggaccacttgcacctccacctcctccaccactcccaccagggcctgcacaggcttcagtagccctccctcctcccccagggccccctccacctcctccactcccatccaccgggcctccaccgccccctcctccccctcctctccctaatcaagtaccccctcctcctccaccacctcctgccccacccctccctgcatctggattctttttggcatccatgtcagaagacaatcgccctttaactggacttgcagctgcaattgccggagcaaaacttaggaaagtgtcacggatggaggatacctctttcccaagtggagggaatgctattggtgtgaactccgcctcatctaaaacagatacaggccgtggaaatggaccccttcctttagggggtagtggtttaatggaagaaatgagtgccctgctggccaggaggagaagaattgctgaaaagggatcaacaatagaaacagaacaaaaagaggacaaaggtgaagattcagagcctgtaacttctaaggcctcttcaacaagtacacctgaaccaacaagaaaaccttgggaaagaacaaatacaatgaatggcagcaagtcacctgttatctccagaccaaaatccacacccttatcacagcccagtgccaatggagtccagacggaaggacttgactatgacaggctgaagcaggacattttagatgaaatgagaaaagaattaacaaagctaaaagaagagctcattgatgcaatcaggcaggaactgagcaagtcaaatactgcatagaggaacagactaaggagagataggactttaatctggaggaaaaatatcctacaaacaacaactgttcacaacagcaaacccctacatttatgagctgtaagaagaaaatggagacaaacagaaggagggaaaaaccaacctactctgaaagccttcagacattatgactctggtgataagctctttccctctccgtttgctgcttttttctggcctttacaacagaatggaagagaatcatttaagagttcctgtaacagttatgcagaaaatactaaaacccatcaggcaagatcaccacgcattgaaatattttcatatcaagataaagtcgcacattttccacaatacattgctaaaataaagaggagaaaggcttaggaagtttttttgcagagagtgctggtaaagaattgagcaagtttgctattgtattgtaatgtttctctcaggtttgttcttcctatcatgtttgatattccatgaataattgagatcagccctatgtaagttaagatcataatatgtggaacaaatggaattgtaagtgctttcaaagggtaatatttataagaaagtgtccgaaaaatgtttcttcagcttgagaaattttagaatgataggaagtttctcgagttagccttcatgcaattttgtagattaaaacataaaatttgtccagaacttaaagatttagatgccttcctaaattgttacaatgctttaccaaatctatgacttctacataacacaaaccagtggtcaaatgtaaacactatattgtagatttactgtaggttttcaaccttttttagatttatgcatgtggacatttttataatgtaattacaatcaccacaaggttagcttttttaattgcagacagtaatgcatgtcacactaatatgtagtggccttttcaaggcctagtcccagggaaaacattttgtagagtataggggagtgggaggaaggggaggaataattttttatttaaagttgatttctgcactatctttttctcagttacctgcatgaataaataatgagaaatattttgtgactttaattggtaaatatgttacaaaaccaagtacttaatcttttacatcatgtcttcagctatttgtattttaaccagtaatttcaatggtctgaaacatgattctgagcttcacataatatcttaactgtggaactcaaaagtttgatcactgaatttggcagttattattacctaggtacccccgctgttacacaggtgtttagatacgtgttcctgaatgaagctgcttttgaattttgttatgttgaaatgcaagaaataacaatgatggcagcaattaaggtcacagaaatcattaggtaaaggaaaaccaatgaggagttctgcagttttcttttaataagtaaagtgagacttgggtggtgggaagaaggaaggtgggaagaaggaattagacactctgcctgccactctgcgtgtgtgtgctctcgcgcacgtgctgtctatatggaagccactcccttttctttcctttgaaactggtaaggttaaaataggggagaaatcctacatgttggaatgatagctttttggaaaatttaagaaactctccaggctctccatcttgatttatgcttgagttgttatgtgccatatttgctttgaactctgattatcagaagttttactaaaactttgaaataattcactttcatctgctttctagattttgtacatctcagtccataaagcaaagcttgttgatagtgtagttttctaaacgctgcaaatttgcagcctttaccactacaaagaagtttggatgagggattttttttttctttgtcaaaatagttcctgtttctgtagaaatttcatttttagattaaactgtgatggatgagctatcataattcaagtatacatttcttttttctatcagatattcattgtcatgcagtagtagtaaaaacatcaaagatgcagcaagcttattaagtattattttctaaaagaaataggaggcattttcatctttattattgtacttttggttatgcaaacactttgataatataaacagttatgtcccctataaatctggtcagcaacctcttttgattttgttgggtaagttaaatagtctgtagtaggtagagtactgggtacaagtggtccaaactaagataagagactaaaataaaatgctaaatcttaaaagaaactgggtttatgcactaaacgttttgtgccttggtctaatattaacatgatgtatgtgtaaactgac

SEQ ID NO: 1164 - DNA, 1910 bp, Homo sapiens
gttcgtttctccctgtcttggtgagggccaggggacaggtcggggcagtatttgggggaagcgagaggcaagcagggcgggctggatacggagcgccctatgactgaggttagggaggacgcccgagacccccggcatcctagtcctgggccgtgggctccggacgccgggccaggacgcctccagctcccagggtcccttgcggggaccatgtttccccacaggccccgcggctgccgggtcctcgccacgtccccttcccggagctacgcgcccggctgggttccgatccgccgtgtctctcgggggcggctcgcggggcaggggcgctcccggctcggccgcacgcccaagtgtcatgcgggaggtacgcgggcacgggacctcaccggagagaatgatggctctgggatctgaaatctttccttccgcaggaactggacacggcagtgaggaccagcgtatccaagaggatggacttagtgatggggaacacccagggacatgcccgagagcctcaagaaacaccttcagatgacattgcccagcgtcttacattagagaactctccagacagcccccgaggcctggggccgggtgctgctcccagactgtgagctcgtggccacgggaagcctgagtgcggcagaggccccacagctgcgccaagtgcggcaaagcctcccgtacagttactccctgagcggtcatctccgaagccctgctcatgagaagcctcccctttgccctgactgtggaaagcgtttcagccagagctcctacctgctgcagcaccggcagattcacccagggccgtcagccctgcaagtgcaaggcctgcgggaggggttttactcagagcgcatccctcctccagcactggcgggtccacagcgactggcgagagaccttgtcgctgtccccagtgcggcaagacctgctgtggccgctccaacctcatcaagcaccagcgagtccactcgggagaagccattcgtctgcgggagtgcggcaagggtttagcggccagctctgctgctggctcaccaaggagcacacactggccgaagccctgcgtctgtccccagtaccagcaggtttttggggaccggtggaagctgatcggccaccagcgaattcacacaggagagtgtgtcccttctgctgctgcagctgcggtgacagtgtcaatgagaagacctccctctcccagcgcgtccttccgcacccaggggagaagacctgcaggggtgggagcgtggagagcgtcagcctcgcacccagctcagtcgccccggacagcacctctgggctccggccctgtgggagccccgggtccttccttcaacatctgcccccatccacactcctgccccgacctcccttcctttatcctgggtggctgggattacgggcgcccaccaccacgcccagctaatttttgtatttttagtagagagggggtttgaccgtgctggccaggctggtctcgaactcctgacctcaggtgatccgcccacctcagcctcccaaagtggtgggattataggcatgagccaccgcacccagcctctcttgtgctttttagataagtatttttaaaagtgtttgttagttgtcggctgggcgtggtggctcacgcctgtaatcccagcactttgggaggcagaggagggcggatcacgaggtcaggagatcgagaccagcctggctaacacggtgaaaccccgtctctactaaaaaaaatacaaaaaaattggccgggcatggtggcgggctcctgtggtcccagccaagctggaggctgaggcgggagaatggcgaatggcgtgaacccgggaggcggagcttgcagtgagccgagatcgcgccactgcactccagcctgggcgacagcgagactccgaatc

SEQ ID NO: 1165 - DNA, 2655 bp, Homo sapiens
ttcacattggcgtactttcgatccttaaaaggaacacacatgaccaggaaagatgcccaaggatggcagctgccttgcagccaagcatgggtcagacacaccaatatggcagcctgatatccagaggccaacccaggccaaggagaaaaacaagaaacacctgcaaagactaaattcccaggtcccagaaggatggacaaatgtttggtgttgacttcaacagcccagatgagattgactttcccaatcctgccaagaagcctaaaagaagaccttccacatttgagaactcagtacctgagaacagttatgattctttgcaaacaacctgaggattcataacatgcatcctctgcagagctctccttctcctgcttgctgctgccccggctcctcttgacgctcttatagaactgcccccagcggtgccgccctgcatccttcttcaggcgtttctctttggcccttctgttctgaaaccaaacctgccacacaagcacaagggacatactcagggggcgtccaccacaaacccaaagcccccaggaccccctaggcgggcggctggaagcagactgaagcctgaatggagcacaggtctgggagtgcgatgcgccccaccccctctccccaggtgggcctcagaactctgtcttcagttctggcaaaagccctggggtcaagccctgagcccaaccacccatgagctgatgtcactcaggataccttccacccctgtcccgggcctgggatcccgggagggcacaggagtgctggcatctcacctgtacgaccctcatgtccaggcctgtctctgaggacagctgctccctcacgtgccgggcaggcttgggggagttcttgtatgcattctttaatgtctccagctgcttggctgtgatggtggtccggggccgcttagctccagcctctgagtcatctgcaaggaaaaaccactgcttactggcttcggcctatctgcagcagctgcgcctcctcccacaccctcccttccatcctttctgcacctaagcctgcctgctgtaggcaggacagcgcgaggcacaggggacatcagagtggagaggtccccactctcatggcactgactcctgcaccacgggccttcccaagccactgaaaagtgaggacagcagtcctttctctgctcagctccctgcctcaaccctcccctgccagcccagctgcacagaagtctcatcagattgaatgtacccaattccacacgtccctgtcatgacaaacactctgctcacacatcctcatgagttcttgccagagctgtgaaggtgaacagccaggttgaagtcatgttcaaagtcgccccggatgccctcccctctgtctcatcaggagtctcccatttccccacagccatgtcacctttgccctggcgtcgctgggctcacagccaggggtgagcttgcacacccaacagtgtctaagcaggtttctaaactataggtcagaacccactcgtgggctgtaaagtcaccttagtggatcaaaactaaaacaggaaatcagatgaagagaatgggatggaatggcaagatcatttcattaaactttagtttttattgtataaatatgtgtactgagatgaaatgtaaaatgagttttactgtggattgtagtcaaaattttttgagaaaactagtctaaggaatgttctgggcaacacactgactgatcaacacaaagtcctagacagattttgagtgaacaagctcaagttcctgttagttaaagtctggtttgttccattcaaagtcaggtacagagagaggcgcgtgcgtgtgttcggaagcacaggtgaatgtaaaggtttgtttcctctcccagcacttaggcatactgcccttttctccacagtgcccctggaggacacacggaatgaagtcagcagctggcctgggcagctctgctctctgtgcttgctcacctgtgtgccccagaaagtgtctctgtgacattcctgacttcctctctgtcttttctcctttctttccattcaagaaaaccctctcttagaaacaatagtagccaacatgtgttagcacctaccatgtgctggtgttgactaaggactttatatgcattcggtcctcacaatctacaaggctctccctggagtcagcagacctggcttcagtgttcttgatgagtgagtgacttgggccagtaactcacttcccccttggaagtccagagggcaacacggcctgccctgatcttgggaggcactagaggaatgaagcagctgtgcagccaggacatgtgtgtacacagtgaggggggacacacccgtgccttcccttctcctcgggctgttttcttctctcacgtggccactgtcatcccggaactactgtggcccaactccctccctgaagccctgaacccgaagggtagggattccggagcccctgccacagagactacactacttagagagtcattccaaaagacaaaggggaacctccaaaatgccttccttttcattctgaggagtctgtcccttctgtgcatatttatagtctacacgggagtgtctgatgcaactttgaattatgcaaatgggaaatagtgcacttgtgtacaatctttatattaaaaaatgtgaaataatgc

SEQ ID NO: 1166 - DNA, 1916 bp, Homo sapiens
ttttttcccaatgatgctttaaggaagttatcattgttctgcttttcaaatgctgcagccccattcggaatctccagatgaatcctcattttactccttgttatcccagagtttcgaacaggtcgtgctgaccagaatgaacaggagatacctgtagcttgctcacttggcaaagtttgtttgttttttgctgctttcctcccatcttgtttcttggcgacagggcgtgtttgtttacggtttcccgctgtccaaaataaaaaaatatggattaatgaggcccttgataaatgagcagaattttgatgggacatcagatgaagaacatgagcaagagcttctgcctgttcagaagcattaccaacttgatgatcaagagggcatttcatttgtacaaactcttatgcaccttcttaaaggaaatattggaactggccttttaggacttccattggcaataaaaaatgcaggcatagtgcttggaccaatcagccttgtgtttataggaattatttctgttcactgtatgcacatattggtttaaaaagtcaacattaggttatagtgacactgtgagctttgctatggaagtgagtccttggagttgtcttcagaagcaagcagcatgggggcggagtgtggttgacttttttctggtgataacacagctgggattctgtagtgtttatattgtcttcttagctgaaaatgtgaaacaagttcatgaaggattcctggagagtaaagtgtttatttcaaatagtaccaattcatcaaacccttgtgagagaagaagtgttgacctaaggatatatatgctttgctttcttccatttataattcttttggtcttcattcgtgaactaaagaatctatttgtactttcattccttgccaacgtttccatggctgtcagtcttgtgataatttaccagtatgttgtcaggaacatgccagatccccacaaccttccaatagtggctggttggaagaaatacccactcttttttggtactgctgtatttgcctttgaaggcataggagtggtccttccactggaaaaccaaatgaaagaatcaaagcgtttccctcaagcgttgaatattggcatggggattgttacaactttgtatgtaacattagctactttaggatatatgtgtttccgtgatgaaatcaaaggcagcataactttaaatcttccccaagatgtatggttatatcaatcagtgaaaattctatattcctttggcatttttgtgacatattcaattcagttctatgttccagcagagatcattatccctgggatcacatccaaatttcatactaaatggaagcaaatctgtgaatttgggataagatccttcttggttagtattacttgtgccggagcaattcttattcctcgtttagacattgtgatttccttcgttggagctgtgagcagcagcacattggccctaatcctgccacctttggttgaaattcttacattttcgaaggaacattataatatatggatggtcctgaaaaatatttctatagcattcactggagttgttggcttcttattaggtacatatataactgttgaagaaattatttatcctactcccaaagttgtagctggcactccacagagtccttttctaaatttgaattcaacatgcttaacatctggtttgaaatagtaaaagcagaatcatgagtcttctatttttgtcccatttctgaaaattatcaagataactagtaaaatacattgctatatacataaaaatggtaacaaactctgttttctttggcacgatattaatattttggaagtaatcataactctttaccagtagtggtaaacctatgaaaaatccttgcttttaagtgttagcaatagttcaaaaaattaagttctg

SEQ ID NO: 1167 - DNA, 3302 bp, Homo sapiens
gctatataaggcggcgtgaggcaggcgaggggggcagcgcagccgagcggagcccaggagagcagagagcgagcctgagcgagagacggggaagcacggaggaggaagccgccggtgcgtcgggacgggagcgcaggtgctcgggcacccgagctggagctccgcagccgccggtcatgtaccgctccaccaagggcgcctccaaggcgcgccgggaccagatcaacgccgagatccggaacctcaaggagctgctgccgctggccgaagcggacaaggtccggctgtcctacctgcacatcatgagcctcgcctgcatctacactcgcaagggcgtcttcttcgctggtggcactcctctggcgggccccacggggcttctctcagctcgagagcttgaggacatcgtagcggcactacccggctttctgcttgtgttcacagccgaggggaaattgctctacctgtctaagagtgtgagcgagcatctgggccactccatggtggacctggttgcccagggtgacagcatctacgacatcattgacccagctgaccacctcactgtgcgccagcaactcaccctgccctctgccctggacactgatcgcctcttccgctgccgcttcaacacctccaagtccctcaggcgccagagtgcaggcaacaaactcgtgcttattcgaggccgattccatgctcacccacctggagcctactgggcaggaaatcccgtgttcacagctttctgtgcccctctggagccgagaccccgcccaggtcctggccctggccctggccctgcctcgctcttcctggccatgttccagagccgccatgctaaagacctggctctactggacatctccgagagtgtcctaatctacctgggctttgagcgcagtgaactgctttgtaaatcatggtatggactgctgcaccccgaggacctggcccacgcttctgctcaacactaccgcctgttggctgagagtggagatattcaggcagagatggtggtgaggctacaggccaagactggaggctgggcatggatttactgcctgttatactcagaaggtccagagggacccattactgccaataactacccaatcagtgacatggaagcctggagcctccgccagcagttgaactctgaagacacccaggcagcttatgtcctgggcactccgaccatgctgccctcattccctgaaaacattctttcccaggaagagtgctccagcactaacccactcttcaccgcagcactgggggctcccagaagcaccagcttccccagtgctcctgaactgagtgttgtctctgcatcagaagagcatccccgaccctccaaagaactggacttcagttacctgacattcccttctgggcctgagccttctctccaagcagaactaagcaaggatcttgtgtgcactccaccttacacgccccatcagccaggaggctgtgccttcctcttcagcctccatgagcccttccagacccatttgcccaccccatccagcactcttcaagaacagctgactccaagcactgcgaccttctctgatcagttgacgcccagcagtgcaaccttcccagatccactaactagcccactgcaaggccagttgactgaaacctcggtcagaagctatgaagaccagttgactccctgcacctccaccttcccagaccagctgcttcccagcacagccaccttcccagagcctctgggcagccctgcccatgaacagctgactcctcccagcacagcattccaagcacacctggacagccccagccaaaccttcccagagcaactgagccccaaccctaccaagacttactttgcccaggagggatgcagttttctctatgagaagttgcccccaagtcctagcagccctggtaatggggactgcacgctcttggccctagcccagctccggggccccctctctgtggatgtccccctggtgcccgaaggcctgctcacacctgaggcctctccagtcaagcagagtttcttccactactctgaaaaggagcagaatgagatagaccgtctcatccagcagattagccaattggctcagggcatggacagacccttctcagctgaggctggcactggcggactagagccacttggaggactggagcccctggactccaacctgtccctgtcaggggcaggcccccctgtgctcagcctggacctgaaaccctggaaatgccaggagctggacttcctggctgaccctgataacatgttcctggaagagacgcccgtggaagacatcttcatggatctctctaccccagatcccagtgaggaatggggctcaggggatcctgaggcagagggcccaggaggggccccatcgccttgcaacaacctgtccccagaagaccacagcttcctggaggacctggccacatatgaaaccgcctttgagacaggtgtctcagcattcccctatgatgggtttactgatgagttgcatcaactccagagccaagttcaagacagcttccatgaagatggaagtggaggggaaccaacgttttgaataagtctgtgacttaacgtcgtcaagtatggcatattgtcatcaagacgtggagccgctctccacccccccgggactgttggggggattctgagggccagagggggatatatatgattccccaggccctgcaggattttggggggggggaggtgggagggcaagggaggggagcttctttttaaaatcaagagacttcgagcgatcccagtttccatttcaatctgtattcactcgtagtgagtttccttgaatgggatttcaagcggagaatgggggagtctcacttccccgccgccttgccccattggcctgggccagttctccactcctaggggccaagccacccctagccttggtgggggaaaggcagggcccacccgggccagcccgtgccctgaggggctcttgacacccacgtagaattctctacacaccagtaacgggatttcaattccgatggactctgccgccctggcggcccttcctgtgacttttgcgcccctcgcctggggtggggggtgcgaagagacgctacgttcctttccgatggaggaaggcagacctgccgtcacacgtgtgcttgcacgagtgcgtgtacctggtgcgggactcacccggccgccagactgcctgggcctgcccagatggccacctcgtggtgctgcggtgactttgtagccaactttataataaagtccagtttgcctttttggt

SEQ ID NO: 1168 - DNA, 2878 bp, Homo sapiens
ttttacaattaaaagaagtagctgccagatgacagaacaaggtagaggacgggaaaataaatcattttcagggaaaaaatatatctatgactaatggttgtgattatgtttttgtcgattgtgatcctgaaactcaggaagcaaatggcaatcttgaccacaacatggagacaggaaatcaaatgcatttttggctaaaccagacttgggggaagtggcttggtttgcgtggtttctcatgtaggtgcagctgtgcttttctgtggtttttctcacacgggaagtgagaggcacagtgagctgtattcacactggatttaaaagccctgttcttagagaggaaaaaaccaggcctcctcacagactgccaagtcccagagcccaccatgtctgctctcaagacacaggcctgtccagagcccctgctgagggaaacccacccaggccacttttccccacaggtggccctgcttggtacctgtgcccccaccccccagccatggtatattgaaccaggaggaggcacccagcccaaggccagccaatcagagcactggctagtagcccaggaggtgtccctgcacagaagatctcctcagagaggaccgatggtgagtcggccgctcttgattctcaatgaaactcagaaccgctcaagtgaaatgaccactcaaagaacaatttctcaacaaagtggatttatataggacaaaataggcataaaagtatgaaatgttttgtgcacaaaggcctagatttgagacaagagctgatgtggcctgaagatctgtgagtgggactgcttgggaggccatgttccttctcaggccagagaaaggtcctggtctcctggcttcagtctttcattccctaacctccctttgaatgttagttacctattcccacataacaaagtgccccaaaacttaatggcataaaacaagcatggacattgttagttcacccagttctgtggggcaggaaagcgggtctctcatgaggctacagtcaagatgtcagccgaggtgacagtgaagatatcaaccaaggctgcagccggttgaaggcctcactggatttggagaatattattgattaaattgcgtcttccccaaaaaagatacgttgtagtcctaacccccaatagctcagaatgtggccttatttggaaatagggtctttgcagatgcaatgaagatataagttaaaatgagatcacactagagtaactgggcccttaatccaatatgacatgtccttatcagaagaggagaagacacacacacagggagaagatgaccatgtgacaacaggggcagagatcacagggatgcctctactagacaaggcacaccagaaattgcttgccaacaaacaccagaaattagaagaggcaagaaacaactccccacacacaacccacccctgcaggtttcagaagaagcatggctctgccaacaccttgattttggatttccagcttccacaactatgagacaataagtttctgttgtttgaagccacccagttcagggtactttgatatggcagacctaggaaacaaatacagaggatcacttgcaaaatggcccattcacacagctggcacgttggtgctggctgctagcaaaaggtctcagctcctcaccacttgggtctttccatagggatagctgagtgtcctcatgatgtggcccctggcttcccctgaagcaaatgacccaagagagcacaggtggagccatgatgtcttttattaactagtctcagaagtcacactgcatcatttggcaccatcttattgagttacacaggtcagccctgctccctatggaaagagacagagggtgttagatgcccagaggtgaacctcattgggtaccatcctgcaggtgggctgccactctgctcaatccaaatcacagctctcccgtttctcacctcccaacagttgctgttcctcaggccaaagttcacattctgcacagcctcagctccgcctgacctctgagctcacatgatggcccttactgtgaacctgggtttctggtccagccatagctacttctttaagctcctccagtgtgctgagcacagtctggcccctgtactgttgtctgcttgaaatggcgtcttctgatgaacactcatccatccttcaaggtctactctctcatcacagcttgtgactcttccactttttgaactggtgtttcccattcccagttcacagagccctttctcattgaactatttatctgagttccctctgccggaacatgagccatgcctagagtagccacctagtagtgagtgacagctctgtgctggatgcacataaatggtctcccttaactgccatgagccctaaagaaggtttgctacagctattttacagatggggaaaactgacagagagatattaatgaattgcccacatgcaaatatgtgctgagtcttggatttgcatctttatcgtgactccacggagacccaccctctaagaccagagccagtgtcctattcatcttttgtctctgcagcgttcagcatggcactgtcttggcttacaaaatctgctctatgcttgctgactgctgaatgaatgaatgaatgaataggtagtcacaaagaatgtttagaatgtttctcagacaggctgagaaaaaacacaacgaaacattatttccgtttggaaagtttttttatttttgtgttcagtactgaagtaaaacaaaaatctgaataacagctgcaccgttaaaaatgaaattaccaatatatgaactctaggcatcatgcatatataattttttgtagataacttttcttctcattttccttctcattctcttcatctttttctttttgtttgagc

SEQ ID NO: 1169 - DNA, 1901 bp, Homo sapiens
actcggcgttcgtgggttccccaggaagccctgagagtacactttgaaaatcagatacatgtctgtaaatgaccttccagttctgtctcctcagattgctgtgaataatcgtgtgaggactgctgtccggagaggagggagcctgaagtcaaggcattccaaggggcttcaggcatcctcagtttctttatgaagagcatttctttctccttcgggagtggtggggaggctgcaccaggaagacagagggcaaatcctagtgtgtgtgagagagagagaaaaaaagagatagagagacagacagagacagagagacagagatacagagacagaaagagagagacagacagagacagaaagagagagacagagacagagagacaggaacagagagaggtattctggataagatggcttagaggaggcagaactagcttgcagctccagctccgatggacagagcagcgtgtggagactcacatcgtaaacttttgctccaagacctaccgcaagaacatactgggaaagccgagggaatccacagaccctttgaaggaactgatgactgctgcaggctccctgagatgccgaaaacctgtgagttggcttgctttctcaacatggaggcttgtggtctggggcaagttctcggccctgatcaccacctgcctggaaatagactcggtgctgttgggagggcacagtgggagtgagaccagcctctaggactgtgggctgcatgggggcagggtggggcctctgactgccagcttttcctctggtaaagtaatacaggtgacctgtattactcaacagaggcagccataatccccctaggaatataactcaactggactgggaaccacactcccattccccacagcagctgcagcaagccctgcccaaggagaggctgccctcagacacaactatccctgcccccacctggtggtctttctctactggccctggtagccaaagacaaaggtcataatctcttgggagctctatggccctccccaccacctgagaaacctgaatacttaagcaggtgtcactagggcaagtttgcatcctccctatatataggaccactgctgatgcacttttgaaagggccacctcctggctggaggccaatcaacatagaattagcacactaaacaaaacacagccaaggacactgcagggtccactttacttccttgctatctccacgggagcaggggtcggtctccatggctgcaagacctgaagacagatcacatcacaggactctttgcagacactcctgagtaccagcatggagatcgctagctccactgggtggctagatctagaagagcaaaaacaatcactacagtttggctttcaggaagccccattcctaggggaagggggaaaacaccacattaagggagcatcctgtggaacaaaagaatctgaacagcagcccttgagtctgagattttccctccaacatagtctacctgaatgagaaggaaccagaaagcaattctggtaatatgacaaaacaaggttctttaacaccccaaaggtcataccagctcaccagcaatggattcaaaccaagatgaaatcactgaattgccagacaaagaattcagaaggtcaagtattaagctaatcaaggatgcaccagaaaaaggtgaagtctaacttaatgaaataaaaaacatgatacagaatatgaaataaaaattcttcagtgaaatagagagtataaataaaaaacagtcacaacttttggaaatcaagaacacattcagagaaatgcaaaattcactggaaagcctcagcaatagaatcaaacaagcagaaaaaaagcttcagagctcgaagacaaggcttttgaattaactgaatccatccatcaaagac

SEQ ID NO: 1170 - DNA, 1823 bp, Homo sapiens
cattccatgtactaagatgcttatagtcaaactgtgcctcttaaacctatttttattgtgtatttaacaaattttgctataatgttaaaaacaacttataactcatcaaactgcattttaattttagtaaacacaaattacactgaaacgggagtgttccctggcccctctcacaggacgtgtgacaagggttcggctcgctgcctgttcaaaccccttacgggagggggatcacgcagagggacaggtgcaggagcccaagtgggtgtgtgctacagtgtgctcttttagccttggcatctgtggatggcttgagtgttaactagctcagtggaccctcagcctttctgcaaaggcagagggtcattgtgacagctttctgtatcccaagctcttgtccatgatcctggaagaatcaggtcacacacagacttgaaggataaatgcaggggtttcactgaggggtagaagtggctctcagtaggatgcatggggagctggaagtggggagggagtgcgaagacgatcttcccctggagtttggccactggacggccaaactcctctcttaccacccgcagctgaactcctctcagcgttcaggtgttcctcatcttctcactttctctgccatgccgttctgctgtttgactgcttttctcttcatctcttcatctgctcctggagcctggggtttggggtttatatgggtacaggatacgggggtgtggtgggccaaagggcaactttttgggtacgaaaacagaaatgcctgttcccagttagggccatgggtctccaggcttgagggtggggcctttgctggggagccgccctcttctatgcagtatttccctgtctcttttctatatcaatacctcaataaaatttagttttaaaaaatagcacatgtaaaaagtttggctatttaaactaaaaagtaattatgtcctaaattattttgtatacaaagacctgaggacttgaaatattgtaataattggagcttgtctctgctttaagggcaccactcgcccctgatccatcttggtttcccgcacaaggcagcaggattgcccatgaatgaacatgggtgaaatcgttggatacaggtagtaaatacattctatttcctgaaaaatattacctaactacatgtctagatatggaattgcattttcaagccaagctggaattacaaattgtagcccatttgaaaatgcatacaaatgtgtgacatatacacccagaggaaaagaagtcacagttatgaaagaacaaagtgggaaaatatctttttcatgtaagattgagcattttggttggtaccgtgataaaaaatcttgtgactgattctcttttgcattggtttttagtgtcatgtgcactctgcccaactcagataaaattgtatatgatgtaaatagcaggaaactataaatggtgatattgtcctgaaaggaagccacttcatttttcaaagatttcttccgcggcagggatctaggagtgtgcagggatggagttttgcatttctagaggaaacagcaggcagggtgtgtgcagccggaaaggaggcgtctaggttccaagggcaaatcccacccccttagaggggattggagagcctgggaaagaggctgggctgcctgtgatccccaccccacaccctgcctcctacaagcccctagaaggtccacactttgagttgtcagccagaggcagtaactcaaaacctcggcttcgggcagccagaagcccagaaatgggggagagggcaggcctagacaccagggatgaaaatgaagtgaatattaaaaatt

SEQ ID NO: 1171 - DNA, 2187 bp, Homo sapiens
tggcttttagctgaactaaggagaaagtcctacaacagtttggcgtgcaacatggggcttgagaaaggtagagacggggtttcaccgtgttagccaggatggtctcgatctcctgacctcgtgatccgcccgccttggcctcccaaagtgctgggattacaggcgtgagccaccgcgcccacccctccatgaagaaagtttttctaaatgaaaaatgtttaggacgctcaggagagaaagaacagattaaggaatgatctccaccgcacagacctcaaggctgttatgcatgcagggcacagttccagtgcaaatgtccgcaggcacggcatgagggcccccactgggtgcctcgggctccttccagggcagcagttgaagcgggtcgtactgcaggcctgcagaaaggctggggttcctctccttttcgggttccttcctgatggaatcctaggttttcagcggttccttcctgatggaatcctaggttttcagcagcttccggaggccgcctggactgcagaaggcgccctgggcgtgtgtacttccacctccgcaggcgctggcatctccaggttgcttcaggccgctttggacctcaccatcggtagcatctgcgtcttcttgaggtgactggagcccgtctatggtttcagccattgacttctggacatggaagtgtcgaggccatttttggcccctctcatatccgggaagggctccgtgcccagtagaggtgcagtgcagcagccagctcgcagcagtgctcccgtagagctgatggcattggcaggagtggcggctcagcacagggaagttctccagtgcccaggcccaggcttgctctcggtttaggtcccatggcacgtggggctctggacctgcctgcctccaagacagctcttccaaggttgagggttggaactccacagcctcagcctcccaaaacttgaccaggcccagccatagctagtctaggaaaagagcaaatggccgtgtttttatattttgacttttgcatttcaatattaatttttttggtaatgtaatgcattcaaaacatggtccccccccccaaaaaaaaaagaaaagaaaaagaaaaaagcatgtttctaaccaggggtccttcatcttctgcagatgccaagggtgtccctggcacagtaaaagtttggaagccctgccctaaagcctcacctcacctggcagctgggtgtttcattcatagcaaatgttctgtatattcaccatgtaccaaacacacatgtcactaatgatacaaacacatgtgcactgacattgacctcctcactgtcttactatagtcccatccacagccaccttatcagagtccatgggactctgacaacttgtaatgggaaaattaaccgtgcctgtaggggccgcctgggtagcgggaggtggttcatgagtaccaggaaagctggccctggggcagacctgggcagggcagagcacagcttgcagaacctagtacacagtgttgggaattgaatttgggttttgacctttgaagctgtgcataaagtctaaaacaagaagaggagtggaggctgaggttgtatttgtattttaaaatgagcatttgccacacaaagccaggagcttcagaccagcgtggttaacacagcgagaccctcctctctgtgagaaattaaaaaaaaaacaataataaaagccaggcatgttggcatgtacccgggtgtttcattcatagcaaatgttctgtatattcaccatgtaccaaacacacatgtcactaatgatacaaacacatgtgcactgacattgacctcctcactgtcttactatagtcccatccacagccaccttatcagagtccatgggactctgacaacttgtaatgggaaaattaaccgtgcctgtaggggccgcctgggtagcgggaggtggttcatgagtaccaggaaagctggccctggggcagacctgggcagggcagagcacagcttgcaggacctagtacacagtgttgggaattgaatttgggttttgacctttgaagctgtgcataaagtctaaaacaagaagaggagtggaggctgaggttgtatttgtattttaaaatgagcatttgccacacaaagccaggagcttcagaccagcgtggttaacacagcgagaccctcctctctgtgagaaatt

SEQ ID NO: 1172 - DNA, 2156 bp, Homo sapiens
atttttcccctgagagcggcctcggagatggctgtgactgtcctaagctgggagctgcaagggagaattcctgtcattcctggcctcagttctgcagggaccgagggcgagacacgcctgggcccaggtgtggcgtctctgtccccatctggttttagctggccactgccccaacccaggcatttcactgggcgcagtgcggacaggcttccgctttggtcatggggacaaggtccgctatcgctgctcctcgaatcttgtgctcacggggtcttcggagcgggagtgccagggcaacggggtctggagtggaacggagcccatctgccgccaaccctactcttatgacttccctgaggacgtggcccctgccctgggcacttccttctcccacatgcttggggccaccaatcccacccagaagacaaaggatcttcagctttgagatcaatgtgagcgttgccattatcacctttgcctcagagcccaaagtcctcatgtctgtcctgaacgacaactcccgggatatgactgaggtgatcagcagcctggaaaatgccaactataaagatcatgaaaatggaactgggactaacacctatgcggccttaaacagtgtctatctcatgatgaacaaccaaatgcgactcctcggcatggaaacgatggcctggcaggaaatccgacatgccatcatccttctgacagatggaaagtccaatatgggtggctctcccaagacagctgttgaccatatcagagagatcctgaacatcaaccagaagaggaatgactatctggacatctatgccatcggggtgggcaagctggatgtggactggagagaactgaatgagctagggtccaagaaggatggtgagaggcatgccttcattctgcaggacacaaaggctctgcaccaggtctttgaacatatgctggatgtctccaagctcacagacaccatctgcggggtggggaacatgtcagcaaacgcctctgaccaggagaggacaccctggcatgtcactattaagcccaagagccaagagacctgccggggggccctcatctccgaccaatgggtcctgacagcagctcattgcttccgcgatggcaacgaccactccctgtggagggtcaatgtgggagaccccaaatcccagtggggcaaagaattccttattgagaaggcgtgatctccccagggtttgatgtctttgccaaaaagaaccagggaatcctggagttctatggtgatgacatagctctgctgaagctggcccagaaagtaaagatgtccacccatgccaggcccatctgccttccctgcacgatggaggccaatctggctctgcggagacctcaaggcagcacctgtagggaccatgagaatgaactgctgaacaaacagagtgttcctgctcattttgtcgccttgaatgggagcaaactgaacattaaccttaagatgggagtggagtggacaagctgtgccgaggttgtctcccaagaaaaaaccatgttccccaacttgacagatgtcagggaggtggtgacagaccagttcctatgcagtgggacccaggaggatgagagtccctgcaagggcaggagaatctgggggagcagttttccttgagcggagattcaggttttttcaggtgggtctggtgagctggggtctttacaacccctgccttggctctgctgacaaaaactcccgcaaaagggcccctcgtagcaaggtcccgccgccacgagactttcacatcaatctcttccgcatgcagccctggctgaggcagcacctgggggatgtcctgaattttttacccctctagccatggccactgagccctctgctgccctgccagaatctgccgcccctccatcttctacctctgaatggccacccttagaccctgtgatccatcctctctcctagctgagtaaatccgggtctctaggatgccagaggcagcgcacacaagctgggaaatcctcagggctcctaccagcaggactgcctcgctgccccacctcccgctccttggcctgtccccagattccttccctggttgacttgactcatgcttgtttcactttcacatggaatttcccagttatgaaattaataaaaatcaatggtttcc

SEQ ID NO: 1173 - DNA, 2047 bp, Homo sapiens
aaagctgtctttccttgtgtaagggaggaactcttgctggccggggaatctcttggaattggtcttttttggggtttcagaggcaaagcttgaacaccatcagtcaagagtggttccgcgtctccagccggaagtcgtctagccctgccgtggtggcctcctacctccacgaggtccagcctcactccccacacttcctgaagctgcttgtcaacttggccgatcgcaacgggaacacggcccttcactacagcgtgtcccactccaacttctccatcgcgaagctgctgctggagacaggcgtctgcaatgtggaccatcagaacaaagctggctacactgccgtaatgatcactcccttggcttccgcagagaccaatgaagacatggctgttgtctggaagctcttaagagaaggaaatgtgaacattcaagctactcagggaggccagactgcgctgatgctgggagtcagccacgacagggaggacatggttcaagcgctgcttagctgccaggcagatgtcaatctgcaggaccacgatggatcctcggccctcatgctggcctgtcaccatggcaacgtggacctggtgcggctgctcctggcacacccagcctgcgacagcagcctgactgacaaggctggccgcacagctttgtccatcgctctgaagtcacccacccatatggaaattgctgggcttctgagagcccacgcggagcagggcaggtccctggggctgtaggggctgcagaagaactggccgtggggaacaaaagccttcttctctggactcctccctcgcccttgaagagggcagaggccacaggccagagagccacccttctagagaagaaactatgtcaaatatgcacatacattcctgttgtataattctgctcattaggatgctttgtagtttttgccttaggccaagcctgaaaactacacgggcttcagagcagggttcaaggtgcaaggtgaggggtacgtcggtgtcatccaaacatccaaaacatcttcagccttgaattcctcatgactctaccctctgtaacattgtgtagcaagcaggcaggcaggagcacattagcacattagaaaagcaatactttttacatggaattttacagtgcactatctttctgttttttaagcaagtgtatacaaatatgtcccattgatatgcatgtctatagatgggaggggatttaagccaaccccctggcaagcattctgtaggggaccctagaagaatcaccgtgcagactggtgaaactgaacaagcaccatttgggagctttgtttcgatggggttgacagagaaatcttaaaatctgacagggtagaagaagcactttggcatcaatgccatatgtacagtcttgactatttctgagtcatctagtggctccaatttgctccagggaaattggaattaattaagaaatttattatctagtaagttgctatgtaataaagaaaaaaaagaaattcaatccaatgacacacaccacatgtatttgggcagagtcagattctctcagctattttgagtctgtggaagaaacaaaaaaaagcttcctcctgaggatgggttattgtcatcaagaagccacctgcatagccgtatccattacctcatggtaattcccggtgctttcccctcatatcccctagaagcaaatatctgttctgaggttttttgggacttctggctgcaataggagcaagggacccaggcagggcagagcaataccttccgaagcttccatattccctggggccagcacatgcaaggtttatatggtcagtagctcacgtgaagtcatctgaatctttcttaaatctgctctcttaaaatctcttatgcaaaaaaaaaaaaaaaaagccccttatataaaaagaagtaatgtcaaagtttgatgagctttacattggaaactcaaaagcttgcactctcattttggctcagatgccaatttgctgggtgcccctgtggtgagtcatgaaacctccttgggccgcaatttcatcatctct

SEQ ID NO: 1174 - DNA, 3098 bp, Homo sapiens
agttgctccggcggcgctcggggagggagccaggtgagccgccccggtggcggggggcgggggcgggatgctcggcgaccccaccctccgaccctctcctcttccgccgacatccaccggagccaccaacatcaggaaagggggcgtagggcgagggatgggagagagaacagggcaggagagaggatgggaacagggcaggagagagaataggattaggagaaaggcgatccctttgggggaggggcgcgtggagtatgtgtgtgagtgtgcgtgtgtgcaaggtgtggttgcacggatgctcgttgcttctgcgtatctgcgggtgtgtgcctctttgtattgtagcctggagtcagtgctcgcttctgcgcctgcaggatgtccatgtgtctgctgggtgggtctgtgcctttgggctttgccgttcgtgtccgtgccttcgccactgggggctggtctacatttgcgtttccgtacatggttctttttgtttctggagagtaaattcctggagcaattgctaggcctgcctgctgtcacctggctgacaggcccgcccccttctctcagcagcctagggcctaggcccgggccaccatggcgctgcctccaggcccagccgccctccggcacacactgctgctcctgccagcccttctgagctcaggtacacccctgttcagtcgttgaccaagtccttctgggttccaaagccccctctctcccctgtctgcacttctgtttgggtacccactccaggccccaagccctggagtccctgtccccttcacccacctaccctaggtccaaccagccagtccctggtgagaggactcaggtgccctttcctttggcctgctgctcttctcactgggccaattcctggtcacagcacagtaccaaccgtgcctgagcccttcccagaggcctcctgctgtgttccaggttggggggagttggagccacaaatagatggtcagacctgggctgagcgggcacttcgggagaatgaacgccacgccttcacctgccgggtggcaggggggcctggcacccccagattggcctggtatctggatggacagctgcaggaggccagcacctcaagactgctgagcgtgggaggggaggccttctctggaggcaccagcaccttcactgtcactgcccatcgggcccagcatgagctcaactgctctctgcaggaccccagaagtggccgatcagccaacgcctctgtcatccttaatgtgcaattcaagccagagattgcccaagtcggcgccaagtaccaggaagctcagggcccaggcctcctggttgtcctgtttgccctggtgcgtgccaacccgccggccaatgtcacctggatcgaccaggatgggccagtgactgtcaacacctctgacttcctggtgctggatgcgcagaactacccctggctcaccaaccacacggtgcagctgcagctccgcagcctggcacacaacctctcggtggtggccaccaatgacgtgggtgtcaccagtgcgtcgcttccagccccaggcccctcccggcacccatctctgatatcaagtgactccaacaacctaaaactcaacaacgtgcgcctgccacgggagaacatgtccctcccgtccaaccttcagctcaatgacctcactccagattccagagtgaaaccagcagaccggcagatggctcagaacaacagccggccagagcttctggacccggagcccggcggcctcctcaccagccaaggtttcatccgcctcccagtgctgggctatatctatcgagtgtccagcgtgagcagtgatgagatctggctctgagccgagggcgagacaggagtattctcttggcctctggacaccctcccattcctccaaggcatcctctacctagctaggtcaccaacgtgaagaagttatgccactgccacttttgcttgccctcctggctggggtgccctccatgtcatgcacgtgatgcatttcactgggctgtaacccgcaggggcacaggtatctttggcaaggctaccagttggacgtaagcccctcatgctgactcagggtgggccctgcatgtgatgactgggcccttccagagggagctctttggccaggggtgttcagatgtcatccagcatccaagtgtggcatggcctgctgtataccccaccccagtactccacagcaccttgtacagtaggcatgggggcgtgcctgtgtgggggacagggagggccctgcatggcttttcctccttcctatgctatgtagccttgttccctcaggtaaaatttaggaccctgctagctgtgcagaacccaattgccctttgcacagaaaccaacccctgacccagcggtaccggccaagcacaaacgtcctttttgctgcacacgtctctgcccttcacttcttctcttctgtccccacctcctcttgggaattctaggttacacgttggaccttctctactacttcactgggcactagacttttctattggcctgtgccatcgcccagtattagcacaagttagggaggaagaggcaggcgatgagtctagtagcacccaggacggcttgtagctatgcatcattttcctacggcgttagcactttaagcacatcccctaggggagggggtgagtgaggggcccagagccctctttgtggcttccccacgtttggccttctgggattcactgtgagtgtcctgagctctcggggttgatggtttttctctcagcatgtctcctccaccacgggaccccagccctgaccaacccatggttgcctcatcagcaggaaggtgcccttcctggaggatggtcgccacaggcacataattcaacagtgtggaagctttaggggaacatggagaaagaaggagaccacataccccaaagtgacctaagaacactttaaaaagcaacatgtaaatgattggaaattaatatagtacagaatatatttttcccttgttgagatcttcttttgtaatgtttttcatgttactgcctagggcggtgctgagcacacagcaagtttaataaacttgactgaattcatttac

SEQ ID NO: 1175 - DNA, 2349 bp, Homo sapiens
agtttcttgcaaacccggaagcagatctcttggagtgaaggctgttagtcgccgcgtagaaccctggaagaagaggaagaggaaggcaaaggagtcagggatggctcttcctcaggtgagatgatattctcggtggattgttctgtctccttcctttcagaaaccttggaccttggagttgggaatcttctctgagtctgaagcatcctgcctgacaggtttgctcgcactcactcgtgccttccctcagtccctctcatctcacttagattccatctctggtgacccagtgacatgaacttgggaagaggctgcacggggcatggacctgggaagggctcacaccccgacatggatggagacggggtgagggtcccgtggtgtcagtgctgttgggcaacagggattgttcaggacatatttgaatatattgacagctctgtgtaaactgtgataagagaagctggttatgaagtcagatgttagtgtgtacaagcacccacgaaatgctgtaaaatgagacgactgtggggaaagctttgtcacctcatttatatttgcatttgatgccgaacaagtgagtcactgtgtttctgactccaaactcctttttttgttgtttttgttgagacagagtctcgctctgtcgcctaggctggagtgcagtgacgcgatctcagctcactgcaacctccgcctcctgggctcaagtgattctctggccatggccccccgcgtagctgggactacaggcatgcatcaccatgcccggctattttttttgtatttttaatagagatggtgtttcaccgtgttgcccaggccggtctccaattcgtgagctcaagcgatccacccgcctcggcctcccaaagtgctgggattacaggcgtgaactaccgcgcccggccttcattacttatattcaaccaagagagaaacttatccctcaggcagcgccctgaaaagacagaatattggatgaatgttttcatacttttcctctcccaggagaaatgggaaattggtgtttttcttgcagtgacactgcatcatgccagggtaaggcctctgggagcagatgtcctgtattttcctactagacttctgttaagagttccaacctcttaaatgaccactgggtttctcacaaagcaattggttcatatattgctactacatttgtgtctccgtggtggaggtagtgtttgggagttctagtcctctattttattgacatcatcactttagtacagtcttataatttctttaaataggtctggaaacgtattttaataggtagcattgtataattcctaatgtactcgtgagatgcattgtgtgtttgtgtctaatgagagctgctaaagaaagaatgaagattgttttcacagtattgttattagttcttaaacttcaatgcattcttctcctgggttgtgagtatgtcatctgttagttttaacagatccagctcctactttacctttttcttggtctcagctcaggcatgctctgaagtgggctttagctggagccttggtgagcccccattttctccttttttttttttctgatacaaggtccggccctgtcgcccagtctggagtgcagtggtgcaatctcggctcactgcaacctccacctcctgggctcaagccagcctcccatctcagcctctcaagtagctgggactacacgtgcatgccaccacacccagctaatttttatattttttgtaaagatgggggtctcactattttgccaaggatcgtctcgaattcctgagctcaagcaatccacccgccttggcctcccaaggtgttaggattacaggtatgagccatcatgcccagcccattttctccattttaatttagatcaaatgcatccagcatttactgcttgattatgatgtttggtgaaattttcttgtttaatattagcttttgggtgtttttcaaatttcctttttggactgatttttaattatccaataatttctttgagtaagtattgttgcaatatgtacttctgaaatctattcatgtatgatattaaaaaatgtcctaatcttaggatttcatgagtaaaataaactaaaacctccattgggcttttgttaatgcctaaatatctaaatttaactgaaaaaaaatggtatctgtacttttaatatttgtatttaataccaattggagtacgagttcttacatatttttgttttagcatttttacagcttaatttacaaaaatgtttgtaaactaaatcaagtacaattcatgcatttcagttgtcccagactttctgaaaagcacatgagcaaaaaagacaactaaagatgtcat

SEQ ID NO: 1176 - DNA, 2299 bp, Homo sapiens
gcagaactttctagagacggcgggactgagccggttcgggctcagtgctgcgggcgcttcggaatttttttttctttttttttttttggttcttgcctccttctggctgcctgccccctcccccttctcctgggaccctcggactcgggatctccccggcggcctcccttggcccttcctccctccctcccatccccgcccacttccctgtctaaccggattcttccagattcttctcgatcgatctcccgacatcactccaccagtccgctgcgcctgcggcggggtgtggggagcgcaggctgcgggatggcagtggcggcgccccctccccgggaccggccgtcaccacgggcggcgtggcctctctgctatgacccgcgtagacccttccctacttgggggaaagagggcaagggcgtgcgcggggagcggggagtgagtggacagcgctgccccgctgcagagagccggggaaagcgacctcgatttccccagatccgagaagccccggccaggcagcgatgcctcgctcagcgcctgcagatgctgcgagcagcggggttggcaaggcatggcccgcccagctcggaactcagatggggcacacactcaggggacccttcccggcggtaataaaactgccgtttccgcgaatgcttacaaagatgggttcccctcacgaaaaaagtcactcggttttcctaaaggcccacagaaggagtattttcttctcaatgtttgcttcccgagtgtttttcgacaggctgtggagcgcgcaggtgccggtgtcacctaagctatggtcgtgggacctagagagccatctagagaggggcctggttttgctcagcacctaaccccagtttagcatagtgcctggtgagtgatgtcccaatagttactggctgcatgaattttccttttttaaatttctttttccaagtcttggctgatttttttttcttttttttttttttttgagacagggtcttgctctgtcgcccaggctgcagtgcggtggtgcgatcttggctctctgtagccgggactacaggcgtccgccaccacgccgactaatttttgtatttttagtagagacggggtttcgccatgttgcccaggctggtctcgaacatctggtctcaaatgatccgcccgcctcggcctcccaaagttctcggattacaggcgtgagccactgcgcccagcctgaatttttattccaataataactgtatttttggacttcccgttatgtgcccggcactgtgcgattggacgccattagtctcatcaaactaaattgaaagctttttagagatgaactttcagcgtcataatgtgatgatttattgtagtccctgccgatggaacttgaaagggatgcagaagaaaaagcccttcgcttcagcaatttacagcccaaatgagttgagccataatgaagacgtctctttaggtggctggagacagcttcagaggatacggggcgctgcctctgtaggggttaaatccactacttttatgcagaagtaacagtgccaggggtcacccaaactccgggagaccaggatggtgggtgctggcttccggggtggcagtttaccgcaaactgtccttggcttgcacctactgattctccacgtgtggcggtttcttttctgcgtctttttcttcatcggaagcggacagtgtgggaccccccctttaattctgttcggcacgtacatagtggagcccttcagattgcctgccgttacattaacacatagcctaataccctagtggaatgagcatgtgctttggagtaagggacgttgggcggcccatgtgttatgttagctgtttaaattggggcaggttagttaatcttcatgtctcgatttcttgtctgtaaaatagagatagtaacatttgtaaaagagggtgatttaatggttaaaaaagcgggaatctgtgtatggtatctagctcagtcctcgcctccaactccgcagctggtaaataacggtcgttttagtgtgatctgataggcgctgcagtggagatggggacaaagggctaagaaaacagaggtctgtgagacagggaagggcaagagggcaaggttcccggtgagaagctctgtccccacacagtgaaggaggaaactaggggaccacaggcagaaactaggagaaaccacaggaggaaactaggggtcttgaatcctggagcaggaacttactgtttctcttagaatatttcctggtcgtttatgtgatatttttctgatcataaaaagtacatatactgt

SEQ ID NO: 1177 - DNA, 1865 bp, Homo sapiens
gcatacagcagtgcagtgccgttattccagtctccgtagaaacgctgggactatggcggagccgactgggctgttggagatgtccgagctccccggagatagcagtgtcccacaggtgggcaccgcgagtggcgtcagcgacgtactgcggggggcagtcggcggcggggttcgggtgcaggaggcccgggaaggcccagtggccgaagctgcgcggtccatggcgcggatgccgggccctgtgcccgggcccatccccagcagcgtcccgggcctggcctccgcgccagacccccatcagcagctcgctttcttagaaattaaccggcagctgttgttccgcgagtatctggatggtagctccatgattccggtcagattactacgggatttcgaggaacgccgcaggctgtttgtggaaggctgcaaggcgagggaagcagcctttgacgcggatcccccgcagatggacttcgctgctgtcgcgtttacggtagcgctgactgcctccgaggccctcagtcctctggccgactgagtcggctgtgatgatgacattggtggcaaggaatagccaagtgacccttttgggatcaaaagaacaggcaggctgtgccagtttagttaactcagtcattagggggaatgcaaactggaagggaatacggcaatgtgcaattgaaggaggaagcacactccgaaatggaaacagacaagactgttgaatcttgttttctttcttcttttttagtattatttaaatagagaagggagtctcgcatccctaggctggtcccgaacgcttggacccgagcgatcctcccgcttcggcctcccaaagtgctgggattactttacaggcgtgagccaccgcgcccggccgaatcttgttttcaaacaggtcccaagacacttctgacttagcactttgttagcaatgcattttcctgcatttgtgaagaatccttcatgactttcaccataaaggatggttttgcaaagatatgagaaaaaaaaaatgccaataacagaacccatagaaatgaacctaagtgatgaaagaaaacaaagaaatagagttgtcaggaatccaggtgtacctgagttactaggattggaaggctattgagaggactttgaaatttcacaatttgtggtcatgtcaacaaatcctagtgtaagattcatatttgtgttttctgaggtactttagatgaacagtaaatattcaatagaaaaaaccacgtattatatgatcagtgttttcaagtctatgtgaaattgggtaggtgtggaataaacttgttttttgttaattttaagctttttattttattctagaatatgtattctattcacaagactcaacaaaaaaaagtatcggccgggcgcactggcttacgcctgtaatcccagcactttgggaggccacggtgggtggatcacctgaggtcaggaattcaagaccaccctggccaacatggttaaaccccatctctacgaaaaataaaaaattaactgggtgtggtggcacgcgcttgtagtcccagctactcgggaggctgaggcaggagaatcacttgaacccgggaggcggaggttgcagtaagccgagatcacgccactgcactccagcctggtcaacagagtgggactccgtctcaaaaaaaagaaaaaaagtatcaaaagatgctgtgagaaatctctcttgttgctgtcctttgccaaactcagaactattccatgcaggtgccattgcttgtggcttggagttttgttgttgttttcttggttttgcttgttttttgctttttcactgtacgcctttcaggttttctaatgcatatgcaaataaacatcaatct

SEQ ID NO: 1178 - DNA, 3284 bp, Homo sapiens
tcaggtaagaccgacagccccggaagggtcttccattccgaggaggcgcgcgcaggccggggagggggagttggtgcctggtgcagctccccaagggagaattttttttttttttttgacagcgcagagaaatctcactggggactggggcagtaggatcgatcccaatcccgaggaaaaccagagaagtagctgggggagacggtgccacattgtgagattcccagagtgaaatgtataggcccagggaaaagtgtcttcgcggccccgagacgcggggaggctctagactttcctgtggtgggcacagctgctgaatcccggggaccggcgcggagccaatgtgcgctaacccctgccctccctcctgtcctccatcccccagcacgcgcagcatcccacggcggctgttactcagtgcacccggctcgggggaaggcgggggacctcgccgtgggaaagggggcgggggccgcgcgggggaggaaccaggatggagcctgggaagccgaggcgccgggtcccagagcggaggagggggagcgtggcccccgagcccggacagactggcttattgtggtgttccgcttctggttgcagactcttgcaagctggatgccctctgtggatgaaagatgtatcatggaatgaacccgagcaatggagatggatttctagagcagcagcagcagcagcagcaacctcagtccccccagagactcttggccgtgatcctgtggtttcagctggcgctgtgcttcggccctgcacagctcacgggcgggttcgatgaccttcaagtgtgtgctgaccccggcattcccgagaatggcttcaggacccccagcggaggggttttctttgaaggctctgtagcccgatttcactgccaagacggattcaagctgaagggcgctacaaagagactgtgtttgaagcattttaatggaaccctaggcttgatcccaagtgataattccatctgtgtgcaagaagattgccgtatccctcaaatcgaagatgctgagattcataacaagacatatagacatggagagaagctaatcatcacttgtcatgaaggattcaagatccggtaccccgacctacacaatatggtttcattatgtcgcgatgatggaacgtggaataatctgcccatctgtcaaggctgcctgagacctctagcctcttctaatggctatgtaaacatctctgagctccagacctccttcccggtggggactgtgatctcctatcgctgctttcccggatttaaacttgatgggtctgcgtatcttgagtgcttacaaaaccttatctggtcgtccagcccaccccggtgccttgctctggaagtctgtccactacctccaatggtgagtcacggagatttcgtctgccacccgcggccttgtgagcgctacaaccacggaactgtggtggagttttactgcgatcctggctacagcctcaccagcgactacaagtacatcacctgccagtatggagagtggtttccttcttatcaagtctactgcatcaaatcagagcaaacgtggcccagcacccatgagaccctcctgaccacgtggaagattgtggcgttcacggcaaccagtgtgctgctggtgctgctgctcgtcatcctggccaggatgttccagaccaagttcaaggcccactttccccccagggggcctccccggagttccagcagtgaccctgactttgtggtggtagacggcgtgcccgtcatgctcccgtcctatgacgaagctgtgagtggcggcttgagtgccttaggccccgggtacatggcctctgtgggccagggctgccccttacccgtggacgaccagagccccccagcataccccggctcaggggacacggacacaggcccaggggagtcagaaacctgtgacagcgtctcaggctcttctgagctgctccaaagtctgtattcacctcccaggtgccaagagagcacccaccctgcttcggacaaccctgacataattgccagcacggcagaggaggtggcatccaccagcccaggcatcgacattgcagatgagattcctctaatggaagaagatccctaatatgggtcaagatccagatgactctcctgctccttcggggaaaggaccttgtatcttggagtgaggtcacagaaggatagagcctgggggcaaaatgtctaacttgtctacatggggaccacagttcacattatgcatctcaggctccacagtgaggctgacaaactgcaatggcagtgcttttaaatgagatttgaggattcaccaagacccatggggaaccggggcagcagggaagccctcgcgtggtcttggatgaggggtgttaaatgtgtatcgtgctgtggaacatgggacaattccacgcacatcccaccgaatcatcacgcatcccattgactggcaagtactccccgccccctctgaaagcatgtcacatcatgtaaatttgcttctaacatctgcttcaaactgtctctggactccaaatttggatgggtcagcctctgcagaaagtttgtgttgagatgctggaagaacagcagagcctcctgcaccctcagcaagggaccagctcccaaaggaaaggtccttgtgtgacatttggagaatcttccttcatccagacaactctactcgaagcaagacgaaagcaggatgtggcagttgcagtgagaaaggaaaggaaagatgggcagactctgctttctggaaatttcttcacaaagtagagctcatgaactctgtgctgtcttctggtaacatatcatcagtgtttgtattcatggtgtggcacatggatccatggcattgggtaaatctggtggtttttacacatggtcagaatgtgttcaaatacatctcatgatggagacagtaaccaaggtaatgttttgtttcagcattttaaaaagactccacttaacatttatctcagaatcatgagcctctctctagttgacaattgtcattgttcccccagccccgaattgaaccatacatttattttccaaaacagaaattgtttctgtaaacatatccgaccttcaaaagaagtgtgaggttggatttttcccccttttatttgtcctaagattccaggaggctggcctcccagcccagatagctcagccacctcacctgcctatcattcctgcattcctactttgagggtctcatcatgcccactgggtgttgttcctaagaaactgattgattaaaaaatttcccaaagtg

SEQ ID NO: 1179 - DNA, 2500 bp, Homo sapiens
gtactaaccactatacgatcacggcgagctaccgggacgccacgacgagcagctgacccagtgttgcccttctcgtctagatggcggccattccagctttcctaagcgtccattatctaccaggttcctcccgcacccacgttcacccgcaagagcagccgggagcgctgtggactccctagcccgaagtctcctcttggctgtacgcacggaccgcaaaagaagggacatgaaagtgctttgcaaccaaaggattcctatgaggccgggcctgcaatgatgtgaagcccctgaggacgcccgaatggtggcccaaagtctctctgacgctcaccatgccctgactgtcatgctatctgaacgactttggctgggactggagctcttaaattttacaagaaggaaaatcagttctgacccaccaccatacaacttccttgaggcgcgagggtgtccacaatctccacagaggcggcattgggtcaccgctggaggatgcagcaggagggaggacccgtgaggagcgccccctgtaggaccggaaccctggagggttcgcggcaagggtctccggggcataggaaacgggcatcccccaagggtagtctgagttccgcccagccccattcctggatgctcacgccgtctcccctaaactcccactgcgctcaccgggagcccatctcatcatcaccacagcccgtggctaatgggccaaaacagaagaagaaaagcaactggcggagtacaacgcgcctgcgcattatcagactcagggacaggctggaacctcgccccctagctatcctagaagactatgcggacccgtttgatgttcaggagactggcgaaggctcagcaggagcttcaggagccccagagaaggtccctgaaaatgatggctacatggagccctatgaggctcaaaagatgatggccgagatccggggctccaaggagacagcaactcagcccttgcctctgtatgacacaccctatgagccagaggaggatggggccaccccggaaggtgagggggccccctggccccgggagtcccgcctgccagaggatgatgagaggccccctgaggagtatgaccagccctgggagtggaagaaggagcggatttccaaagcctttgcagttgacattaaggtcatcaaagacctaccttggcctccacctgtgggacagctggacagcagcccctccctgcctgatggggacagggacatctccggtccagcctcgcccctccctgagcccagcctggaggacagcagcgcccagtttgaaggaccggagaagagctgcctgtcacctggccgggaggagaaggggcggctacctccccgactctctgcagggaaccccaagtcagccaaacccctaagcatggagcccagcagccccctgggggagtggacagatccagcactgcctctggaaaaccaggtctggtatcacggggccatcagccgaaccgacgccgagaacctctccggctgtgcaaagaggccagctacctggtgcgcaacagtgggaccagcaagaatgacttctccctctccctcaagagcagccagggattcatgcacatgaagctgtcccgaaccaaggaacacaaatatgtgctgggccagaacagcccgcccttcagcagcgtccctgaaattgtgcaccactatgccagccgcaagctacccattaagggagccgaacacatgtccctgctctaccctgtggccatccggactctttagatgtgaagccagggcactgtgatagacctgtacccagccctgtgcccatcacctggctgagggctgtggctcttgccagggacgtgatctttcaaacctttcttctcctgggatccagtagaagctggagattccttaatttattctaaagggaaagggctcctggggccttggagtaaggggttgtctggagctggggaaagaggaatccctggagagaaaggatagcccctggaggaagggggttccagagctactgggatggtagggagtttcagactggcagctccggctcctttccgaccttagggcagaggtggtgacctccaccaccaccaccctctccccactgggtccgtgcgaggtagtgcagaattcggccccttggggcgccttaccacctctctgcctccgtccccgacttccaccccagaccgtcggagggctccgcccagagtctggtaagaggtttggggaagacaggcccctgggaagcagccggctttggggggtggggagagaaggggaggggctcgggcagagggaactgtgcagtccccaggccgccccggctccgggctagaggcaataaataaacccgatcctgccgggcacagccgcgcccgcgcctccggcgccgtccccgggctgacgggggagggagcggagaagcgagcgcagattctgcgtataaatcagctctggagcagacacagcccggctgtgaaaagcac

SEQ ID NO: 1180 - DNA, 2404 bp, Homo sapiens
gtgctcgaggctgagggatgctggtgactcccggggtccccagccccgcccccatcggacgcctccacaggcggcgcaccctttccgccatccgcagagcaaggctgcctcggggcggctcagtccggcgcttcttaccttacctccgtctcatccttaactcaccacgagcgtccagggtccacatcctcctaaatggccactcgtcttaatctcggcgtcaggacccacgcggggtcaggactacccctccgcttccatgactgtctcctcgcggctccggctcccacggagcgacccctccgggttttactgaccccgggatgttgtatcctggaaactgcagttccacccaggggcttgatctgggttagtctgggggcaagtgagccgccgattctgtttgggtttttttttttttttttttgagacggagtttccctcttgttgcccgggctggagtgcaatggcgcgaagtcggctcaacgcaacctccgcctcccaggttcaagcgactcttctgcctcagcctcccaagtagctgggactacaggcatgcgccaccacgccaggctaattttgtatttttagtagagacggggtttctccatgttggtctggctggtcttgaactcccgagctcaggtgatctgcccgcctcggactcccaaagtgctgggattacaggcgtgagccaccattcccgggcactgtctgggtttgtttttttgtttttgttttttacgttcacagcatggacggtcagtgtgaagatcccagctgctcgggtcctagctggaattcttccattaaaaaaatctgtttgttatgcatgggttagttcacagaggaatagctggataagtgctggctttttccccgatttacccattttcaacctaataatgcaggtttttgaaataatgtgaatggttaccgctggcggatgttcacagggacacaccggattctacagacacatctgatgatctagccacggctgtcactttccccactgccgcgttgtccatcactaggactttactgccaatccttgcaagatagtggggaactagaataacagacatgggacattaccagttacaaccaaagacaagcttggcacatttgactgtcctcgttcctgctcctccgtgcctggccctcttcaggcttctcagctcctggggagcggccagccagggagcatcagctggtgggagcgatggggttgtgggatggcacaaaaaaacaccaagcgccactcagaaaggaaatgccgaatgcagactctcactcagtcggtgtgggggccaggaccctgtctctaccaagtgtgcgggagctgcccctggccgggagctcccagaccccactgcagagccgcagctccagttgtcccaggggcgactactcaggtgtccatcgccatgcacatgtgacacagaaaagggtgaggcgaggagggggaacgctggaaattgtttcacggaaaagggcgaggcaagggaggggaacactggaacttgtgctttgggtaggcgatagctaaggattctctctcgtctgggtcacggagattgtgcagccacagaacacctggtgtcatcagggcctgagctcctcccttctacaaagacctctggtctgcaggcctgcaggtacagtgctgtgggccacaaggcactgcctgtcgtattcatctccactctctagcacatctggcctcacgccacccccgggaggccggcaggcagatatcagctccacttcccagataagcaagggagccaggtactacccagggtcttgggggccacaccgctggcgagggacaggctgggcctggcagacagcactggcagtcggtgaagtgcccacctcagtgtcagcctcaggtcctgaccctggaggctgctgttactgagctgtggggaccaggatgccctaccatgatggagacccaagcctctctcatgatgactattcccaagggcactgcagaggggaggagctgtctcctcctccgtgtggcccacgcagagctggtgcaggtctgagtgagctcaccaagacaggccaatcccagccccagactccaaagcgtccccaagaggtcagggagaggctctgtgcccctgaccccaaggatatgcacaggtcacagggcagagcccccgctagacagcaggagcaccctgctctgtcagcctgcttccccaggacggaggccctggtggtaaggcaggcaggtcttgagcccccacaagacagcaggatacaacataacccttttttaatctgaagtgtagacttcatcctcacgttagaaaactccatcttttttttaatccctaagttctttatcaaacctttatgttaaaaatataaataagtctcatac

SEQ ID NO: 1181 - DNA, 3371 bp, Homo sapiens
ccccctccagcgtgcagccgcgccacttcctgaccttggcacccatcaaaatacccctccggacgtcccccgtctcagatacaaggacagagcggggccgagtggcccgccctcctgccctgatgctgcgggcccagaagagccgggatggagacaaagaagacaagagtctcactctgtcccccaggccggagtgcagtggtgtaatctcggctcactgcaacctccgcctccaagtttcaagtgattctcctgcctcagcctcccgagtagctgggactacaggagcctccaccgatgctggggggaggagaggacagcacagccagaggcaacaggccagtggcctccaccccggtgcccggatccccctggtgtaattctgcactgtggtcacattctgcagaaagaaaaaaaacagcatttaagcgatgagctatcctgctctgatctgtctgtgaatatatattaaaatgataatgctgttgcatgtctatcagcgaaaggcagtggctgaagaaagtgtagcatgccttatgcttcaaaagatctgttttccctccactccaagaagaatcgtaactgaatggcagttaattaaagacgtgcctgttctctctgtcgccctgcgtggctgcttgctctcggaatatgccacactccagacaccctccacgagggagctacagtttttggtttttaaaaatgcccttttataatggagtcatttggaagcagaataaaaggttattacagtaaaaattaagtttcaagcctgaagatgagagtgcagtacacagctgggaggcacagctaatttaaagaacagaaatagcaaccacttgtgtcagctcaatgtgccagccaggtacagaaggcagccggctaaggagcgcagggcccccaccagccttgcatagcgagtgagcacgtccctgctgactgggcctgctgtgccatgccctggtcctctgatgattcgggtgaacttggctccaatctggacagactggcacccctggcttctatgccatggtcagtgtcggtggcaggctcctggtgcctccagccttccatttgtagctaaagctcctctgtaccctgggagtgcctcggggtgagacctctttgtactaatattatgctgttttccagccacccattctccaacccttacaatttagctcgattctgatgctaactactgggagttagagccaaaccccacaggctggggtcagtccctctggctgccctgctttagacattggctgcaaatggggccccccagctgcctgcacatctgcccagctgaccacagatctggggttcccatgacctcctctccacttcagtggtgatttgctaggaccactcacagaactcaggaagcgctttacttaggattacagttgttttatcaaggatacaactcaggaacagccagtggaagcaatgctcagggtaaggtgtggacctgactgagcttctgggcctcgccggcgccaccctcccagtgctgcagcgttcaccagcctggaagcactctgaacctcaatgttttagaattttaatggagatgtaactacataggcatgactgatgaaatcatcggccaagtgaaaggactcagagggttgggcagcgctgaaagtgacggccctccagtcacgtggttggtgtttctggagaccagcaccctccctgaagctactcaggggtcctgaagtcacatggttggtgtctctggagaccagcaccctccctgaagctactcaggggtcctgaagtcatttcatttgcgcagcctcaggcacaggtgttattcctaccaggtcagggacttggtaggaataacaagatgctttcttcgctcaggaaattctaagagtttgggaagctctgtgtcaggaatctggaacaaagaccgtatacatccctctgctgcttaacgacaggggtatattctggaaaggcatccttaggcagtggcatccgacatccttttatgcacatcacagggtgtgctcacacaggcctggtggcacagcctcctgcacgcctgggctgcatggtgtagaccgtggctcccaggctgcagaccacacagcgctgactgcacggaggcagttgtgacacagtggtagggatgtgtgtgtctaaacacatccaaatgtgagaaggtagagtaaaatttgatattataatctgacgggaccaccatggtatgtgtggtcagtccatggttgagagaaatgtcactctgcggcacacgactgcatgtacattttacgatgccacgaactggttgagagcttctacaggcaaactctccagtgtctccaaggcaggcacactgccgcatatcacactgcaggatggggaaacgttccccaagaccctgtggaatcctcacacagcttccgccaagctcccctggggcgttgcagggatccagaagacttgaccttgagccctaggaccttctcactgcgaaagctgcggctttcttccccagcgatattgtgttaccatgagcaaggcttcgtgcgatccagcaaatgaaaacggttccctggctgctgcactcccctccctcggcgtgggtctttgccgatgaatcctgggtattgagcatgtttgacttttgaaaaactagtatcaaaatcatgttctgagatgaagttggtagaacttttctaaaaagaaaggaaaagtttcccaagacatgatacatgtggatgatgttcaagaagaaaaaggtgattagaaatgatggtgattacgagagatgcggggctcggtcacatcagcctgtgtcactttctcctgtgcaccgtcctctgacttgcagttgcactcgctaagctgagggaggacgcatcggtcttctttgagtgtgtggtctggacgggcgatgaccgagttttcttcttcaacccaacgatgcacctgtctgtctgggagaagcccatggacctgaaggaccgcggagacctcaacaggatcattgaggacccgccccacaaacgcaagctggaggcaccagcaactgacaacagcgatgggtccagttctgaagacaacagggaagaccaagatgtgaaaaccaagaggaaccggaccgaaggctgcgggagtcccaagccagaggaggcaaagagagaggacaaaggcacaaggacgccgcccccgcagatcctcctgcctctggaggagcgtgtgacccacttccgagacatgctgctggagagaggggtatcagcattttctacctgggagaaagaattacacaaaatcgtgtttgacccacgctatctcctgctcaactctgaggaacgaaagcagatatttgaacagtttgtcaagac

SEQ ID NO: 1182 - DNA, 2774 bp, Homo sapiens
agtcagtcagtcagtcagtcactgagcgcgcggcgcgggagctgctggcagtcgctgcgtctctggcgagggagcgctgcgcctggggaggaggcggaggcagcggctggaggagcgcgagcggcggtttccttgcccggggccgcgggaaggccgaccgactgccgcgatggagcagctatcagatgaagaaattgatcatggtgctgaagaagacagtgacaaggaagatcaggacctggacaaaatgtttggagcctggcttggagaactagacaaactcactcagagtttggattctgacaagcccatggaaccagtaaaaagatctcctcttcgccaggaaacaaacatggccaacttttcttaccgcttctccatatacaacttgaatgaagctctgaatcagggagagactgtggatctggatgccttgatggctgatctttgctctatagagcaggagctcagcagcattggttcaggaaacagtaagcgtcaaatcacagaaacgaaagctactggggctaccaggacccttgctgactgcagcctggttgtgattagttcaggttactaggtgttctgatggagtgggacagtccaagtccagtaactgacattacgttttatgcgtgtgcagtttggtataacgtggagtcagtgctctaacgacacactatacttctatatgcttttttctgtgaattttccttggtacatgagagaaataagtactctcatcaacttatgataaattggactattaggaataaaacaatctcagagcagctcctaaacaagagaataaaaatgggccatcccagcacttataaggggagcacatcttgtaatgaaagtctgtgcctattgttaatgattaccaatgcaaactgcagaaatcagttgacattgtcccacaaggaaaaagtgatgccagtaaagtgggggaagagatggtaaataattctagaatgagcaaaagtgcttaattagtacagtatactcaaggtcttgcataacccacactccacgaaaaccgcatcgtaaacagagagtgaacagcacctctccattgctacatctccagaatattgttcggttatgttcatgtggttatggagcaataagaatatataccattaatttttaggtctttcaaattgttcaccaagttttgtgtttgatatttatgaagtgatctttaacacatctgcattgttaatttaagcatgcacagaaatttgggtaatgtttgagtagattgccaagcgctactgtgattcatgaatgaatttctcatagtcttctgcctgcagttttatagtttgaggggcacccatatttgtgggttagagttagtaagaatatgaatccagttatcaaagtattcatccctgaggttttgagttttattgtggtggtgattttctcatgagaaggtagacaacacttcagtttttcttgagggggaaaaaatgtacccgctaaccttttttcacccatgatttgagccctaaaacaacagcctttatgttttcagtgcaggatttcttggaatttcttgcttgtatcaatcctgatgatagccatcctgaacagatgcttctggtctgttttcctggaatagcagacatccttttgaacactaatgatgccaggaagagagtaaggctagaggaggagactcattttaaccccagtccagtggcttgtccgacaacaggccatttccctttacattcctccacagacagaaatggctattaaaaatgttttaacctcatgtatgaactgaatttaaaaaaccactaaagtgatactttatacttctgttttactccctagtgggttttctttaatttggatttttgttgggatgtagcttttcctagactgtatttctgtagctctttttctctggtgtattcatggaaagcatctactgccgcacgacactagtactgtgccttctttcactgccctctgctctgcagctctcacccagcttggctgcttcaagtctgtgcagttgacttggctgtactgaaaagtgaacagcatggattaactcatcctgctgctgagggcagtgcaaacaggtgcttattagaggtagtgacttgcttaattagtgacactcctaatttctactatggataatttcaaagtagaatcactctatgcttagagttttggcaccaatgctgtagggcagcagaatctattctcagtaaaataacttatggtttattagatattctgtattggattttaccagcttgacttttactgctcagatgctttctttcccccccttagacgctgtaattctcttgggaagagtaactattcttaaggtttttacagatacccaccttagttgtaaattggatagtttatatttctgggactttttaaatgaaaatgtggaatgttaagttacaaaagacttttcatcagaaaatttcaaacaaagtaaacatggcgttttatagtcctctaaaatctaggtgctcccacccaccaaaggcatatcctgcaaagggctgtgaactatcttggtgaactgtcttgggtcccctttccatgtatgttttcttgtcactgaaaacaaacaacgctgagtttatcaagaaaatttaaattgggggatcataataattccaaccaagtgacaactctgacatcaaggttattaggagctgtacatccaattcaagttttatttgctgctattctgggagaataaacttgtatatggagaataaact

SEQ ID NO: 1183 - DNA, 2052 bp, Homo sapiens
ggggcgcggctcggaggggaggctagggggccgtgccaggcccgaagccgaggcggggccgggatgcggcgctgaggcccagcatggccggcccgggccccaccttcccgctgcaccggctcgtctgggcgaaccggcatcgcgaactggaggccgcactgcacagccaccagcacgacattgaacaggaggacccccgcgggcggaccccactggagctggccgtgtctctgggaaacctggagtctgtgagagtgctccttcgacacaatgccaacgtgggcaaagagaaccgccagggctgggcagtcctgcaggaggcagtcagcactggagaccccgagatggtgcagctggtgctccagtatcgggactaccagagggccacgcagaggctggcgggcattccggaactgctcaacaaacttcgccaggcccccgatttctacgttgagatgaagtgggagttcaccagctgggtgccccttgtgtctaagatgtgcccaagcgatgtgtaccgcgtgtggaagcggggtgagagcctgcgagtagacaccagtctcctgggcttcgagcacatgacctggcagcggggccggaggagcttcatcttcaagggccaggaggcaggagccctggtgatggaagtggaccatgaccggcaggtggtgcatgtggagacactggggctcactctgcaggagcccgaaacactgctggccgccatgcggcccagcgaggagcatgtggccagtcgcctcacctctcctatcgtctccacccacctggacactcgtaatgtggcctttgagaggaacaaatgtggtatctggggctggcggtctgagaagatggaaactgttagcggctacgaggccaaggtgtacagtgccaccaacgtggagctggtgacacgcacacgcacggagcacctctctgatcaggacaagtcgaggagcaaagcggggaagactccattccagtccttcctggggatggcgcagcagcattcctcccacaccggggcccccgtgcagcaggcagccagccccaccaaccccacagccatctcccctgaggagtacttcgaccccaacttcagcctggagtcacggaacattggccgccccatcgagatgtccagcaaagtacagaggttcaaggcaacactgtggctgagtgaagagcacccgctctccctgggtgaccaggtgacccccatcatcgacctaatggccatcagcaacgctcactttgccaagctgcgcgacttcatcactctgcgccttccacctggcttccccgtcaaaattgagattccccttttccacgtgctcaatgcccgcatcaccttcagcaacctgtgtggctgtgatgagcccctgagctccgtgtgggtgccggcccccagctctgctgtcgccgcatcagggaaccctttcccgtgcgaggtggaccccaccgtgtttgaagtgcccaacgggtacagcgtgctgggcatggagcgcaacgagcccctccgggacgaggacgatgacctcctgcagttcgccatccagcagagcctgcttgaagcgggcactgaggcggagcaggtgaccgtctgggaagccctgaccaacacccggcccggtgcccgccctcctccccaggccacggtttatgaggaacagcttcagctggagcgggccctccaggaaagcctgcagctgtccacagagcccaggggcccaggatcccctcccaggacacccccagcccccggtccacccagctttgaagagcagctgcgcctggccctggagttgtcttcacgggagcaggaggagcgggagcggcgcgggcagcaggaggaggaggacttacagcggatcctgcagctgtcactcactgagcactgagccatagccccgggagggctggccaggccactccctgcccgcttttgtaatttatttatttataaactctctgctgctgagcttggggcctggagccccaggaatgagcaggcaggggagactgagatggaaataaagagactgtcgcagc

SEQ ID NO: 1184 - DNA, 2528 bp, Homo sapiens
agatgccgcctggtccagctatcgtgctcggtattcagttttccggagcagcgctctttctctggcccgcggagcggtcccgcggccgagtaccggattcccgagtttgggaggctctgctttcctccttaggacccactttgccgtcctggggtggctgcagttatgtccgcgctgcgacctctcctgcttctgctgctgcctctgtgtcccggtcctggtcccggacccgggagcgaggcaaaggtcacccggagttgtgcagagacccggcaggtgctgggggcccggggatatagcttaaacctaatccctcccgccctgatctcaggtgagcacctccgggtctgtccccaggagtacacctgctgttccagtgagacagagcagaggctgatcagggagactgaggccaccttccgaggcctggtggaggacagcggctcctttctggttcacacactggctgccaggcacagaaaatttgatgagttttttctggagatgctctcagtagcccagcactctctgacccagctcttctcccactcctacggccgcctgtatgcccagcacgccctcatattcaatggcctgttctctcggctgcgagacttctatggggaatctggtgaggggttggatgacaccctggcggatttctgggcacagctcctggagagagtgttcccgctgctgcacccacagtacagcttcccccctgactacctgctctgcctctcacgcttggcctcatctaccgatggctctctgcagccctttggggactcaccccgccgcctccgcctgcagataacccggaccctggtggctgcccgagcctttgtgcagggcctggagactggaagaaatgtggtcagcgaagcgcttaaggtgccggtgtctgaaggctgcagccaggctctgatgcgtctcatcggctgtcccctgtgccggggggtcccctcacttatgccctgccagggcttctgcctcaacgtggttcgtggctgtctcagcagcaggggactggagcctgactggggcaactatctggatggtctcctgatcctggctgataagctccagggccccttttcctttgagctgacggccgagtccattggggtgaagatctcggagggtttgatgtacctgcaggaaaacagtgcgaaggtgtccgcccaggtgtttcaggagtgcggcccccccgacccggtgcctgcccgcaaccgtcgagccccgccgccccgggaagaggcgggccggctgtggtcgatggtgaccgaggaggagcggcccacgacggccgcaggcaccaacctgcaccggctggtgtgggagctccgcgagcgtctggcccggatgcggggcttctgggcccggctgtccctgacggtgtgcggagactctcgcatggcagcggacgcctcgctggaggcggcgccctgctggaccggagccgggcggggccggtacttgccgccagtggtcgggggctccccggccgagcaggtcaacaaccccgagctcaaggtggacgcctcgggccccgatgtcccgacacggcggcgtcggctacagctccgggcggccacggccagaatgaaaacggccgcactgggacacgacctggacgggcaggacgcggatgaggatgccagcggctctggagggggacagcagtatgcagatgactggatggctggggctgtggctcccccagcccggcctcctcggcctccataccctcctagaagggatggttctgggggcaaaggaggaggtggcagtgcccgctacaaccagggccggagcaggagtgggggggcatctattggttttcacacccaaaccatcctcattctctccctctcagccctggccctgcttggacctcgataacgggggaggggtgccctagcatcagaagggttcatggccctttcccctcctcccccctcagctgggcctggggaggagtcgaagggggctgcagagagggtagagaagggactttgcaggtgaatggctggggccccaaatccaggagattttcatcagaggtgggtgggtgttcacaatatttattttttcatttggtaatgggaggggggcctgggggtatttatttaggagggagtgtggtttccttagaaggtatagtctctagccctctaaggctggggctggtgatcagccccaacagagaaaatgaggagtttagagttgcagctggggaaggggtttgaaggaagttggaagtggggaggggtgggggcatctggtctcagaaatggaccagctggatgcagggcaggggactgagggtgcttgagtaggatgtgagacttcatgggcctgggttctgttgagttttttcagtatcaatttcttaaaccaaattttaaaaaaaacaaggtgggggggtgctcatctcgtgacctctgccacccacatccttcacaaactccatgtttcagtgtttgagtccatgtttattctgcaaataaatggtaatgtattgg

SEQ ID NO: 1185 - DNA, 1857 bp, Homo sapiens
agtgagggagagggtgctgcgagctgctgggctgcacacgcacacgcacacgcacacgcacactgatgcacacggacctggacacagacatggacatggacacagaaaccacagcactctgcccctctggcagccgccgggcctcccctccagggacgcccacaccagaagcagatgccacgctactaaagaagtcagagaaactgttggcagagttggaccggagcgggttaccctctgcccctggggcccccagacgaagaggcagtatgcctgtcccctacaagcaccagctccggcgggcccaggctgtagatgaacttgactggccacctcaggcctcatcctctggctcgtctgactccttgggctcaggggaggcagcccctgctcaaaaggatggcatcttcaaggtcatgctagtgggggagagcggcgtgggcaagagcaccctagcaggcacttttggtggtctccagggagacagtgctcacgaaccggagaacccagaggatacctatgagagacgcatcatggtggataaggaggaagtgactctagtcgtttatgacatctgggaacagggggatgcaggagggtggctgcgggaccactgccttcagaccggagacgcctttctcatcgtcttctcagtcaccgaccgacggagtttctccaaagttccagagaccctacttcggctccgggctgggaggccgcaccacgacctacccgttatcctcgttggaaacaagagcgacttggcccgctcccgggaggtatcactggaggagggccgccacctggccgggacgctgagctgcaagcacatcgagacgtcggccgcactgcaccacaacacgagggagctcttcgagggcgcggtgcgccagatccggctgcggcggggccgaaaccacgccggaggccagaggcccgatccgggcagccccgagggccctgcgccacctgcacgccgcgagagcctcaccaagaaagccaagaggttcctcgccaacctggtgccgcgcaacgccaagttcttcaagcagcgctccaggtcgtgtcacgacctctcggtgctctgagccgcggtcgccatggccactgcggtcgccatggtcaccgcgccctccgctcgccccccctcgccccgccccgcccccgtccggcttccttggtggaggccgtctaggaaaccaaaaactcccaggatgccccggtgtgaccgccgggggcggccccgggccgctcggcggcacctccacacccgccccaacgcgttctctggagctttgggcctcagggcgcctagaaggcgaggacgcagacctgaaggcggccggtgagcggggcgggttctgctgggtcgggaagaaaaataattctgcaaggtattttgttttttattaattcgcgcttggccacctcatctgtaaagagattctaaaagcaagatctggaaaagtgcttcgtagactccttgacggagtttgcctcctttgtacgctgcgtgaacatgcctcacctttaagagagtcttaaaggtaaagacacgaaaacacttcctccagggaccttcccgaaaacgttctggctctcatctggtgcggcatgtgtccactttgcctttaaggagttcttaaaggcaagggcctggaagtgctgttcctgagatggattctcttgacttaccagtccaccacggcacttcccctttaaggttattaaaggtaaggggtggacagactttctgcattcagataatgagcagtggcaaccccttttggccagggccaggggggcaccagcaaggggccaccctttcccttttcaataaataatttttgtactgcc

SEQ ID NO: 1186 - DNA, 2268 bp, Homo sapiens
agactaagctgcaacactggcagagcctcccaaggaagggaggagggaggacagaggccaaggcggctcctggccaccctcgcagcttcctccctccctggccacaaggacccaaagctcagagggatggatgaacagacaggaaggctcaggctggacacgtattgtatgagtgccaagcagatctgggcatggagcaaatgctcaggaaggctgtgggatgagcacatgaaatggatggaaggatggacggacagatggacagatggatggatggatggatggatggatgagtggagcccaacaccagctctcaggtcctacggaggtggcctctctcagcagacgttcatcttcactgacggggaagatgaggccctggccaggcacacgggcaacgtggtcatcacaaactgctcggccgcccacagccgccaggcgctgtcctgcaagatggccgtggagtatgaccgcttcatcgagtccggcaggaagtggttctgccacgtggacgatgacaactacgtcaacctgcgggccctgctgcggctgctggccagctacccgcacacgcgggacgtctacgtcggcaagcccagcctggacaggcccatccaggccatggagcgggtcagcgagaacaaggtgcgtcctgtccacttctggtttgccacgggcggcgctggcttctgcatcagccgtgggctggctctgaagatgagcccgtgggccagcgggggtcacttcatgaatacggctgagcggatccggctgcctgatgactgcaccatcggctacatcatggaggccctgctgggtgtgcccctcatccgcagcggcctcttccactcccacctggagaacctgcagcaggtgcccacctcggagctccacgagcaggtgacgctgagctacggtatgtttgaaaacaagcggaacgccgtccacgtgaaggggcccttctcggtggaggccgacccatccaggttccgctccatccactgccacctgtacccggacacaccctggtgtccccgcactgccatcttctagtggccatggctgagacccaatccctgggcgcccctggtatccaaagggcccagggaccctgttgcgctgccctggcctcggcattcgaggctcccctagggccgtgcctgtgcgtgtgcgtgtgcgtgtgtgtgtgtgtgtactgcatgcccacccgggtagcaggctgctgggcagttctgctctgtggaggggcgggcaccagcgccacttatgtgcctctgctccgagggccagtgggctgcagggcctgcttggaggaaggatttgtgtgtcggaggccactccgagggcaattctgttaggatttttggatctttctacagctacggggctccgggctactttgcagggatgcgatgcgtaggtgcctttctcttcctgctgaccacaagctctgtgctgggggtacctgtgccctgaagtcctggcccctgtgtcatagccccaagtacgactcactgagccatgctcactgcaggggaggctgggtctgggggtgcgtgacccaatccccttcctcctggcctggacgctgtggcttaagagtaacagcagccaccgcccagttccagtggccccacgaagcccccagtggctggctgtccagctgggcaaacagtggcacccctcccagctcttctgagtggggagtcttccaggcctcctcagaggtcttccctttgcctccccaggacagggtgagtcagagctcagcatttaatctcctctccaaagtagagagcaagtcgcccacagtgggcgtgtctgtaaatattgtgacagtatttttttactgtgctgttttttttgaaaggggatgggtaaaaagtagggtgttcttgttttttgcttgggagggtgggggtgggggagggtcttattttatcttatcttctctgtggatcagaaaaaacagaagccaaactcggggtcatctttgtttttaaagctgaagtgggactgtctggcactctgtgtatttatgcgttccagcatctggaacctcccatccctgccctcctcctgtgtagctgccacctccccgctgggcccagcatggctcacctgtcccgtgggctgtgtttcttgttgtttttctctttgcaaagacatagctaggaaagcgaatgataagggaaaagttctcagggaattgaagtgttgttgctatggtgacgtccttttgctgtgaataaaggtgctctttgcagc

SEQ ID NO: 1187 - DNA, 1754 bp, Homo sapiens
aaaagcctgggcccgtgggggacgcacatggtcctgttcgtactccaggatggcggcgtaaagggcccgctgctcccgttcctccggggtcagggcgacttggctgcaaaacctcctggggagaaaggcacgcggtgggtgccggggccaggccctccccgcagcggccccaggggcgggcaggagtcccacctgttggcggcctcctggagccgcagccggcgctcctccatctttctctggagctgggtgcagagtcaaggggccgagcgtgggatctgagcgggccctcggttcccaaccccgtcccacacccggagaggccgggacgtcccagggacctcctctcggtgaggggctgtccccagggaggcctcctccagtggcgtcagctctctggaaatgtgacaagctgctgtctagaccccaggaagcccagtggtgtctggacaccagaggagtctctctcatcctcccggattgctctgaggccaggagctttgtgactctgccccctgaagcttctggaagatctcgggtggcagaaaaggagagagctttcctccttcatcggagtatacacggcggtgtcggccggcaggctgggggatgggagcagctgcaggcatggttggcttcaggcgtgttttccctgcaagccatgggtaaccaggggtcaagcggtgggccacatcccacagaggagatgcgggcttgggggatgccccaggagagccgcctactgcaggagacccaccaagcttggcggccgtcgactgggccctctccagacactgctgtgctagtttcagcatcttggaggtgtcggggggcacagtttccccagcttctgggggagggacaagaaggctggtcacagtcggctctaccactgttacttactgctgagataaaatgaggcaacggaaaaggcctctgggaagtggccgttttacagagacaaggacgtgctgaggggatcgcctcacccatctcccaccggctgtgtccccaaagtcctgccttcccgtagcttggcatggagcacctctgcgcgaccatggacctgctcacacagcccttctgcgcgccgtgggagctgcctctctgtgactcgcccctggacccaccgccccagcgcctgacccacctccctgctgcccttcacagaaaacttctcatagactcccattttctcatcccgccccgatttagcccccgactccccccggaaactgcccttacccgtccccaccttgccagacacggtgggccactggagttcctctgtcttctgggactttgctctccccaggggatcctctgccactcctccacccaactcctcaatcttggagcgccagagctcagccgagctcaccggctccctagggagctggggcaactgttagctccccctgacctgtgtgatcctacgtccagtggctgccccgacctctgtgatcccacgtccaggggctcccccgacctctgtgatcccacgtccagtggctcctccgacctctgtgctcccacgtccagtggctcccccgacctctgtgctcccacgtccagtggctcccccgacctctgtgctcccacgtccagtgggtccccctgacctctgtgatcccacgtccagtggctccccctgacctctgtgctctatgtccagtggctccccctgacctctgtgatcctatgtgcagcggctgctggcctctcaaacttaatgtgttcattgcggaacttgc

SEQ ID NO: 1188 - DNA, 1770 bp, Homo sapiens
tcagtggtagcgcggggactggctgggaagcggtcggtcgagtgtggcctgtgtggactcgcatcttgcccgaagccgggcggaggagagctcaagctaagggtgatcagcccatgacctaaacctccagacaaaataaaacggaaaatttgctagaatcaagaatgatggatccatgttcagttggagtccagcttcgtactacaaatgagtgccataaaacctactatactcgtcacacaggttttaagactttgcaagaattgtcatcaaatgatatgcttttacttcaacttagaactggaatgacactttctgggaacaatacaatttgctttcatcatgtaaaaatttacattgacagatttgaggatttacagaagtcatgttgtgacccatttaacatacacaagaaattagccaaaaaaaatttgcatgtaattgacttagatgatgccacttttctgagtgctaaatttggaagacagcttgtacctggttggaagctttgtccaaaatgcacacagataatcaatggaagtgtggatgttgatactgaagaccgccagaaaaggaaacctgagtcagatggaagaactgctaaagctttgaggtcattacaatttacgaatccaggaaggcaaactgaatttgctccagaaactggtaaaagagaaaaaagaaggcttacaaaaaatgcaaccgctggttcagacagacaagtgataccagcaaagagtaaggtctatgatagccagggtctcctgatttttagtgggatggacctctgtgactgcctggatgaagactgcttaggatgtttctatgcttgtcctgcctgtggttctaccaagtgtggagctgaatgccgctgtgaccgcaagtggctgtatgagcaaattgaaattgaaggaggagaaataattcataataaacatgctggataatctgcggtaccaaactatggagcctttaaaggtctttatttctaaaaatctgttactctaagatacattttaagcttgattatcatatgacaaagattttaaaaccatctcagtgtgccctaatttttcatcttgggtgctttaagattcactatttgatataaattcagataggctatttttcagtagtcagcgttaagcctgtctggatcaatataaacaagtagggtgtaggcagtcctctatttgcatgtttcccatgggcacaaatttcagtgacctagatttagtttaaataccagtttccttaccaggaaggaaagaaaactggtaaggaaactgttgttgttaaaatctaggttaaaattttagttagcacattgtaactgagtaattacatgaagtacaaacctctctgctagctcttcagtctacaaatcgctatgtaaataacagatatgcttcatgattgtgaccagtcatgttatttctttcaaattcttccagtggtttgtccctgtgcatctgttaattcagttcacgtacagcagagcatgtagttatgctgtctctctgtcatctacttgacattctatagaagtgaacactcgaaagaactggtcaacaaagatgaaagtgcagcaaagcaatgaaaaatgataacactggaagtgaaattttaatcaaacataaatgaatttgtagaagaagtcactgaccatgggaatgttgttcttgctgctgtgtattcataggagcttagtgaaggcaaacttaccaacacaaataagcaaagtggttgcaataaagacagatacgtccc

SEQ ID NO: 1189 - DNA, 2820 bp, Homo sapiens
gcttttacgcagtgttttgaggtgcaggactgcaatgcgcgcacttccggaccccagactcttcctacggcgactgacacctcagacacgcgttgtggggggcggcgctctggctccggggctgtgcccagcgcgagcgtggccggcacccacttgctgcagagccggcactgcactggggtccttgggggcgactcctccagacgtctctgcgggttgtcgggtgctgccgagttgggttgggggacgctacaggtagtgggtccggagcagcggctggcccctcatctcactgcccttcctcggaccccaccgtcctctggaagcttgtgcagggcacctgccactgtgaccacctggacgcagatacctgctttcccacaacagcaaggaagaaccatggcccaggggtcactgtcattcggggacgtggctgtgggcttcacccggaaagagtggcagcagctggacctggagcagaggaccctgtaccaggatgtgatgctggagaactacagccacctgctctctgtgggctgaactgtctgcttgcttggaaggcccagctggctcagcacaaatcctttaaccgtttctccccaagagggtgtcaagtcagcaaaccagctgtgatctccagtttggagcaggggaaggagccatggatggaggaggaagagataaggacgtggagcttcccagaagaagtttggcaagttgctacccagccagatagccaacagcaacacgaagaccaacatttgagccatacgtttctagacaagaaagactggaccggaaatgagcttcatgaatgtaacgaacttggaaaaaaactccatcagaacccaaacctccttccatcaaaacagcaggtccgcacacgtgacttgtgcagaaagagtttgatgtgtaacctggacttcactcctaacgcctacctggcgaggaggagatttcagtgcgacggccacggaaacttcttctctgttcgaaacttgaaactccaccttcaggagcgaatccacgcggaggtcaccagtgtggaagtgctttaagctgtgacgagggagttcctgcagctcagggagccagtagtgagaaaccccacgaatgcacgaagtgtgggaaagccttgtgctgcagatcggacctcagggtacatcacggggtccacgcgggggagaagtcctctgcgtgcagtgaacgggggagtggtttcagggagaagctttgccctgacaaacagggaacttacacaaaggagaaacccgctagagacagcagaagtggtaaaacgatcttccggaagacacgcctgtgtgtcccgggcacagttcacgccggagcgaagccttacaagtgttgggagtgtgagaaaacctcccacaagtcgcgcctcatcgagcaccttcgctcccacacgggggagaagccctgcggctgcagggaatgcggaaaggcctttttccagaagtcacacctcatcctgcgtcagaggactcacacgggggagaagccctgcgactgcgcggagcgcgtgagccactttagccaggatatacttaattataaagacaactgtggatatgaagtttttttttcttttgagatgaagttttactcttgttgcccaggctatgggaagaaatgaaatcattacgactaacagatctaaaaagcgtgagaacatcccagagggacgcaggggtgtgttccaagtgtgctacagacagataatttttatttttgtgttgcactggtgaacagaacataattgtgaatctgtagacatacataccataatatatagaagatctatggatactttctatgctaaattatacccttctgtgtttgtgatatagaactggaataagatgaatatattattaaagcagagaggcccactgcagcagcacataccatttcttctgtttgtcatcacgtattacagagcccctgaacttggaagctaacaatttcatgacatctgataactcacagtcaactagtttataagttatatttttggctgggctcggtcgctcacacctgtaaacccaacactttgggaggctgaggcgggcagatcacatgaggtcaggagttcgagaccagcctggccaacacggtgaaaccccgtcactgaaaaatataaaaattggctgagcatgctggtgattttctgtaatcccagtaatcccagctacttgggaggctcaggcacgagaattgcttgagcccggcaggcagaggttgcagtgagctgagattgtgccacttcattccagcctgggcgacagagcaagactctgtctcaaaacaagctatatttctatattaggactccattttctggcaatacggtggaccgtctaaagtgaaaatcaccggggcagtggctcgtgcctgtgatctcagcacttgggaaagtcaaggtggacaggtcacttgaccccaggagttcaagaccagcctgggcaacacgaaagctgacttcatgagaccgaggatctcgttcgttgatcgatgctacatattcagcatgttagataatgaggttggtgagattgatgaaatcccgcccaccagggccgacccacaaagagccactttatgaagaacatgctcctgaactccactccacaaccagcttttgaaaagaaaaatctgaaaaaatttgacctcagttaaactggtccaaatgcctgagcataaccaaaatctttcctcattcactcttcacgtggaccgtgtttaatttggttgctggtgatcatatttgttttagtaaaggctgtcactctatcttgggcg

SEQ ID NO: 1190 - DNA, 3186 bp, Homo sapiens
actagagtagaagtgattgaatgtgaagtgtcaggagattgctcgctcgtccttcgttaaacccctggtccggctgtgtgctgtggatgcgggtgtgtgttgaggggacctgcgtctgccggggccgcaccccctcccgcaggaccttggctggccgcgcgtttcctgcctgtttcctgtccagcagctggcgagctggggaccggcaggaaaggatgcgctgcccagaaggggcgggaaccgaccacgcccggtcccgtgtgccccccgccctcccggcgcccgccctccccacgccgtcgggggcgggccccgcggggctgtgggagccgaacgccgcggggtcagggcgtgcagtctgggacgcgggatgcttggcgctctacctcgccgcccctgagccttcccgtccgcctcgccacgcgcccggacggcctggggttgctgcccgtcagtctcgaaaggtgtttttggggaaaaaaatcacaatctggacgtgagaaaggacatgaggagactaaagacctgggattttgtcaatcagaatgaaaccaatgttgaaagacttttcaaatctattgttggtggtactctgtgactatgttcttggagaagctgaatatcttctcttgagagagccaggccatgtagcactaagcaacgacacagtgtatgtggatttccagtattttgatggtgctaatgggacactgaggaatgtatctgtcctgctgttggaggccaacaccaatcagactgtaactaccaagtacctcctgaccaaccagtcccagggaacactaaagtttgagtgcttctatttcaaggaggctggtgactactggttcacaatgactccagaagcaacagacaacagcactccattcccctggtgggagaaaagtgcctttctgaaggtggaatggcctgtctttcacgttgacttgaataggagtgccaaggcagcagaaggcaccttccaagtgggcctatttaccagtcaaccactgtgcccgtttcctgtggacaagcccaacattgtagtggatgtcatcttcaccaacagtcttcctgaggcaagaagaaattcaagacagccgctggaaataagaaccagcaaaaggacagaacttgctcaaggtcagtgggttgagtttggctgtgcacccttggggccagaagcctatgtcaccgtggtgctgaagctgcttgggcgagactcagtcattacctccacaggacccattgacctggcccagaaatttggatacaaactggtgatggtgccagaactcacatgtgagtccggggtagaggtgacagtgctgcctccaccatgcaccttcgtccaaggagtggtcactgtcttcaaggaggcccccagataccctgggaagaggaccattcacttggctgaaaacagcctgcccctgggagagaggaggacaatttttaactgtactttgtttgacatggggaagaataagtactgctttgactttggcatttcaagcagaagccatttttctgcaaaggaggagtgcatgctaattcagagaaatacagctttccagccatccagcccatctcctcttcagccccagggtccagtgaagtccaacaacatcgtgactgtcactggtatatccttgtgcttgttcatcatcattgccactgtgctcatcacgctgtggaggaggttcggccggccagccaagtgcagcacacctgctcgacacaactccatccactcccccagcttccggaagaactcggacgaggagaatatctgcgagctgagcgagcagcgcgggagcttctcggatgggggagacgggcccacggggagtccaggggacacaggcatccctctgacctacaggcggagcgggccggtacctcccgaggatgatgcctctggcagcgagagcttccagtccaacgcccagaagataatcccacctctgttcagctaccgccttgcccagcagcagttaaaggagatgaaaaagaaaggtctgacggaaactaccaaagtgtatcacgtgtctcagagtcccctgacagacactgccattgatgcggcccccagcgctcccttagatttggaaagcccggaagaagctgcagcaaacaagttccggatcaaatccccatttccggagcagcccgcggtcagtgccggggaaaggcctccctccaggctggatctaaatgtgactcaggccagttgtgccataagccccagccagactctgatccgcaagtcacaggcaaggcacgtgggcagcagagggggcccgtccgaaaggagccatgccaggaacgcccatttcaggaggacagcgagtttccatgaagccaggcaggcccggccgttccgagagaggagcatgtccactctgactccacggcaggcccctgcctacagctctaggacgcggacctgcgagcaggcagaggacagatttaggcctcagagtcgaggtgcccacctgtttcctgaaaaactggagcatttccaagaggcaagtggaacccgtggtccattaaaccctctccctaaatcctacactttggggcagcccttgaggaaaccagaccttggggatcaccaggcaggattagtggccggaattgagagaacagagccccacagagctcgtcggggaccgtcccccagtcacaagagtgtctcaaggaagcagccttctcccatatcccccaaagataactaccagagggtcagttctctgagcccttctcagtgtagaaaagacaagtgtcaaagcttccccactcaccctgagtttgccttctatgacaatacgtcgtttggcctcactgaggctgagcagaggatgctggacctcccaggatattttgggtcaaatgaagaggatgaaaccacaagtacacttagcgtggagaagctggtgatctagactgagaatcagcctgagctttacacagctggggtctgctactcgcgttttgtagacttttgtgtaactatttgtaccgtaggacagaatgtgaggaggaagtaacacacagaggaggatgtgtgtgtatgcatgtgtttgaattcacaaggaagaaattatttatcttgagctttttcctttgttattcaatttctattgatttattagtaataacaatgataataaaatgtaaatgagc

SEQ ID NO: 1191 - DNA, 2358 bp, Homo sapiens
aaaagctggaaccctgcccctttggagggggaggcggcggcggcggcggcggcggcggcggcggctgcgcgggcctcgggtgcgcgggcacgcgggactcccagctgtcaatcaggcgcgggctgagctctacgaggcggagcggcggcggtggcgacggcgatgggaccccagcgagagatctgcagctaggctggctgcacttgctccacgggtcaggggatcggagggggattgaagaatgcgccattaaaaggaaagatcaaggagtaaaccagaagaagaagaaaaagaggacttcaaagctgggaaggatgagttcttgcagcaacgtctgtgggtccaggcaggcacaggctgcagctgagggtggttaccagcgctatggagtccggtcctacctgcaccagttttatgaggactgtacagcctcaatttgggagtatgaggatgatttccagatccaaagatcacctaacaggtggagctcagtattctggaaggttggactcatctcaggtacagtttttgtgatcctcggattgactgttctggcagtgggctttcttgtgccccccaaaatcgaagcatttggcgaagccgattttgtggtggtcgacacacatgctgtccagtttaacagtgctctggacatgtacaagctggcaggagctgttctcttctgcattggaggcacgtccatggcagggtgcctgctgatgtcggtgtttgtaaagagctactccaaagaagaaaaattcctccagcagaagtttaaagaacgaatcgcagacaccaaagcccacacccagccggttacaaaagctccagggccaggggaaacaaagattccagtcactttgtccagggttcaaaatgtccagcctctactggcaacctgaaacctttcccaccccagttcttcttgtctgatttatgcccgtggttaaaaagagcaggccagttttcgagataaagaagatttggcgttgactgccctagggctgtgttcagctgtgggcaatataatgggtggactcacacttgctcagttcaggcagctctgctggagggcggtgccatgcctaagcctgtgcacatgcatccagctgcttaagatgggtgcttccttgtacccggccaccagaaaacccctggaactcctctttcatagatcgtgactttgtgttattttccgtgttgtttgaaagtgccgaacagtttagaccagctcaccaatggctaatgtggtccattttattttctaatattggtttatctaatgttttctgcgtggtgccgtcttccattcctgtctcactatgtgtaagattttgtcatatgtgttcatagaaacatggaattctctgattttgagccgaacatgagtttttagactgtatcttgacatgaggttcctgacattggatacaaagttatcagcattcacaaatctttttgttttctccattttttttccctttgagatgaagtgctgttcttttgcctaggttggagtacagcggtgaaatcatagcgcactgcagccttgaactcctgggctcaagcgatcctcccacctcagcctcccaagtagctgggactacaggcacctgccaccacccccagttaatattttttttaattttttttagaggcaggatcttgctgtccaattttttttaaaaagctaaaattgccaactttagaatcttgaccaaaaaaaattaattttaggagcatctatttatgcagtgttcaaaagtactgaattagaaaccaggaagttttagttccttctactacctgtgtgatcttggggaaattatttaacctctcagtcctaattttccccttctgtataatgggagttctggatcacaatatgtctgggctctcattacccaaacatctgagattccatttttgccatgtgtcatcgagtcgctccccaacagatgtttgtgatgtttttgtggctgtcaccatggtgggattctttcagaatgagactcctggaaattcactgagtcagcagccttcacaccatctacccttaaatatccaaccccagcaatttatacaacgctgtcatatttttaaaaaaacaaaagtaagccatcctcaaataaggaaccccttggtagatattaaccttaaaaagggttttcattctcaaacaagatgctttgttctccaacaagatgttcgtctcatcacttgcacttttgttttaatgtatggattcagattagactgagaaaaatggatggtattttcttaaaattgtgccaccttaaagcccccccccttttttttttcttccttcactggataaataaaatatgtgaacaagtg

SEQ ID NO: 1192 - DNA, 2226 bp, Homo sapiens
ctctgtgcctgctgccatccacgtaagatgtgacttgctcctccttgccttccgtcatgattgtgaggtgctcccagccatgtggaactgacgaaacactggaactctccagaataaattggtacctgggtctcttctgaagtgagctgctcttaggagcttcaaatgagggtctttgaagccacatgaaaattgatgagtggttgtaacatccaagctaccaaatcagacacacttgtaattgttcccaatagtttcttagcaggcattttggaggaaaagatttggatcagaaattcagaaattacctgggctcacaaatatatgcccctccagcaccatcctgcattctgcttccaagatacatgagctttctgaagagctggtgagaatgctgaaacttcctggccttggtttcccatctggtaaaatgaggaagaccaaagcttaactctcacaaggaatatgcagacgaggaaaccgaagctcttggggtaacacgacttgtgaaactgcatgctactcctcagtggcagggtggggactctggacagaggaactggcaaggtcttctagacctttgacgtgcataaactggcaggtttacagaataacgaggaaaacaaagtgaaacaaaagactgtacccgtgtgctaagaatttattacccgcacatcaaaaaacttatccatcacgatcaagctggcttcatccctgggatgcaaagctggctcagcatatgcaaatcaataaacataatccgtcacataaacagaaccaaagacaaaaaccacatggttatctcagtagatgcagaaaaggcctttgataaaattcaacatcccttcatgttaaaaactcaataaactagatattgatggaacatatctcaaaataaaagagctgtttatgacaaacccacagccaatatcatattgaatgggcaaaagctggaagcattccctttgaatactagtacaaggtaaggatgccctcttctcaccactctattcaacatagtattgaagttttggccagggcaatcgggcaagagaaagacaaaaagcatattctaataggaagagagagagtcaaattgtctctatttgcagacaacatgattgtatatttagaaaaccccatcgtctcaccccaaaaactccttaggctggtgagcaacttcagcaaagtctcaggatacaaaatcaatgtgctaaaatcacaagcattcctttacaccaacaatagacaagcagggagccaaatcatgaatgaagtcccattcacaattgctacaaagagaataaaatacctaggaatacagctaacaagggatgtgaaggaccttttcaaggagaactacaaactactgctcaaggaaataagagaggacacaaacaaatggaaaaacattccatcctcatggataggaagaatcaatatcatgaaaatggccatactgtccaacgtaatttatagattcaatgctatcctcatcaagctaccattgacgttcttcacagaattagaaaaaaaaactactttaaatttcatatggaatcaaagaagaccctgtatagctaagacaagcctaagcaaaaagaacaaagctggaggcatcaagctacctgacttcaaactatactacaggctacagtaaccaaaacagcatggtactggtaccaaaacaaacatatagaccaatggaacagaacagagacctcagaaataacaccacacatctaaaaccatctgatctttgacaaacctgacaaaaacaagcgatcgggaaatgatctcctattcattaaatgtttctgggaaaactgtctagccacgtgcagaaaactgaaactggatcacccttccttataccttatacaaaaattaacttaggatggattaaagacttaaatgtaaagccccaaaccataaaaaccctagaagaaaacctaggcaataccattcaggacataggcatgggcaaagacttcataatgaaaacgccaaaagcaattgcagcaaaagccataattgacaaatgggatgtaattaaactaaagagcttctgcacagcaaaagaagctatcatcagagtgaacaggcaacctacagaatgagagaaaaattttgcgatctatccatccaacaaaggtctaatatccagcatctataaggaacttaaacaaaaaaaaaaaaaaaaaaaaaaaaaaaaaaaaaaaaaag

SEQ ID NO: 1193 - DNA, 2719 bp, Homo sapiens
gtcgtcgcctcagcgccggctcccggccgggccgcggccgccgaccgttgagccgccggctgagccgcctgctgaagtccctccctcaggaacccctccgccaccctccacctccgaaccgctctcgcggcggcgacccatgtgggggttcaggctcctgcggtcgccgccgttgctgctcctgctgccgcagctcggaatcggaaacgcctcgtcctgctctcaggccagaaccatgaacccgggcggcagcggcggcgcgcgatgctccctctcggccgaggtgcgccgccgtcagtgcctgcagctttccaccgtgcctggagccgatccgcagcgcagcaacgaattgctcctgttggcggcggccggggagggactggagcggcaggacctccccggggacccagcgaaggaggagccgcagccgccgccccagcatcacgtcctctatttccctggggatgtgcagaattaccatgaaattatgactcgtcatcctgagaattatcaatgggaaaactggagtctagaaaatgttgctaccattttagcccaccggttccccaatagttatatttgggtgataaaatgttcccgaatgcatttgcacaaattcagctgctatgacaattttgtgaaaagtaacatgtttggtgccccagaacacaatactgactttggagcttttaagcacctttatatgttattagttaatgcttttaatttaagtcagaatagtttatcaaagaaaagtttgaatgtttggaataaggactccatagcatctaactgtagatccagtccttctcatactacgaatggttgccagggagaaaaagtgaggacctgtgaaaaatctgatgagtctgccatgagtttttatccaccatcactaaatgacgcatcttttactttgattggattcagtaaaggttgtgttgttttgaatcagttgctttttgaattgaaagaagccaagaaagacaagaacatagatgcttttatcaaaagcataagaacaatgtattggctggatggtggtcattctggaggaagcaatacttgggttacttatccagaagtcttgaaagaatttgcacaaacaggaattatcgttcacactcatgtaacaccttaccaagtacgtgatccaatgagatcttggattggaaaggagcacaagaaatttgttcagatacttggggatcttggtatgcaggtgactagccaaattcattttacaaaggaagctccttccatagagaatcacttcagggttcatgaagtattttgagattacaggtatattaatgaacttgttcagtggaagaacataagcacttttgagtgttataaattcagataatgggatgtaattcatagctgcattgtcagttttggggtatggggggaagcacacattcctaaaatgtgagtgtaatgtgcaatagtattttttgcttgtgaatgtgagcagttattaatttggattgagttagaattagttaatttgaaatctaacaaggtggtttgtaataatgctgaggagatataagacccttaaaatgaaagttacaacattgttcttataaaaggtaactaaaattgttactgttggaaataactgattttctgagtaatgttttaaactaatttggtgacattttaacagtaattagctattttgagtggaaatattttcatttctcttcaaacaaaagcaaaggtacgatgctgttttctatcattttggaataactgcaccctgccttttgtgtttttgtaaactccttgactcattctttcatgtgtcaccaagtacttttctcatgagagtcaacatatatttgtttccaaatgtccacaagtgtacaatagtgtaaaggtggtttttaaaaacatagccaggtgtggtggcacgtgcctttagttccagctactcaggaggctaaggcaggaggattgcttgagcccaggctgtgtggttcaccataattgtgtttgtgactagctactgcactccaacctgggcaacatagtgggacttcatctctaaaacaaaacaaaacaaaattacacttaagcactattgtttaatttttaattgtcagtttatcattattttgggtaagacattctggggtttcttgaatcttgtccaaaaaccagttgttttggaaaattgctttaaattgagcatatttatgtatattggataaaaatgtactacagagcaaatttcaaatttttcattatatcagtctttttgaaaggatcaacttggataaaataaatatataatgctctatttgttagagctctattaaaaaggaaacagattccatagatctaagtcaatgtttctccagaagcatgattttgtctgccaaaagaaaatagctctctttggccaaaatgcaaaattacattgctataagaaaagttacaagggaaagtttgaagacacaaatgatttaattttggctcaaaaactgaatttgcttaacactgctacataatttgggtgaagtttccttctgcccgtttttcttgacctagataaatacactttgagaaatccagatctaataaatgtcaaccaacattgacattgtaattgggtgattacaataaaaggtgagcagtttgttgtttattaataattagcttttgcaggtaatgaaatagcagggaagtaacatgctgctttaggact

SEQ ID NO: 1194 - DNA, 1731 bp, Homo sapiens
gctcgtctgcctggctgcggggtgacacggggcttcgccttgggaaggggtcgagggaagcagttagacggctgccgggcggcggctgccgcgcggcacacaatatttatttaattgcccaactaccactgatgaagatatattggagtgactgctgaaattgcctttttgtttttaaccagaggacagtccatttgtttcacttctttttgctttctttactgctatgagctttactgaacggctgaaaaacttggaaaataaaatggacatgctgtagtcttgaacataatttttttaaggaaaacttaaagtgccagagtgaaagccagaatggcatccagagagaggctctttgaactttggatgctttattgtacaaagaaagatccagattacctgaagctgtggttggacacttttgtttctagctatgaacaatttttagacgttgactttgaaaagctgcctaccagggtagatgatatgcctccaggaatatctctgcttcctgataatattctgcaggttctgaggatccagcttctacagtgtgttcagaaaatggcagatgggttagaggaacaacagcaagccttgtcaattttgcttgtcaagttcttcattattctttgcagaaatctatcaaatgtggaagaaattgggacttgctcgtacattaattatgtcatcaccatgacaacactctatattcagcaattaaaaagcaaaaaaaaagagaaggaaatggcagatcagacatgtattgaagaatttgtgatccacgcattggcattttgtgaaagcttatatgatccatatcggaattggagacatagaatttcagggtagaaactggagctatcaatattttcatgaccttgaaaatcttaatctctccagaagggatactgcattggttcttctccatcagctggcttagacatcaaacatcttaaatgatacactgttttaatatctaaaaatctgtcattctacttaattaacttagtcataaggacaaagccttagtatatttttgccacatacatgttatgtataaattttactgttgaataatacaagtattcattgctgactgaattcttaaaactttgggaatagaaaaaacacatttattaatggatgctaaagtgattcctgagaaaaataatgtgtatggttaatatggaaaacctttggtaatgtgatttgggtataagaatactaaaaccagagtacagggtgtgaatcgtgtaccaggagggattttatttttaaatatctttattgaggtataattgaaatacaataaactgtacatatttaaagtacccaatctgataagttttgtcatatgcatacagccatgaaatcatcaccataagcaaggtaatgaacatattcatcactctcaaagtttcatagtacctctttgtgatcccttcttacttaatcctccttgccaccccaccatcaccagaccactgatctgctttctttatgatcagtttgctacaaatgaaatcacataatatgaaccttttttggtctagcttttgtcacttagcatagtaattttgtgatttgtctatattgttgcatttatgaataaatcatttatctgctgctgggtagaactgcattttatgaatatatcaatttgtttattcttttgatgatggacattaatagttctaggctattatgaataaagtttccatgaacatc

SEQ ID NO: 1195 - DNA, 2240 bp, Homo sapiens
gagtcagctgccgccgagggaccagcgcgggtctagctgctgccgccatccccaccatccctgaccgcgcctgcccgggctccgcgccaggaggagcggccaggccgagccccggcaccgcgcgctcggggaccccgacggcgcccagcccggcgaggggcctcggggaggacgaggaggaaaggcggcctcgccggggacccggccatggcgctggacttcttggctggatgcgcggggggtacggcttcaggtccagagcgtggagaagcctcagtaccgcgggacgttgcactgcttcaagtccatcatcaagcaagagagcgtgctgggcctgtacaagggcctgggctcgccgctcatggggctcaccttcatcaacgcgctggtgttcggggtgcagggcaacaccctccgggccctgggccacgactcgcccctcaaccagttcctggcaggtgcggcggcgggcgccatccagtgcgtcatctgctgccccatggagctggccaagacgcggctgcagctgcaggacgcgggcccagcgcgcacctacaagggctcgctggactgcctcgcgcagatctacgggcacgagggtctgcgtggcgtcaaccggggcatggtgtccacgttgctgcgtgagacgcccagcttcggcgtctacttcctcacctatgacgctctcacgcgggcgctgggctgcgagccgggcgaccgcctgctggtgcccaagctgctgttggcgggcggtacgtcaggcatcgtgtcctggctctctacctatcctgtggacgtggtcaagtcgcggctgcaggcggacggactgcggggcgccccgcgctaccgcggcatcctggactgcgtgcaccagagctaccgcgccgagggctggcgcgtcttcacacgggggctggcgtccacgctgctgcgcgccttccccgtcaacgctgccaccttcgccaccgtcacggtggtgctcacctacgcgcgcggcgaggaggccgggcccgagggcgaggctgtgcccgccgcccctgcggggcctgccctggcgcagccctccagcctgtgacgctcaccccgccctccttccccagtgctccttctcagaaacctgggacataaattggcccctgagtcgattgccctgcttcctgctgggatgctgcgagctgtggagtctatcagacgtgggctgaattttgctgatcagctgggtagttttggccgagaactgcacttgcctcagtgttctcatctatgaaataaggaccctcatgcccacactgtagagtcacgaagctcagagattattcccagcagcagccagcacctggcctggctgaggccattgcaccgttatcctggaaactgaggcagacactccagcccctttctgggatcctggccacgtcattgtgctcctgccctgcaggctggctcccgggggtctctgatggccaaccaaggggccacccagggacctctaactccacacatccaccacccgggggggtggtgggccacccctctggtctgtgttagggacagaggaaaacttggtgtgcctcctggtgtcacagaactggatcctctgcataccccagctcctccacatgccactgctaggggtaccccagctgctgccactcctgctggagggtgaactggggaccctgcaccctccgggaagccatggagtctgctggaggcaccatatcagcctgcgggactagggtggggagcaaacaggccagcggtggaggtctggacagttcaagtgtgatgcagctgtggcaaggagaaatccttccgcctctgggcctcaggctgcctgtccataaaatggggacatggccagctgacggacaactgagtctccggcccacctaccaccgccagccaggatcccccaaagtgtgcagagggctcagcagagaacagtatgggaccccctcaccaggcctggaacacctccagccacaaagaagccaaaggtcagtccctctgctccccagcaaacggtgcctcccaggcattctcagtgccagggcttcatccctgtgaaggcacagggcctgctagtgggcacaggggtggctagttggggcctggggcagaggagggctgcaccaggcgtcctggggaatgtgctcagtgaagacgacactgggctttgcacagcctggtgtcgctgtacagaaactgtcaagggaataaagtgttctttgtttttt

SEQ ID NO: 1196 - DNA, 2243 bp, Homo sapiens
aaggaccacctcccaaggctcggcaagccggcggagctgcagcgcagggtgagtgctgacagccagcccttccagcacggggacaaggtcaagtgtctgctggacactgatgtcctgcgggagatgcaggaaggccacggcggctggaaccccaggatggcggagtttatcggacagacgggcaccgtgcatcgtatcacggaccgcggggacgtgcgcgtgcagttcaaccacgagacgcgctggaccttccaccccggggcgctcaccaagcaccactccttctgggtgggcgacgtggtccgggtcatcggcgaccttgacacagtgaagcggctgcaggctgggcatggcgagtggacggacgacatggcccctgccctgggccgcgtcgggaaggtggtgaaagtgtttggagacgggaacctgcgtgtagcagtcgctggtcagcggtggaccttcagcccctcctgcctggtggcctaccggcccgaggaggatgccaacctggacgtggccgagcgcgcccgggagaacaaaagctcactgagcgtggccctggacaagcttcgggcccagaagagtgacccagagcacccgggaaggctggtggtggaggtggcgctgggtaacgcagcccgggctctggacctgctgcggaggcgcccagagcaggtggacaccaagaaccaaggcaggaccgctctgcaagtggctgcctacctgggccaggtggagttgatacggctgctgctacaagccagggcgggcgtggacctgccggacgacgagggcaacacggcactgcactacgcggccctggggaaccagcccgaggccaccagggtgctcctgagtgctgggtgccgggcggacgccatcaacagcacccagagcacagcactgcacgtggccgtgcagaggggcttcctggaggtggtgcgggccctgtgtgagcgcggctgtgacgtcaacctgcccgacgcccactcggacacgcccctgcactccgccatctcggcgggcactggagccagcggcattgtcgaggtcctcacggaggtgccaaacatcgatgttaccgccaccaacagccagggtttcaccctgctgcaccatgcctccctcaagggtcacgcgctagctgtgagaaagattctggctcgggcgcggcagctggtggacgccaaggaggaggacggcttcacggcgctgcatctggctgccctcaacaaccaccgcgaggtggcccagatcctcatccgggagggccgctgtgacgtgaacgtgcgcaaccggaagctgcagtccccgctgcatctcgccgtgcaacaggcccacgtggggctggtgccgctactggtggacgctgggtgcagtgtcaacgccgaggacgaggagggggacacagccctgcacgtggcgctgcagcgtcatcagctgctgcccctggtggctgatggggccgggggggacccagggcccttgcagctgctgtccaggctacaggcctcgggcctccccggcagcgcggagctgacggtgggcgcggcggtcgcctgcttcctggcgctggagggcgccgacgtgagctacaccaaccaccgcggtcggagcccgctggacctggccgccgagggtcgcgtgctcaaggcccttcagggctgcgcccagcgcttccgggagcggcaggcgggcgggggcgcggccccgggccccaggcaaacgctcgggacccccaacaccgtgacgaacctgcacgtgggcgccgcgccggggcccgaggccgctgagtgcctggtgtgctccgagctggcgctgctggtgctgttctcgccgtgccagcaccgcaccgtgtgtgaggagtgcgcgcgcaggatgaagaagtgcatcaggtgccaggtggtcgtcagcaagaaactgcgcccagacggctctgaggtggcgagcgccgcccccgcccccggcccgccgcgccagctggtggaggagctgcagagccgctaccggcagatggaggaacgcatcacctgccccatctgcatcgacagccacatccgcctcgtgttccagtgcggccacggcgcatgcgccccctgcggctccgcgctcagcgcctgccccatctgccgccagcccatccgcgaccgcatccagatcttcgtgtgagccgcgccgtccgccgcgcccgagctgccttcgcgtgcccccgccctgtgttttataaaaagaaagattctcgg

SEQ ID NO: 1197 - DNA, 1960 bp, Homo sapiens
agggaagggcggcagccggcggggcccgggcgcggaagttgccggcggccgcgcggcctcccgggcgggcctacagccatgtcccgggacccggggtcgggcggctgggaggaggccccgcgcgcagctgccgcgctctgcaccctgtaccacgaggccggacagcggctgcgccgcctgcaggaccagctcgctgcccgcgacgccctcatcgctcgcctccgcgcccgcctggccgcgctggagggggacgccgcgccgtccctagtggacgcgctgctggagcaggttgcgcgcttccgggagcagctgcgaaggcaggagggcggcgccgccgaggcccagatgcgccaggaaattgagaggctgactgagcgactagaagaaaaagagagggagatgcagcagctgctgagccagccccaacacgagcgagagaaggaagtcgtcctgctacggaggagcatggcagaaggggagcgcgcccgggccgccagtgacgtcctgtgccgctccttggccaacgagacccatcagctgcggaggacgctgaccgccaccgcccacatgtgtcagcatctggccaagtgtctggatgaacgacagcatgcacaaaggaatgtgggggagagaagtcctgaccagtcggaacacacagatgggcacacctctgtccagagtgttattgagaagttgcaggaagaaaatcgactgttaaaacagaaggtgactcacgttgaagacctcaatgccaagtggcagcgctacaacgccagcagggacgaatacgtgagggggctccatgcgcagctcagggggctgcagatcccccacgagcccgagctgatgaggaaggagatctcccggctcaacagacagttggaagagaaaataaatgactgtgccgaagtgaagcaggagctggcggcctccaggacggcccgggatgctgcgttggagcgggtgcagatgctggaacagcagattctcgcttacaaggatgacttcatgtcagaaagggccgatcgggaacgggctcaaagtaggattcaagaactggaggaaaaggtcgcctctttgctgcaccaggtgtcctggagacaggattctcgagagccagacgccggccggattcacgctgggagcaaaactgccaagtatttggccgccgacgcattagagcttatggtgcctggtggctggaggcctgggactgggtcccagcagccagaaccccctgcagagggcgggcatcctggcgcggtccagagaggccagggggaccttcagtgccctcactgcctgcagtgcttcagtgacgagcaaggggaagagctcctcaggcatgtggccgagtgctgccagtgaccgagactcacccgtgcccttgcggcctcctggcccggtgcagctgccctcagggacagggtgggtgctctcagatgccatgggttgagctctactgagagccaaggcccctagaatagttgcggggcactctgatcgttcactttggtccctttggctatggaacaggctgggtcacagggaactgccagtgaggctggaggctggaggtggagatggggtcaggaacatctggcagagggaggtcccagtctgtgtctccatcaggcttaagccagagctatctggtgctggtgtgccagcccctcccccagcctgcctagaaaggggtggctgcctgagggagtcacttgtatggtccccagggtgggagccccatcctgttctatggaataaagcgtcgcctctctgcctcgaaccagtcaaatggagtattgcggctgcacgtcacactagggtggccacccccgccattgcgagccacatgtctgcactgagaaactgcatttcagtagcatttgtcatccagccggaagttaaagcacacttactttattcacctatttttataataaacgttcttgctgctgtg

SEQ ID NO: 1198 - DNA, 1944 bp, Homo sapiens
ccccccgcaaggtccccggccgtgcgcgaggcagcatgatgaggcgcaccctggaaaaccggaacgctcaaacgaaacaactgcaaacagctgtctcaaatgtggagaagcattttggagaactgtgccaaatcttcgctgcctatgtgcggaaaactgccaggctgagagacaaagcagacctcctggtgaatgaaattaacgcgtatgctgctacagagaccccgcatttaaagctgggcctgatgaactttgcagatgagtttgccaaacttcaggactatcgacaagcagaggttgaaagacttgaagccaaagtagttgaacccttgaaaacttatgggaccattgtgaaaatgaaacgggatgacctcaaagcaacactcacagcaaggaatcgagaagctaagcaattaactcagttagaaagaacacgtcagcgaaacccatctgatcgacatgttatttcacaggcagaaacgggattacagagagctgcaatggatgctagccgaacaagtcgtcatctggaggaaactattaacaactttgaaaggcagaaaatgaaggatataaagactatattttctgaatttatcacaatcgaaatgttatttcacggcaaagctttagaggtctacactgctgcctaccagaatatacaaaacattgatgaagatgaagatttagagagatggagtttcgccatgttgcccaggctggtcttgaactcctggggctcaagcgatccgcctgcgttggcctcccaaagtgtcaggttttccgaaattctctgtatgcaccagattattcatctcgtttagatattgtaagagcaaattcaaagtcacctcttcagagatcactgtcagctaagtgtgtatctggaacaggacaggtatccacttgtcgactaagaaaggatcaacaagcagaagatgatgaggatgacgagttagatgttacagaagaagaaaattttcttaagtaaactacacatttccattttcatcataaatgacttgaaatccacaatgactaaattgtagaactttatactcactttgctatgttaagcctcaaagtgaagtccaactggaaacagaaaaataattaaaggaaacttatgctgaccaaaaatgaaggctttaaaaaatattgcataccagtcatttcaacatcctacctagtgttacatgatttttgtgtaagtgcctttttttttaaagatggtgtatttcaaagtatttcatattaatgtactatatctacttgaagttccaatagtacattatgacagaaaccaaaagatctaacaattctgcttagctttttggttaagactccatgctttcattaccagaaaagggtcttacgtagtcattatgattcatggaattctattccatgaagccttaagaaaaaaaactttttttaactttccctgaaactttatcatttgataagtaaatttacttttcaagaagagtataaccaaagagtaaagataatgtgacactaagttatcaatattttatgaatacacataaggcataaatttcagctgtaaaaaagctacattcaatctgactctggttttaaaacaaaactgctgtcataattatacatgatactgcaacttttggaaggctaatttggtggaatgttgcctcatcatagaacaccatagatcattaaaaattctataaaaattttaccaagctaccatatagttaataaaagggtatacagtcacttttatttctgaaaatataaaacattgagcctttcagtgtatctgatgcttctcttttggtaaggaatacttttatttcatggatcccaggcaggcatataaaagttacggaatttataaaatcatttgggataattagaaaatgcaattattcataacagaaaaataaagactttctagaaagcttc

SEQ ID NO: 1199 - DNA, 1884 bp, Homo sapiens
aatagagacggggtttcaccgtgttagccaggatggtctcgatctcctgacctcgtgatccgcccgccttggcctcccagagtgctgggatgacaggcgtgagcctctgagagcaaattttacccagttcctctctatcctcccgatgactctgaaatcaaactcagcaagtcatccgagcccccacggcgcagcggccctaggctggcatgggcgatgcggagctactccgccctcaggaagcaggcgaggtgcccagcgggagaatcacccacatcaccgtctaatctctgctgtgaagtggaagcgcgagaaggagggagcgtctcatgacggagggtgtgaagacgctaggctggacgaagcagaaaggcgggtgtcactggggacgttctgagggtgctggggagtcagggaagagcaccatcgtcaagcagatgaagatcatccacgaggatggctactccgaggaggaatgccggcagtaccgggcggttgtctacagcaacaccatccagtccatcatggccattgtcaaagccatgggcaacctgcagatcgactttgccgacccctccagagcggacgacgccaggcagctatttgcactgtcctgcaccgccgaggagcaaggcgtgctccctgatgacctgtccggcgtcatccggaggctctgggctgaccatggtgtgcaggcctgctttggccgctcaagggaataccagctcaacgactcagctgcctactacctgaacgacctggagcgtattgcacagagtgactacatccccacacagcaagatgtgctacggacccgcgtaaagaccacggggatcgtggagacacacttcaccttcaaggacctacacttcaagatgtttgatgtgggtggtcagcggtctgagcggaagaagtggatccactgctttgagggcgtcacagccatcatcttctgcgtagccttgagcgcctatgacttggtgctagctgaggacgaggagatgaaccgcatgcatgagagcatgaagctattcgatagcatctgcaacaacaagtggttcacagacacgtccatcatcctcttcctcaacaagaaggacctgtttgaggagaagatcacacacagtcccctgaccatctgcttccctgagtacacaggggccaacaaatatgatgaggcagccagctacatccagagtaagtttgaggacctgaataagcgcaaagacaccaaggagatctacacgcacttcacgtgcgccaccgacaccaagaacgtgcagttcgtgtttgacgccgtcaccgatgtcatcatcaagaacaacctgaaggactgcggcctcttctgaggggcagcggggcctggcgggatgggccaccgccgactttgtaccccccaacccctgaggaagatgggggcaagaagatcacgctccccgcctgttcccccgccgcttttctcctctttcctctctttgttctcagctccccctgtcccctcagctccagacgtaggggaggggttgccacaggcctccctgtttgaagcctgcccttgtctgagatgctggtaatggccatggtacccccttctgggcatctgttctggtttttaaccattgtcttgttctgtgatgaggggaggggggcacatgctgagtctcccaaggctgcgtctggaggggcccctgcttctccagcctggacccccagctttgcccaacaccagcccctgccccagcccaagtccaaatgtttacagggagcctcctgcccagtcccccaaccccagccgctcggaggccccaaaggaaaaagcacaagaagcgtgagacgccaccattcctggaaaccacagtccacctgctcattctcgtagctttt

SEQ ID NO: 1200 - DNA, 1987 bp, Homo sapiens
agccgccgccgtctccgccgtcgctggggcagctgccgcggtggtcgcctctggcagtgccgctagctttcaggcagtcgcctctcctcccgacatcccgccttgaggaggctgaggcggaatcgcggctggcggcggggggacggaccggccctgcagtggccgcagtgacagcccggacccggccctccgcccgctctcgcctcggcgcccgcagccacgatgaaccggggcggcggcagcccgtcggccgccgccaactacctgctctgtaccaactgccggaaagtgctgcggaaggataaaagaatcagagtgtctcaacccttgacaagaggaccaagtgcctttattccagagaaggaagttgtccaagcaaacacagtggatgaacgtactaactttcttgtggaagaatactctacatccggtcgtctggacaacatcacacaggtcatgagtttacacactcagtacctggagtctttcttgcggagccagttttacatgttgcgcatggatggtccccttcctctaccatacaggcactatattgcaataatggctgcagctagacatcagtgttcttacttaataaacatgcatgtggatgaatttttaaagactggaggtattgctgagtggttgaatggtttggaatatgtgccacaaagactgaaaaatcttaatgaaattaataagctgctagcacatcgaccttggctgatcacaaaagagcacattcagaaacttgtcaaaactggagaaaataattggtctctgcctgaactggtacatgctgtggtcctcctggcacattatcatgctttggcaagctttgtttttggtagtggtatcaatccagagagagatccagaaatctccaatggattcaggctaatatcagtcaacaatttctgcgtttgtgatcttgctaatgacaacaacatagagaatgcatctctttcaggcagcaactttgggattgtggattctctaagtgagctagaggccttaatggaaaggatgaaaagacttcaagaagaaagggaagatgaagaggcgtctcaagaagaaatgagcactcgttttgaaaaggagaagaaagaaagtctttttgtggtctctggagatacttttcattcatttcctcattcagattttgaggatgacatgattataacatctgatgtctctcgatatattgaagaccctggttttgggtatgaagactttgccagacgaggagaagagcatttgccaacattccgagctcaggactatacctgggaaaatcatgggttctccctggtgaacagactttattctgacattggacatcttcttgatgaaaagtttcggatggtctacaatctcacatataacactatggccacccatgaggatgttgacacaaccatgctgcgcagagctttatttaactatgttcactgtatgtttggaatcaggtatgatgactatgattatggagaagttaatcaattacttgaaagaagcctgaaggtttacattaagacagtgacctgctatcctgagagaactacaaaacgcatgtatgatagttactggcggcagttcaaacactcagaaaaagttcatgtcaatctacttttaatggaagcacgaatgcaagctgaacttctttatgctcttcgtgccataactcggcatttgacctgaagtatcacccaaggaaaatgtcatacatgtgtaaagacctttcacataagataaacattgaagctatttgtgatatagcatcaaaaattattcagttctctagtgtcaaagtttagccgtttgtttttttttttttgttttttgcggctgtaatgtgcaatgatgtgttttattttccttgatgcttaacattactaacaattgcaaaaataatactgaggagcactactttgcattgtttgtagttggagttttggatactgatcataaatcatgaatctggcgt

SEQ ID NO: 1201 - DNA, 2722 bp, Homo sapiens
gaccgcatctaggccccgccgcgtccgccacgcccagcgctcggcggcgcccgccccactggcctggcccgccccccgcaccgagcactctttcgcccggcctccggttctcgccggctctcggacccgcctccgaagacgtggagcgctgcggcggctgatttgtcaaagatgaaagtgaccttatcagctttggatacttctgagagttctttcacacctttggtggtcatagaacttgctcaggatgtcaaagaagaaaccaaagaatggctgaaaaacagaattatagctaaaaaaaaagatggaggtgcccagttgttgtttagaccattgttaaataaatatgaacaagaaacactagaaaatcagaacttatatcttgttggtgcctccaagattagaatgttactaggggcagaagcagtgggattggtaaaagagtgcaatgataacaccatgagagccttcacatacagaaccagacagaacttcaaaggttttgatgataacaatgatgatttcctgacaatggcagaatgtcaattcattatcaaacatgaacttgaaaatcttagagctaaagatgaaaaaatgatccctggttaccctcaggcaaagttgtatccaggaaaatcattgttgagaagattgctcacgtctggcatcgtgattcaggtgtttccactgcatgacagtgaagccctgaagaagcttgaggacacctggtacactcggtttgctttgaagtatcagcccatagacagtattcgtggctactttggggaaacaattgctctgtactttggatttttggagtatttcacttttgcattaatccccatggctgtcattgggttaccttactacttgtttgtgtgggaagactatgacaagtacgtgatctttgcctcgttcaacctcatctggtccacggtgattctggaactgtggaagcgtggctgtgccaacatgacctacaggtgggggacactgctcatgaagagaaagtttgaggagccccggccaggatttcatggtgtcttgggtatcaattccatcactgggaaggaggagcctctgtaccccagctacaagagacagttgcgcatttacctggtctccctgccattcgtgtgcctctgcctctatttctcactgtatgtcatgatgatttacttcgacatggaggtttgggccttgggtctacatgagaacagcgggtctgagtggaccagtgtcctgttgtatgtgcccagcatcatctatgccattgtgattgagatcatgaatcgtctctatcgatatgctgccgagtttttaacttcatgggagaatcacagattggaatctgcctatcagaaccatctaattctgaaagttttagtgttcaacttcctcaattgctttgcctcactcttctatattgcctttgtcttgaaagatatgaagcttttgcgccagagcttggccactctcctaattacctcccagatcctcaaccaaattatggaatcttttcttccttattggctccaaaggaagcatggtgtgcgggtgaagaggaaggtgcaggctttaaaggcagacattgatgctacattatatgaacaagtcatcctggaaaaagaaatgggaacttatttgggcacctttgatgattacttggagttattcctgcagtttggttatgtgagccttttctcctgtgtttacccattagcagctgcctttgctgtgttaaataacttcactgaagtaaattcagatgccttaaaaatgtgcagggtcttcaaacgtccattctcagaaccttcagccaatattggtgtgtggcagttggcttttgaaacgatgagtgttatatctgtggtcactaactgtgcgctgattggaatgtcaccacaagtgaatgcagtctttccagaatcaaaagcagacctcattttgattgtagtagcagtggagcacgcactcctggctttaaagtttatacttgcatttgccatacctgataagccacggcatatccagatgaaactagccagactggaatttgagtctttggaggcactcaagcagcagcaaatgaagctcgtgaccgagaacctgaaggaggaaccaatggaaagcgggaaggagaaggcaacctgagtgcccagcgtgcccagctgccctgttggcagaggcctgtgtctgtgccacacctgccacggtggcagggggggtacccggggcagcatcgtggctcctgaacccagacccaatgcttagccaaacgaagtggctcccatgtggcaagcacccttctcagtttcgcagtggcttggctcgggatccttggcagttcccccagccccaccctgtctgctccttcccagttccttcccgggccccacacgctgctccagctgccaactttgctgcagagccactgccgcccttgagcctctcaccatgagtgagccaccagctctccacgttcccctcatagcagtgtcactcccaaccccaccatggcccagggacccgtggacaggttggggatggggtgtgtgcccactgtgctcatcacaggagcctcagttgagagtgagcggggtacagtaaggcagtgcttcccacactggacctctttcctggttctcttttgcaatacattaacagaccctttatcaacataaacaatagtaactgagctattaaaggcaacctctctgac

SEQ ID NO: 1202 - DNA, 2934 bp, Homo sapiens
aggacgcacagagccccgcggctaccgccttaggggttgtcccggcggtggggaagccattgaggagtttaacgccggaaggtggtgactaatcagatttcacttgaaaatggcacggtgtctgcagcgaggctaactgatgggaagggcccagcgaatgccaataggagagagcaccggacctggaaggcctgggtcaacgcggccccgcgcgggggcgaagcggttccggcgcaggggcctggcgcggggctccgcggaaaaccgaaccggcccacgtgggaccggtcgctccgccctgctgcgcagacgccgcctgactccgcagtccgggactggggctgggcgcgctgcccgggagccccgcacccacgcctggaccgcggagacgcccaggccgaggaacccccagcccagggactagacaccaccagggccgggcggagccagagccagacgcgccggagcgggcgcctctacgccgctagatgttcgccatccagccagggctagctgaggggggccaattcctgggggacccacctcctggattatgtcagcccgagctccaaccagacagcaactccaacttcatggcaagtgccaaggatgctaacgagaattggcatgggatgccaggcagagtggaacctatcctgaggaggagctcctctgagtcaccctctgacaaccaagccttccaggcccctggatcccctgaggaaggggtgcgcagccccccagagggggcagagattcccggggctgagcctgagaagatgggtggtgctggcacagtctgctcccctctggaggacaacggctatgccagcagttccctgagcattgacagccgtagcagcagtcctgagcctgcctgtgggaccccgcgaggccctggccctcccgatccccttctgccctcagtggcccaggctgtgcagcacttacaagtccaggagcgctacaaagagcaggagaaggaaaagcaccacgtgcacttggtgatgtaccgtcgcctggcactgctccagtggatccggggcctgcagcatcagttgattgaccagcaggcccgactgcaggagagcttcgacaccatcctagacaaccggaaggagcttattcgctgtctccagcagagggcagcaccatccaggccccaggaccaggcctaagggtgtgcctccacaagtgtgcaagggtatatgtatatatttgcaggcatgtgtgaggcgcactagtaagtacataatttgctggcatgattgcaggtaggcatgagtgtgtatgtgctaacatgtaggctggtgtgtgtaggcatgtgtgaataagcatgtataaatgagcttaagtgtgctgtgtgcacatgtgtacacacagctaatttatctgcagacctatatgtgagcatgtaagagtgaacatatgtgtgtgtgtgtagtatgtaagaatgaggaactcggtatgtgcatgtgtagacaggtacccagcagtgtgtgtatatgcgcatgagtgaggatgtataggcagaagatgtgtgtgtctatgagtgagtttgagtgtgcaggcttgtattaggtgtatgtgaggaagcccttgtgtgtgcaggggtgcacatgtttggccacaggcatgggaggtgtatgttaggagcatgtgtgtttgtaggcagactcatgagcaggtgtgtgcaaatacatatccagctgcactgtgggtgtccacccacaccttgtgttcctcatggcctaccccagcctttcttctccactgggtcccactgttccctggagacagagggctagcatgctgtcatttatctgaaggttgtggctgacccattctcctgggatttcccaggccacctctcctttccctttccctcacttaacccagacttgctcagctgaggctattgtccctgatgttggctttacttgtaggaggtttagtggctgctctggcctgccatggaattttggctgcaattttggcagtgtgtggagaactggtatcaggaaagggaaccaggagtagtgatgaagatgatggtggggatggggacagaggacataggggactgtccctcttgaactctgcctttgggcacatgggagatggggacaggaaagatgataacagtggaaccctgtgaagaataggagaatgggaattctaaaataccagttcccaaacaaaccatctctccattggaaaaggagctgttgcaaaccgtgttcatttaagcttctgatgaaaagcaatgtatgtttataagcttgcaagtaacagacaagatgttccaaggccgatgaggaaaatatcgcttccctgtctctgcctctaccttgctgtgcctctctggctttagcagcattggatgttgaattggtttggttcatttctctgaagtcggactgtcaggaggagccagaggttggctttctgggatgtgaaggggacagtgtcagcctaagcctctggagatgcttaggatgctgaattttaaccccttctttcactgcatggcccttcaaacagggattggcaggctccgcgagttacagagtgggtgagtcttggagagaaccaacgactaaggtagcttagctctctgctttgttcttgggagccaagagaatgcaagatcctggtgggtgagcagtggtatgaagaggggacactggtgggtgaacagtggcatggaagtcactgatgcagcctctggccctcagtctccctatcggcaaagtggggggctcttcctatctctaaagagtttcatccctgacaggtggatgggtgaaagatccagagagtgggggtgaggggtgggccctgaagactttttgtctgtagctcttgcatattgagtgtataaacccggcttctggaccaacccaagatgaataaactggggcagaaaattac

SEQ ID NO: 1203 - DNA, 2489 bp, Homo sapiens
gaatcaccgcggaaaagggctccagtaggcaggacggcgccgtctctctgccggcaacctttgccccaaagcggaccctctgcggggatcggagagggatgccccggcgtgaggatgggagaagccccgggacgggagggccgcgggccgtgcccccagctggagtccccgcgccgccgccgggtgctgcccaccaaccctgaggagagctggcaggtgtacagctctgcccaggacagcgagggcaggtgtatctgcacagtggtcgccccacagcagaccatgtgttcacgggatgcccgcacaaaacagctgaggcagctactggagaaggtgcagaacatgtctcaatccatagaggtcttggacaggcggacccagagagacttgcagtacgtggagaagatggagacccaaatgaaaggactggagtccaagttcaaacaggtggaggagagtcataagcaacacctggccaggcagtttaaggcgataaaagcgaaaatggatgaacttaggcctttgatacctgtgttggaagagtacaaggccgatgccaaattggtattgcagtttaaagaggaggtccagaatctgacgtcagtgcttaacgagctgcaagaggaaattggcgcctatgactacgatgaacttcagagcagagtgtccaatcttgaagaaaggctccgtgcatgcatgcaaaaactagcttgcgggaagttgacgggcatcagtgaccccgtgactgtcaagacctccggctcgaggttcggatcctggatgacagaccctctcgcccctgaaggcgataaccgggtgtggtacatggacggctatcacaacaaccgcttcgtacgtgagtacaagtccatggttgacttcatgaacacggacaatttcacctcccaccgtctcccccacccctggtcgggcacggggcaggtggtctacaacggttctatctacttcaacaagttccagagccacatcatcatcaggtttgacctgaagacagagaccatcctcaagacccgcagcctggactatgccggttacaacaacatgtaccactacgcctggggtggccactcggacatcgacctcatggtggacgagagcgggctgtgggccgtgtacgccaccaaccagaacgctggcaacatcgtggtcagtaggctggaccccgtgtccctgcagaccctgcagacctggaacacgagctaccccaagcgcagcgccggggaggccttcatcatctgcggcacgctgtacgtcaccaacggctactcagggggtaccaaggtccactatgcataccagaccaatgcctccacctatgaatacatcgacatcccattccagaacaaatactcccacatctccatgctggactacaaccccaaggaccgggccctgtatgcctggaacaacggccaccagatcctctacaacgtgaccctcttccacgtcatccgctccgacgagttgtagctccctcctcctggaagccaagggcccacgtcctcaccacaaagggactcctgtgaaactgctgccaaaaagataccaataacactaacaataccgatcttgaaaaatcatcagcagtgcggattctgacatcgagggatggcattacctccgtgtttctccctttcgagccggcgggccacagacgtcggaagaaactcccgtatttgcagctggaactgcagcccacggcgccccggttttcctccccgccctgtccctctctggtcaaacaacatactaaagaggcgaggcaatgactgttggccagttctcaccggggaaaaacccactgttaggatggcatgaacatttccttagatcgtggtcagctccgaggaatgtggcgtccaggctctttgagagccatgggctgcacccggccgtaggctagtgtaactcgcatcccattgcagtgccgtttcttgactgtgttgctgtctcttagattaaccgtgctgaggctccacatagctcctggacctgtgtctagtacatactgaagcgatggtcagagtgtgtagagtgaagttgctgtgcccacattgtttgaactcgcgtaccccgtagatacattgtgcaacgttcttctgttattcccttgaggtggtaacttcgtatgttcagtttatgcgatgattgttgtaaatgcaatgccgtagtttggattaataagtggatggtttttgtttctaaaaagaaaaaaaaaatcagtgttcacccttatagagacatagtcaagttcatgttgataataatcaaaggaattactctcttcttgttaaattagctaaatcatgtaaccgcagataggaagggctcacctggggaaactctggtttccgatgggacaggaaagtcatacgggcaacagtatgcggaaagtacgtttttaagtaaaaaacaaaggcaaactttgtactatccagttatctaaggaacaataaaaacattaggag

SEQ ID NO: 1204 - DNA, 1888 bp, Homo sapiens
gtgatgctggggtgatgctgatgcccttccaaggttgagacctagtctctactctgatgtcagccctccgagagacactctggcctgctttgttcccttccctgtccccagtgtctggcatcgagtaggctgccataaatatctctggagtgcatagtaacagtgatgatgataatagcagctagccattgattgaagacctcttgtgtgccggtctctgcgttaaacatttctggaggcttaactcatttaaggagctaccccagccatcattttctcagatggtgaaactgaggttcagagaggccaagcgccgtacccaaaggtcactcagcgggagagctggcaggaaacctcgcgtctgccggtgccggcgccgcccctgcccctccccggagcccggcggccgcgcgtgtccgcggccctgcgagggctccccggctccggacagcccagggcggccgggggaggagcgcgctgcgacggccgtggcgaaagtgcggttgtggatgcgcggagaggccggcagcggtggcagcggcagcggaggaggaagctgagcagggcggcggcggcggtggaacctgcggggctggggcgcgcgccatgggccgcctgcactgcactgaggacccggtgccggaggccgtgggcggcgacatgcagcagctgaaccagctgggcgcgcagcagttctcagccctgacagaggtgcttttccacttcctaactgagccaaaagaggtggaaagatttctggctcagctctctgaatttgccaccaccaatcagatcagtcttggctccctcagaagcatcgtgaaaagcctccttctggttccaaatggtgctttgaagaagagtctcacagccaagcaggtccaggcggatttcataactctgggtcttagtgaggagaaagccacttacttttctgaaaagtggaagcagaatgctcccacccttgctcgatgggccataggtcagactctgatgattaaccagctcatagatatggagtggaaatttggagtgacatctgggagcagcgaattggagaaagtgggaagtatatttttacaactaaagttggtggttaagaaaggaaatcaaaccgaaaatgtgtatatagaattaaccttgcctcagttctacagcttcctgcacgagatggagcgagtcagaaccagcatggagtgtttctgctgatttctgtccctgcatctcccctggccccgttccctgccctcctcccttccctgggtgactgctctgagaggcacttcactcacaggcctgtgggatgctccatggggccctgctggctccatggggcccaggtgcaaagggtttctgaaaaacagcaggattaagtactgaaagagcccaacacaattaccctgtaaactctctgttagggcaaccaccaccacctgtcttccaggacacatttttagatactctgacaggccactgcatctcagattcaggggagaaaataagttgtcacctccccttcaaagttccagagtagacaaatggtgccatcattcaagataacatgctgatcaccctcctcccaaaaagcaagagcttgtttatggctgaggaatcggcggattgtctgaatgacacatatacagagcccccacggatttctgcacactctgggtctgtgctggtggaacattgccaatcagttcttaatgaggcacctgtgtgtaaatacatgcttggtcttctctgcagagaactgaggctaaactctgtccctacttctggttttgccctgtcatgtcgtaacgaggtgggccttttgaggccattttagtttgagttcgagccaaccacctctgttggttagatgatgaataaaaaggttctgaag

SEQ ID NO: 1205 - DNA, 2653 bp, Homo sapiens
gacggcagcggggacggcagcggtagcgggagcagcagcgtggacgcggctggcgctggcgccatgaacccgctgtaaggcgcaggctgtgcagcacggggtgcgggggaggaggaggaggacgccgcggtgaagttctccgccatgaacctgaggggcctcttccaggacttcaacccgagtaaattcctcatctatgcctgtctgctgctgttctctgtgctgctggcccttcgtttggatggcatcatacagtggagttactgggctgtctttgctccaatatggctgtggaagttaatggtcattgttggagcctcagttggaactggagtctgggcacgaaatcctcaatatcgagcagaaggagaaacgtgtgtggagtttaaagccatgttgattgcagtgggcatccacttgctcttgttgatgtttgaagttctggtctgtgacagaatcgagagaggaagccatttctggctcctggtcttcatgccgctgttctttgtttccccggtgtctgttgcagcttgcgtttggggctttcgacatgacaggtcactagagttagaaatcctgtgttctgtcaacattctccagtttatattcattgccttaagactggacaagatcatccactggccctggcttgttgtgtgtgtcccgctgtggattctcatgtcctttctgtgcctggtggtcctctactacattgtgtggtccgtcttgttcttgcgctctatggatgtgattgcggagcagcgcaggacacacataaccatggccctgagctggatgaccatcgtcgtgccccttcttacatttgagattctgctggttcacaaactggatggccacaacgccttctcctgcatcccgatctttgtccccctttggctctcgttgatcacgctgatggcaaccacatttggacagaagggaggaaaccactggtggtttggtatccgcaaagatttctgtcagtttctgcttgaaatcttcccatttctacgagaatatggaaacatttcctatgatctccatcacgaagataatgaagaaaccgaagagaccccagttccggagccccctaaaatcgcacccatgtttcgaaagaaggccagggtggtcattacccagagccctgggaagtatgtgctcccacctcccaaattaaatatcgaaatgccagattagatgccacttccggggacagagcttaagtggactgggacgcactctctccgccttcctctgccccctcgttcaccccgcagaccagaaccagtactggagctgggtctccaggtacgtccatctcatgccttgtttgcatccagcgcctatcagccactcaccacgacgggacgcggaagtggcaggtgacgggggtgtgtgccagcagatgcggatgccaggaagagtgtgagaacaggggtgggattaccgtctgtctgggaggggctccaggtacccctcttccccgtcagacccactgggagatggctgcttgccaggcccccagaaggaacatctgtctatacggtgctgaaatcccaatcaaaagtattgtttagaaatgtatttctccacagggctgacctcctgcagctcgctgagcactcccaggtcctcagcactcccaggtcgtggctggggcagtcagtaggaactgtaactatgtctctgatgcaccacgtgtttagacacagcacagtccttttttctgttcctactgtggaagtagtttctctttgggcatgctgacagcagtttttcatagcctcacggatgagccctttctacgggagtgactccatgcttgtatacagagtatttatacaaatgttttagcatcttcatatgcggtgttaacccctagttctgtacagcatattctgttcaagtatttttttacaagcttgtgctgtaggcacatgccttctgctgcagaagtggacgcccgtggcacactccccccccccccccgtggggtgccatgccttcatgggacattgccacttctgccctggaactcgtgcaggtacgtagtagctgctactgccacaacggcaacaccaagcaagagatggtccatgcttttctgacgttctcagaatagtggctagcttcaaacctgacaagcgctgcttgaagccggaacactagagaatgttgctgagagcagaaacggccacgcgggtcacgactatgcgtgggaaagtctcaagcttccctcctgccagcaacaagaaggctttggagtaggcatgatgttttcacgtgtgcgtgccgtttctccaagcactgcaggttccaccgtgtgtcagaggctgcaagtttaacatcctcctgcctgaaaacaaataggtcctttgctgaaaagagggtaaaaaaagagctttgatcttctcagccaggagaagagggtggtgttttcacgcgggcaactgctcgccggcctacatggggttaattcaagtctgctgcgagcacgactccgcccttggcactggcctccagcaagccctgttctctttggggtacaggggaacgggatggtttagactttcctgctcagtgtgtaaaaaatgtagctaaagccactatttttgctctccttaagctgttcaataaaccggttcctcatttt

SEQ ID NO: 1206 - DNA, 3097 bp, Homo sapiens
ggcctactggggtgtatgtccgctggattgtgaggcccgggatctgggctccgccgtggtgcagaaatgctgtgccggctcggcggtcggtggctgcggccgctccctgccctgcagctttgggctagggacctgccgcttgcgccggttcctacgagcggcgccaagcgccccactctcccagtgtgggcagtggcaccagtctctgcagtacatgcgaacggctggtacgaggccctggccgcgtcttcgccggtgcgggttgcggaggaagtactgctcggcgtgcacgccgccacgggcctgccctggtggggcagcattctgctctccaccgtggccttacggggtgctgtcacgctgcctttggcagcctaccagcactacatcctggccaaggtggaaaatttgcagccagaaataaaaactattgccaggcatcttaaccaagaagttgcagttcgtgcaaatcagttggggtggtccaaaagagatgccaggctcacttatctaaagaatatgaggaggctaatttcagagctatatgtgcgagataactgccaccctttcaaagccactgtgttggtttggattcagcttccaatgtggatcttcatgtcttttgctctccggaatttaagcacgggggcagcacattcagaaggtttttctgttcaggaacagttagctactggtggaattctgtggtttcctgacctcactgcacctgactccacttggattctgcctatctctgttggcgtcatcaatttgttaatagtggagatttgtgctctacaaaaaattggaatgtctcgttttcagacgtatattacgtactttgtccgtgcaatgtcggtgttgatgataccaattgctgcaacggtaccctcatcaattgttctctactggttatgctccagcttcgtgggcctttcacagaatttgctgctgcgttctcctggatttcgccaactttgccgaataccatcgaccaagtcagattcagaaactccttataaagacatatttgctgcctttaataccaagttcatttcaagaaaatgacatattttccaataattttgaaacagttgcaggagtcactatcatctaaatgtatttagacttagaaattcagatgttacttgatttccttttatttaaaatcattaacttcatgaaatattgtaggttaagatgtaatccagaccaggcacagtggctcatgcctgtaatcccagcactttgggaggtcgaggtgggtggatcacctgaggtctggagtttgagaccagcctggccaacatggtgaaaccctgtctgtactaaaataacaaaaaaattagctgggcttagtggcaggtgcctgtaatcccagctacttgggaggctgaggcaggagaatcgcttgaacctggaatacagaggtttcagtgagctgagatcaccccattgcactccagcctggacaacaagagtgaaacgctatcaaagaaaaaaaaaagatgtaatccagatatatttgacagtaattaaaatcttttaaatgttataaatgcagtatgtttgtgaaagtattagaatagaaccaaagtgcctgtctctgtttataaagttacagtttgttagagctaccagaactttggagaatagggttagctactgaatgatggcaagttaaactaaacaatactgcatattactgttttgtaaaataagaggatcagtgagatgattcatgttttttttttttgagatggagtctcactgtgtcacccaggctggagtgcagtggcgcaatctcagctcactgcaacctccatctcccggattccagcgattttcctgcctcagcctccaagtatctgggattgcaggtgcacaccaccacgcccagctaatttttgtatttttggtagagatggggtttcaccatgttggacaggctggtctggaactgctgacctcaactaatccaccctccttggcctcccatagtgctgggattacaggcatgagccacctcacccagcatttttttttttttaatttttttaatgagacagagtctctctctgtcacctaggctggagtgcagtggcacgatctcggctcactgcaacctctgcctcccgtgttcaagcaattctcctacctcagcctactgggtagctgggactacaggggtgcaccaccatgcccagctaagttttgtatttttagtagagatgggatttcaccatgttggctaggctggtcttgaactcctggcctcaagtgatctgcccaccttggcctcccaaagtgctgggattacaggcgtgagccactgtgcccagctgagatgtttcttattattttggaggtggagaggattttagacctctttgagcatctgaaaaaaggctatatatgtatggttttctcttcagaaaaatcttaagactcacaatacggggacttccttgttaccaggaagattttctggcaattcctagttaataaatcttattctaatggaacatacattgatcttgagttaatgcgtggttgaaaaaaaaaagcgggggcaacttgaaatatatgcagtaaagtagtccatgcatacaagtccctaacatggtagatgatgttgcctcccggccctgctcagaaagaatacaaaaagtgtacattcctttttctataatttaagaagtctggaatacagagtgtaacactgtgtactgctagcacccaaagtggaaaatcttaagcattcagattgtttagtcaaagaagaaaaccagaagggcagttgcctattgaggtgattttaaacctgtttatttgtaaggattaagtaccctaataggcttaaactatgatagaggtttaatacagaaaaaattgacaggtattataaattgtggatccagttacttgcttatttaatttgtaaagaggtaaaattagctctggttgagatatcaagtatggcaggtatttgagaaggctataaatcataattttcatttagttaaaatatggacctgattctgggaaaccctatcattccatctcaatgttttacaataaaataaaaactaaagtg

SEQ ID NO: 1207 - DNA, 2585 bp, Homo sapiens
atgcactgagcggctgcggcgcggcttccatcctcccgccctcctgacgcggccggagcgcagccctgaggcccagggagaacgacacattggatacagaagggaggtgatcatgcaccatggcactggcccccagaacgtccagcatcagctgcagaggtccagggcctgccctggcagcgagggtgaggagcagccggcccaccccaacccacccccgtcccccgcagctcccttcgctccctcagcaagcccgtcggcaccccagtctcccagttatcaaatacagcagctgatgaataggagccctgcaaccgggcagaacgtgaacatcaccctgcagagcgtgggccctgtcgtcgggggaaaccagcagatcacactggccccactgccgctccccagccccacctctccaggcttccagttcagcgctcagcctcggcggtttgagcatgggtctccatcatacattcaggtcacgtcccccttgtcccagcaggtccagacccagagtcccacgcagcccagtccggggccggggcaggccttgcagaatgtgcgtgcaggtgcccctggccctgggctgggcctctgcagcagcagccctacagggggcttcgtggatgccagcgtgctggtgaggcagatcagcttgagcccctccagtggtggacactttgtgtttcaggatgggtcagggctcacccagatcgcccagggagcccaggttcagctccagcacccgggtacgcccatcacagtccgagagcggagaccctcccagccccacacacagtcagggggcaccatccaccacctgggaccccagagccctgcagccgcgggtggggccggcctgcagcccctggccagcccaagccacatcaccacggctaacttgccaccgcagatcagcagcatcatccagggccagctggttcagcagcagcaggtgctgcaggggccgccgctgccccggcccctgggcttcgagaggacacccggcgtgctgctccccggggctgggggcgcagcggggtttgggatgacgtccccacccccgcccaccagcccttccaggactgccgtgcccccaggcctttccagcctcccactcacgtctgtggggaacacgggaatgaagaaggttcccaagaagttagaggagattcccccagcctctccggagatggcacagatgaggaagcagtgcctggactatcattaccaggagatgcaggctctgaaggaggtcttcaaggagtatttgattgaactgtttttcttgcaacactttcaagggaacatgatggatttcttagctttcaagaagaaacattatgccccattacaagcatatcttaggcagaatgatttggacattgaagaagaggaggaggaggaggaagaggaggaagaaaaatctgaggttatcaatgacgagcaagccctcgcagggagcctggtagcaggggccggaagcacagtagagacggacctgtttaagaggcagcaggcgatgccctccacaggtatggcaggaggaatgccccccacgccacaggccgcgcagctcgctggacagaggcagagtcagcagcagtatgacccctccacggggcctcccgtgcagaacgctgccagcttgcacaccccactgccgcagctgcccgggaggctgcccccagccggtgttcccactgcagccctctcctctgcgctgcagtttgcacagcagccgcaagtggtagaggcccagacacagctccaaatcccggtgaagactcagcagcccaatgttcccatccctgcaccgcccagcagccaactccccatccctccctcgcagcctgcacagctggccctccacgttcccacacctggaaaggtgcaggtgcaggcctctcagctttcctccctgccacagatggtagcatcgacaaggctccctgtggaccctgccccgccctgcccacggcctctgcccacctcttctacctcgtccctcgcgcctgtgagtggctccggcccaggaccctcccctgctcgatcctctccagtaaatagaccttcctcagccaccaataaggcactatctccagtcacttcccggaccccaggggtggtggcatctgcccccaccaaaccacagagtcctgctcagaatgccacctcgtcccaagacagttctcaggatacgctgacagaacaaataactctggagaaccaggtgcatcagcgcattgcggagctgaggaaagcaggtctgtggtcccagaggcgtctgccaaagctgcaggaggccccacgccccaagtcccactgggactatctgctggaggagatgcagtggatggccacagactttgcccaggagaggaggtggaaggtggctgctgcgaagaagctcgttagaactgtggtgcgccatcacgaggagaagcagctccgtgaagaaagggggaagaaggaagagcagagcagactgaggcggatagccgcctccacggcccgggagatagagtgcttttggtcgaatattgaacaggttgtggaaataaaactacgagtagaattagaag

SEQ ID NO: 1208 - DNA, 2372 bp, Homo sapiens
acttgggttgcggaggccggctggccggagtcacggttggggacgggcgcgcctcggagcgcacggctgcgctggaagccgcgtctggggcgcaggaccaacgggacctacctcctcccggctacctaaagactccttctctcgggaaagagcgctgcccggctctgggatttgggaggagctcggaggccgctcgggcacctcgctggacactatccgtttgcgccccggtggcgcgggagggtccggagcggagcgctcgtctctcctcagcggtttagtggagaaaagcagagagctcttcctggggcgaatgggacctcctccctcggtcctccgtggagtcgtcgcatcgcttgtcgtgttggtctcgaggggctcacagcttggcactaatttgcaggtgttcgctgctgatttggtttcttcttcgatttgcggacggttccctccagcgactctcgacacacgttttcctgtcttcgccggagggccgggtctggggtcgccggagcctgcgggaatccagcgcttattcgctgaccctcgagtcgcttcgctagctgtgcgccctcctgggcactagcctggagaggagcgtgcagacgcggctccttggagggagtgcggtcctctagggaggcatcgggctcctaggggcttcttggcgtgtgtggtgggattggggtccgccggccatggccttcactttcgctgcgttctgctacatgctgtctctggtgctgtgcgctgcgctcatcttcttcgccatctggcacataattgcctttgatgagttaaggacagattttaagagccccatagaccagtgcaatcctgttcatgcgagggaacggttgaggaacatcgagcgcatctgcttccttctgcgaaagctggtgctgccagaatactccatccatagcctcttctgcattatgttcctgtgtgcgcaagagtggctcacgctggggctgaatgtccctctacttttctatcacttctggaggtatttccactgtccagcagatagctcagaactagcctacgacccaccggtggtcatgaatgccgacactttgagttactgtcagaaggaggcctggtgtaagctggccttctatctcctctccttcttctactacctttactgcatgatctacactttagtgagctcttaacgcaaagaccatgcacatcatcagagactgagatgggagaggcctgagacggagaggtgcatttctgctggtgactggaggagggaccagaatgaggatacgtgagaaatagacccggcaggcagtcagactgaatgggagctggaatcacgcagcagctgggagccgagttaaccctgcgtgtctgtgtcaccctgtttgtcaatctttggcattcgaattccacacacggggtcctagagcccttctgagcatcagtggtgtgggggagtaggtgacgaaacactagacctctcctgagagagaattgctgcttcctgaatccacttcattgaacagcaccttgcaagttcaaatgagttcctgggagcggaggctggaaggccacaaggtgcttgctaaggaacagaatgacccagagtcaaggccaagtctgcagggacctgttgaaagcctcgagaatgtcttggctgcccaagactcttgttgcctttcttccaagccatggccatgccctttttctcaaatgggaggggctggagggtgtgtgggatttgtcttcagctgcaaccagccttgagcctgctgggctattttcagctgaggaggggtgaatataggaaaaatgcatttttgaaacgtttgcaacatgatcaaggtgttagttctccaccacacaagttgtattcttcttttgccacctcaaaccatcacagagtctttaaatgcaaatcaattggtcaatgctagtcaaagctatgttcttacaaaaaccccagacagctcagagctcagaaaatcctgtggagtggctgctctgtaccgtgggcatccggcagccaggaagtgagacaacataattataactttgttttatgatgctgcatcatttgtactgtttaggtcgacgtgaggacatcatcttatttagaattttccgtttggcattctcttttgggtgggagttatgctgggggttgtaaataatgacaaggctgagatttttatgatgtttaaattgggcacaatgattttgaccttattccccaaacttcttttcttttctactgtttaacatacacaggctatttatacacgtccccagctcccatctgaaacctgtgactcaggtttatgaatggtgtttgtgtagcaacacattgtgtgctatgtttattaaaatgcagcgac

SEQ ID NO: 1209 - DNA, 2830 bp, Homo sapiens
ctcaatcccttggtctctctgattccttatatatcccgatacatttctgggggctcatcaggattggagatgacagatttactgtcccctttgcctgcgatactaggtccccggggccaggagagacccggcatccaaggtgtgccacagctgagcttcacccggatatatagaccagctctccccacgtcccagcaccctgcctggcagcgcaatggaaccgaggatggggctgcaggacgataccagcacttcaggaactgtgacagaatcttgctccgctgccaaggctggagtgcactggttcaatctcggctcactgcaaactctgcctcccaagttcaagtgattctcctgtgtcagtttctttaggaatacagcactccatattgttaccataataatgaaacggattcccatggctacagcgatgaagcagcagaaaaaaaatggagatgctgtcaaagaaaaaagacacagatcagagaaagaagcataaaaggtgtttaagaaataagtaacatagcagggcgcggtggctcatgcctgtaatccctcacgcctacaatccctcacgcctgtaatctcagcagtttgggaggccgaggtggacagattgcttgcggtaaggagtttgagaccagcgtagccaacatggcgaaaccccatctctacgaaaaattagccaggcatggtggtgagtgcctgtagtcccagctacttcggaggtggaggccgaagaattgcttgagcctggaaggctgagatctcagtgagccgagactgccactgcacgggtgacagagcgagcctctgtctcaaagaaagaaagagtatgtacctggatatgtatttttaaaataatgtaaagatttaaaaatagttcgaagaacctaattgtatggcttttgaagcaactagaagtatgttctttacagatggtgggagtaatgttatattaagtttgtgtaagctataacacttaagtgtttataagcatgtttataagctggtgtttacaagcatgtttttatttccgaacaaaattcaaaagaagtttgtctttgtaaaaattcagatgtgcacagttcttgttcctctctgaagatattggaaatgtattgctaatactggtaatatataacaatttttttatgaatagatgacttatttaatagttacgtatctaaatctgaatattttctatataatttgtctatggaaacaaatatttatacaattgttcacatattgctcttttctttgtaatgttattccttctaggtataaaatatagacgttctcaagaagattagtgtttgcaatagaaagctgggccatttggccacacctgcaaatgattattggttttgcgggagactgcaatccataaaaaattactggcagagtttgagaatttgtataagaaaacaaattttatgagatgcaaaatcaatactattatactaatttaaattttgtaatagcaaagctaattcttgttacttttcagtctttcaattcactaagataatgagtgttacgcactgaacacatacaaatgtattgctgtgactgaatgaagaggacaaattaacaaagcaattccgaggccctggaaattgatcaaaggctaataatcatttgtgaactatttattcttggaaaaactgctagagattcaaggaagagtgcagcagatttgtagtaagtttacctagtgctgctcccgtgccttctgcccacccaccacacccagcacagtgagtaacagttgcagtttttacagctgggggaaaatcaacagtgttttttgccacaaggacagacttgattagcggtcagaggttggggcatagtgtaacagaccactgcttttcaactgaaagtgctgaattttgcaggaaatgaatgagaaaaccccattttttgttgttttttattttttttagtctgaggtgtagtctcctctggggcaagaacagtgccagccataaatataacaaaatcctaaacatgagagtgcaatagacctcatgacattagccctctacatattctttaaatttttttttaaattgacacattgtaattgtacatatttatggggtacaacttgatgttcaatacatatatatgttacattaaataatcaaatcagggtatttagtgtatctgtctacctcatgtatttatcatttctttgtggtgagaacgttcaaaagcctctgttctagctattttgtaatatgcaatatcttactgttaaccatcatcaccctactatgcaatagaacagaacttattcctcctacctaactataactttgtacccattgaccaagctctcaccctgtccccctctttttctctcctccagtctctgttgaccactgttcaggtgtttttctggtgatcgctctgcttctataatatcagctcttttttgctttatttctacatgagtgagattatgtgatatttgtctttctgtatctgccttatttcacttaacatgatgctcagcaggttcatccatgttgtataaatgacaggattttattcttgattattgaaaaaaatatgcatatgtgtagaggagaccagggtgattccagtaaaaagtaaaagcccaaggagacttgagaactgattgcaaatttatgaacacttccttcaccacacacacacacacacacacacacacacaccgctagcacagagtggagcctctactaacttaaggttttcgaataaaccttttaaaataatatattggctgacaaccaagctatgcaattcacaagggcaatccctaggaaatggggct

SEQ ID NO: 1210 - DNA, 2242 bp, Homo sapiens
atggataaaatgtgtctcctttgtctctactagaaaatgaaaggaattgaaattaagagaagagagggagtgaagggtggcaccaagaatgaaaggagaaagaggttgagggatagtgagaaaggttggagaagagagtaaaaagaggccacttacccgatttaaaatttgtgagatgttccttgggctggttggtctgaggaccaaaggtcgtaggtggatctcttcatggagtgagggtgaggacaggggacagtctcctgaaggagtcctgctgacctgggtctttggcaccaaatgtgtcatgcatccatgtgaagagaccaccaaacaagctttgtgtgagcaacaaggctgtttatttcacctgggtgcagacgagttgagtccaaaaagagagtcagcccagtctatatcttttaaatgggaaaattcaatctatttacatgcaacgttattcttgatagtgccactgggttagagtctccccgaccaagctggtctcagcaagtggtctccatcatgggggctcgaatccaggttgaagggtcaccagagtgatggttggagaacatggaactagctggaggacacctgagtactcttaaagcaaaccccgtggccaaaatcaataaccaatttggataccatcaagacacctgaaaccttatcatgagccagatgctgaggaagagattccaggaggatcctgaggaccccctggttgcagccacgtcgaggctgacactgaggaggaccccaactgtcatgagcaacacccgtcgaacacagccatccacctggggacaaatcaagaagctgtcacagatgatggaagaaaacctgaggaaagcgggacaaccaatcacaatgagtaatttggtgatctatcacagtgatgatcaccattgccatgagtattccttcaacaagggctgacacagagaacaattatacttattgggcatatttatcaatcttgtctggcaataatgcctagatgatttcactctatggcacagttacacatgctttctgatctcagtatttaccataataaatctgctcctataattgaggcataccaccctcaaaaacctatttgtaaacaaaatagaacctggccagaaataatgaacaacttgtttagtaagattgcattgcagaacaggcagagatgctacgcaatgattcctatgggatcattgattggtcccctaaggggatgtttagcttaaattgcacctctcagtctgcatgccatggccacactagttcagatggtctgaacaaagtggtcagatggcagaaatgataagaagtatggcaaaagttcctattgtctggaaccatggcagtatagtgtcacctcaacctcaaatgatatggctcattgtaggagctaaacataaggatttgtggaaactattaatagctcttaataagatcaaaatttgggaaagaataaaaaaagcatctagaaagacactctacaaacttgtctttggatattacaaaattaaaagaacaaatatttaaagcatcccaggtacacctgaccttaatgacagaaactggagtgcttgaaggagctgcagacagattagcagctagtaacccattaaaatggataaaaacacttggaagctctgtgatttcaatgatgattgtgcttttaatcggtattgtttgtctttgtatagtgtgcagatgtggatcctgactcctgtgagaagtagctcacagtgtcaaagctgcctttgcttttatcgatttgcaaatcaaataagggggacatattgggaacagcacccccccccccaaaatctggccataaactggtcccaaaactggccataaacaaaatctctgcagcactgacatgttcatgatggtcttaatgcccacgctggaaggttgtgggtttaccagaatgagagcaaggaacacctggcccacccagggtggaaaaccacttaaaggcattcttaaaccacaaacaatagcatgagtgatctgtgccttaaggctgtgctactgctgcagataactagcccaacccatccctttatttcagcccatcccttcgtttcccataagggatacttttaattaatctaatatgtatagaaagaatgctaatgactggcttgctgttaataaataacgtgggtaaatctctgttggaggctctcagctctgaaggctgtgagaccccggatttcccacttcacacctctgt

SEQ ID NO: 1211 - DNA, 3949 bp, Homo sapiens
ctgttgctcagacggacctgcaggcattctccatgcagaacggtctgaatggacaagtggatgtctcacttgcttctgcagcctctgctgtggagagcctgaagccagcactccttgctggccagcctctagtgtatgtgccctctgcctcactgttcatgctgtatggaagtctgcaggagggaccagcgtcagggtcagggtcagagagggatgacagaagctcagaagccccagccacagtggagctgtcatctgcaccctcagctcagaagcgcctctgtgaggagaggaaacctcaggaggaggatgagccagccactaaaaggcaaagtagggaatatgaagacggcccgctgtcgcttgtcatgcccaagaaaccctcagattccacagaccttgcctctcccaagactatgggtaacagggcatctatacccctcaaagacattcatgtgaatggccaactccctgctgcagaagagatttcaggaaaggcaacagcaaactctcttgtttcttctgagtggggaaatccttcaagaaatacagatgttgaaaagccttcaaaagaaaatgaaagcaccaaagagccttctttgctacaatatctttgtgtgcagtctcctgcaggattaaatggtttcaatgtacttttatctggcagtcaaaccccccctactgtgggcccgtcctcaggtcagctgccgtctttcagtgtcccttgcatggtcttaccatctccacctctgggcccttttcctgttctctattctcctgcaatgccgggcccggtttcttctactcttggatcaatagcccagcttctcgtcggccccacagctgtggttaatccaaagtcgtccacactcccttctgcagaccctcagcttcagagtcagccctcactaaacctaagtccagtgatgtcaaggtcacacagtgtcgtccaacaacctgagtcccccgtttacgtgggacatccagtctcagtagtaaaattacatcagtcaccagttccagtgacccccaagagcatccaacgcacacatcgtgagacgtttttcaagacacccggcagccttggagaccctgtcctgaagagaagagaaaggaaccagtcacgaaacaccagctcggcccagaggagactagaaatccccagcggcggcgctgactaacctgccgctttgccaggtgggggtgggatcaaacgccctgagagtcccggatgtccgaggcgggatgcaaaccatcccgtcctgagcacgggtccttcctctctctttcatccacacttctgttaacttcccaccaccatcaatcatctgatttcctgaaagtaattaattgtgcatttaataccagttagagttccgactctgcatggtgtcacagtgaaagcgccgactgacttatggttttgattcaagaatcgtcttattgctggaagtagatctgaataggataccggagccttgtttttctaaaggggggcgctgtctagcacttaactagggtaagcattcttaacatgtatttccacttgccctgagtaaatctgtggtgagagaagcttcctttctgcagtttaaaaaagctactgcttccttaggcttcatcaggaagccatcttcagttgtgaatcctatggtgttatttattttgttcctgaaatgggatttagtgcaaaaagtttacaactacagtctttaacacatttttttcagggtatgacgacttgaatgtttatacttttattctataatttgccctgcacttattttacaacctagtaataatgtggataaatgtatctacatgacacatgtcaagaccaaaataactgtgaatgacacaccttgctgtaaatgaactgtgctaaccctgactgtgggcttgagaacaaagatgaactctagaactctagcagcctaactgctgcttctcaaataactgtgtgaacagtgagatattactgtttgtttctaaaaatcctactgtgcccagtttccttcactacatgccctgcattttttatttaaatatttagctgtagcgccatcagatatggatgccttctaacaattgctgtttgtaaaataaatcaggatggtagaaagtgattatatggaaaattggaacctggatgagaccttttcgttgaattctgaagagtaatgatgtgaaaattgatacagggcaagagatgattcttttgtttttcttctacttcatgtccagaagagtaagagggaaaatggacatatgtttcatatccaagggtattcaaactgtagttagttggtacctctgaaaaatgagaatggtgagcgcacgggttggttgttctagcatgaatacaattctggaaactgttatgcaatttcccttttttaacccacattactttaggggtgcattaagtcgccaaactatactagttctttgtattcctagacttgctgatatttacctctctcttgtctcttcagagtaaatggttcccttctttccttcctactttccttcattctctcttccttccctccttcctacttcttttcttccttcctcttcctctcttaaaactatcttagatgtagaatcctggtgtagggttttattttatttttattttttgacccaataaaatgttatatgaaagaatgaaaatattaatttaagagactctgggagtctgaataaagtagctttatattaactacaggataatattagccttattacccccacaagattttttaaaacttgaggtaggtagctacattaaataaatttgctacttatataaaaatttttatcaacactaaacttttaaagtttacaagttttttttttcttttttacagtcttctatagagttaggttaaaatgtggttctaaccatcaacaattgcatggttaaatgaccctgaactaaaactgatgggttccctatcaaaacaaataaaaatatacctttttcaggtttcaatctgtgcagggtatatgcatgttaattctaccatgcttaagaacttccacaaaatatttcatggagaggtctgcatttagacggaaacagaaattgcttttcccctcactgttcctgaatgctctatacttgttttaacatttttgctatctttttttattattctgatcatgatatgaccatttaacctcagaattcataattcctgaggggtgttaagaagcagtcccattggtgaggatattatgacttggtgaccattcttaggagtagaaaaccaaggacaattgcttctgtattcagtatccacttcttaatgtggctttatatgtaaaaataataatgcagtggttgtttctgtcaggaaaataaatcttacagaacaactggtggaattgaagctgctgcgctagacttggatattttgggtagtgaagaagcaatggcaatcttgagtctattattgtataatttagtaaaagaaaaaaataatcgttggtggtcctactaagagaatgcagcttttttgagttgtcacagaggctgtgtgtgccctacactgaccagggtttgtaaaaccctttcattctggtacaagagtcgggggtataacttttatacttgaatctacctaccaagtttacatttctcaattcctttttgtaaggtgctatttctgtatttaaataactttcttttaacgtaaagctgctttctgcttatcttattgcactgctagttgtatgtaggtattaattttattgctgcttactgcttttgttttcttattatttagctctgctctttttcctaatggctatattatctatagctatttacttgtaactgtactacatgtaaactgattttttgttctgattttttttctaatatttttaggaaaatattaagctttataaaatagcaataaaaaataattcatttaagaag

SEQ ID NO: 1212 - DNA, 4168 bp, Homo sapiens
gtctccatcagccaagaagatttcatagggctagactcaccaaggtttgtgttacaaaaatgaaagtttgaaggttgcgagaaggccttttcaaggcttgaaaatctcaagatccacttgcggagccacacaggcgagaagccgtatttgtgccagcatccgggttgtcagaaggccttcagtaactccagtgaccgcgccaaacaccagcggacgcatctggacaccaaaccttatgcttgtcaaattccaggatgtaccaaacgctacacagacccaagttccctaagaaagcatgtgaaggcacattcttccaaagagcaacaagcaaggaaaaagttgcggtccagcacagagctccatccagacctgctcacagattgcctcaccgtgcagtccctgcagccggccacttcccctagagatgctgctgctgaagggaccgtgggacgctcccctggacccgggcctgacctctattcagctcccattttctccagcaattattcaagccgaagtggaacagctgctggggccgtaccacccccacatcctgtcagtcacccttctccaggacataatgtacaggggagccctcacaacccctcctcccagttacctccactcacagctgtggacgcaggagctgagaggtttgcaccttctgctccatctcctcaccacatcagcccccggagagttccagctccttcttcaatactgcaaagaacacagcctccctatacccagcagccatcaggttcacacctgaagtcctatcagccagaaacaaactcttcttttcaaccaaatggtatccatgtccatggattttatgggcagctgcagaagttctgtcccccacactaccccgattcccagagaattgtgccgcctgtcagctcctgcagtgtggtgccttcgtttgaggactgccaagtccctacatccatgggccaggccagttttgatgttttccacagagccttctcgactcactcgggcattacagtgtatgatttaccttcaagttcctcgagcctctttggggagtctctccgcagcggggctgaagatgctaccttcttgcagatcagcaccgtggaccgctgtcctagccagctctcctctgtctacaccgaaggctaaaagctctcttggccactcctgcacacccaggaccttgatgttgcttgccaccttttgttttcgtactctcacagactgcttgaggaaggatgtcagcccaatcagcgggccctgcagagttactgatgttctttcagaaggcaggactgaatggcagagctagctttgcaggaatcattacagttgctcctttttctctctggttttcctggactatgtgaccaggaggactgtcttttcaaagggaatttagagcctcactctcctggatacctgttacttcctggctgtcaacccttaaaggaccccagtgaaatgatgtgcatatgaaaatgtagtttggggatgactctacctgaaaactccaaacagggaaaaagacctcaattacgagaggcatagtgacctgcctcacctaatcctcacccttgctgctcctgatgcaaagccaggcacaacaagggaaatccatgtccaaagcatagtgtggtctcaactcttagaaactccctgggtttcccttttctcttagccacatgctaaccagttgcttctcagtgtttctcttcaatagaaaaataaggttttatatgccagcagcctatccttgtttttgcattttaaagacttagttatttatacgtattttaaaatgaaaaaaaaaatgtaaaggtctgtgctttggatggaaatcattattattgtaatcacgtcagctatagacattttgcacagctgtggttctgcctggccccacctctagcatgttagttttgcagttagcaaaggttacctgagggaaatggagtgggcacctcccgcaccaacagtcctgtagctggaaccttcctgagttgactgtttagtaactccacctcaaagactgtgttcaaagaaaaatgttgtttgactggtttacccattgcctccactctggtgctgcacccagagaagtgccagatgtgagaactgggacagactgagtcatgtgccagcttcccttggaaaaccaaacctagtgatacttgacttccagtgctcagattttactaacgtttttcaggatatccactcatctgtctgtctcttccctacacttctctccaccctctttttgcatccctcttaccctcttcctgactgtggttcatatatccccaccagccgccattgtctgatcatcttgggaaggtagagctgacagttctcgaaaagtctacagaaagaggcaattctttttctgagttccagtttgaaggcctggaattttcacatagcacttggtcgaaaatatcaagcctaaataggaagtcattttctgtgacacctctacatagctattacagatcctaagtcctagggcatcagctataaaaattggccagtcccaaagacacagtaagttctaacattctggtactatcatatttcaagtattttttctcactttttaaaaatgtttttctgaacaaaagtgaaacaatgccatttatcaaactgagatcattacaatcttcaacaagacaactaaaacagcttgatgttagatgggattctgtgacagtttgtatactgacaggtccttccagtctccctccacagtcccacaagcggaagtattctacctgattccagagttcattccaacatgcagtagaatgaggtgaatgaagaaccaagtgtgggttttgttttcacagtgcacttggtcaatctagtttctctgagtagtgggctgtattctaagaaaagctttcacgtagacgtcaaagtctgcaaaagagatgagttagccactttacaaaaacctgctctgctttacaaaagatgcacaccaggcttcctttacaagtgaactccaaggctgcttgtaaagtaccacccttcctgcagactttgtgggtcgtgtcacttggcctaaacaagtggcctaacatatgcatgctcacagctagtagcatccctcatgcgtcctttgtcatactctggaaagaaaaaaactctgctatcttcagagaaaccatctattcatacttaaatatggaagcctttacaaggaactcaaaatacatttcatttcatttgtacaatgagaaaaaagatgaaaaggcaaggttgttattgcagttgacattgtcagccctgccttttggctttatgtaatttaaaatagaaagggggaaggaggacaagacagaagctcaactttagaaaccatggacatcacctccctctttgagaggagctgcttgtgaaccaggctccagtcttcctgtggcctctcacagtaaccctgcccctttcttacctcacaggggcaagagggactctaaagagggcgtaagcaatagaggcacctgcagccctccttcctcagcaggaaatcaatgtggagccccagagggacattttatctcagagagagcatgctggccacaggacccagtgcagccctgcttcctgcaccgtgggtctttcctgatagctgcaggcttgagattgcagcctcaggataggacacgttcagatgccttccagactacacacactatgcttagattcgagagtctttcctgaccttaaaatttgtcccttgcttactttcacactgcagaagatttatatatatattcatcattatttttgcagcagtacaagtggaaacttcaaaaaaatcattccctttcatgtcctggtctttttaagtcttgatatgtaaccattttcataaatatccaaacagagattgtcattccccttaaaaacagaaacaaaacacaaaactagtgcttgtgaaaacacacagcgcaaagacaattatcctattgcattaaaaaaaaaatcagtctgcctagagacatttcattggctgcattgtcttaattccctaacgaaactgcatcaaaatgtcagttgtaatttagcctctgatcagctgttaaatattatttaaatatttacaggtcctgtggggtatctcccattacccatgtcgccctcaaattacataagcgatcat

SEQ ID NO: 1213 - DNA, 2650 bp, Homo sapiens
tggggtctacggcctaggggccggggaagtttgcgccgccgcgaccagtgctgcgatcccgagccgggctccagccccgaggaccaggggtcgggcgggcctgcctacggaaccccgcgggccagcagcagtcgtctcgcgtcctcctgcttggaaaagtgtttaagcttctaaaatgtcatctatcaagcacctggtttatgcagttattcgtttcttacgggaacaaagtcagatggacacttacacctcggatgaacaagaaagtttggaagttgcaattcagtgcttggagacagtttttaagatcagcccagaagatacacacctagcagtttcacagcctttgacagaaatgtttaccagttccttctgtaagaatgacgttctgcccctttcaaactcagtgcctgaagatgtgggaaaagctgaccaattaaaagatgaaggcaataaccacatgaaagaagaaaattatgctgctgcagtggattgttacacacaggcaatagaattggatcccaataatgcagtttactattgcaacagggctgctgctcagagcaaattaggtcactacacagatgcgataaaggattgtgaaaaagcaatagcaattgattcaaagtacagcaaggcctatgggagaatggggctggccctcactgccttgaataaatttgaagaagcagttacaagttatcaaaaggcattagatcttgaccctgaaaatgattcctataagtcaaatctgaaaatagcagaacagaagttaagagaggtatccagtcctacaggaactggactgagctttgacatggctagcttgataaataatccagccttcattagtatggcggcaagtttaatgcagaaccctcaagttcaacagctaatgtcaggaatgatgacaaatgccattgggggacctgctgctggagttgggggcctaactgacctgtcaagcctcatccaagcgggacagcagtttgctcagcagatacagcaacaaaatcctgaacttatagagcaactgagaaatcacatccggagcagatcattcagcagcagcgctgaagagcattcctgatttaaccaggggctcaagcccaagatacaaatggtttatggctatgaatgaagtatttgttgtagatagtaccccctccctccttcaaaaaaccaaacaccatatctgatgtgtgaaaataatggaggaaaacctcttgtgtatattcttaaagaataaatctgtttagacaataggtttatcacaaacaaactcaaaacataacatgactccttttgaaatgatcactagccatgttacgtgccaatatagcactgggataaggttccattttcaaacttctatcatatttgtatattagacttaatagcaaagtatatttattgaactctagtagggctatttgttggtaagctctttagctccaatttcccttaagcaaagttttttgagaagggaaatgacccaaaggaaaggtttcctatgctggttgagaagaagtgtacttgccactgagcagtatgtcaggaaagaaggaatattatctaggtttagctttgataagtgctattagtaatgaatatataacatgggaaccaatgttatctttaatgttgcttgttctggtgaacagagaatcttaagagctgttagaaagtagcacttgatgcaagggatgttttgaaaagaaaaaattggtaatgcgaatgtatagaaagtaaaggtaggatgctcaggttttctgcatagttcttaactaatcttgtctgcagtttggtattgataatattagcatggccacttatgctaaatacacaataagatacatttagaaatccttaatgtactggttaggtcagtggtacaactgtttgacttaattatcacaatttccccaatggtaaccttaccttggaaactatcaaatataaatatactttaactaagccagtgacctggtcctaagttaaggattttctaaatggtatttaattctgtgcccataaacactgattttttttaaaaagaaaacttagtaattatttgatggataacaaaaagcatctatcactaacattgcttgttcatgtaatcttctgtgataatttggcttggcatgccagtcttataattaacataatttaaatttgatgcaatttaaatataacaggagacttaaaatattttattataaattagatgccatattagttagtggagaaaaggggcattaggtattaattgcatgggtctaactacattgatgatgagagtttaattccaactagagtatattttttgtttattaataatgaaattggtgctgacatgtaatgacttcacaagttttacgagggaaaactgaaaaaggaagtaatataaattttgtggggtttttttgagatggagtcttgctcttttgccaggctagagtggtgttgcagtgtcagctcactgcaacctccacctcctggattcgagtgattctcgagccttaagctcccaggtagctgggattacgggcgcccaccaccatgcccagctaatttttttttttttttttcttgagatggagtctctctgcactccagcctgggtgacagagcaagactccatttc

SEQ ID NO: 1214 - DNA, 3056 bp, Homo sapiens
attttactgggaactagtcttgcaggaaggcttatgtacagaagtacgtcgtgaagaattatttctactattacctattccaattttcagctgctttgggccaagaagtgttctacatcacgtttcttccattcactcactggaatattgacccttatttatccagaagattgatcatcatatgggttttggtgatgtatattggccaagtggccaaggatgtcttgaagtggccccgtccctcctcccctccagttgtaaaactggaaaagagactgatcgctgaatatggaatgccatccacccacgccatggcggccactgccattgccttcaccctccttatctctactatggacagataccagtatccatttgtgttgggactggtgatggccgtggtgttttccaccttggtgtgtctcagcaggctctacactgggatgcatacggtcctggatgtgctgggtggcgtcctgatcaccgcactcctcatcgtcctcacctaccctgcctggaccttcatcgactgcctggactcggccagccccctcttccccgtgtgtgtcatagttgtgccattcttcctgtgttacaattaccctgtttctgattactacagcccaacccgggcggacaccaccaccattctggctgccggggctggagtgaccataggattctggatcaaccatttcttccagcttgtatccaagcccgctgaatctctccctgttattcagaacatcccaccgctcaccacctacatgttagttttgggtctgaccaaatttgcagtgggaattgtgttgatcctcttggttcgtcagcttgtacaaaatctctcactgcaagtattatactcatggttcaaggtggtcaccaggaacaaggaggccaggcggagactggagattgaagtgccttacaagtttgttacctacacatctgttggcatctgcgctacaacctttgtgccgatgcttcacaggtttctgggattaccctgagtctcaaacagttggaaactagcccactggacatgaaagccaagacataggaaagttattggtaggcaaatcttgacaacttatttttctttaacaacaacaaaaagtcatacggctgtcttgctactaccagataaatgatgctgctgtgtgaaaggaagaactgtctcatagcggtcattggtcgtccgtggtggttggttgtgctacagttgaacccaggctaaagaccataatccggatctttaaaggcacacaccgcccccccccccaccccggcccctgctcctctcgctgttgcatgggctttggatctagtcatgggctggcaggaattgtggcctggcttaggaatagctatgagccccactgggttctggagagccagtagagatggggtgatctgggaggctggaggtagagcctttcttttccgttacaaccttgcctagcatggagttatttctaaaatgggaactttggtctaggagaaggggtggcaccatatgaaacggcattccttggacagggtgacttccttatcgtttatttggtgtttttttgttttgttttgtttgagacaggatcttgctctgtttcccaggctgtattacagtggcacaatctcagctcactgcaaactctgcctcccgggctcaagcaatcctcctgcctgagccaactgagtagctgggactgtaagcatagaccaccatgtgcccagctaatttttgtagagacagggtttctccatgttgcccaggtacgtctgaaactcctgggcttaagtgatccacccacctcagcctcccaaagtgctgggattataggcatgagccactgtgcccggcctcctccttgttatgatcaaattagactgtgcctggttgggtggtaagatcactctgaaagaaagctcactgtgaagagatgaaaggtggaggcagagctgtgaggtcatggggaaaagcctgctttccttataagtcctgctgttcatgttggaataaggatctgctcttccttgtttccatgcattttgcaggattccaggtaccattaccacactcttctgacccatgaaaccaactggctgctcacacatcaccaaacaggttgggggttagccttcagcacaggtggatacatctgggattcactgagattcctgccctctcctgcttcctagtggtttgggacaggccctctgcccatcgtcagcagttttttgctttcatacaaacctggaaggcactggcatctgcctaggaaagtggatctgtgaagaacagatgaactcaatcctttctggagtctgacaaagaagggataggcttccttgacattgcctgtcctgacaaggcctccctgacattactcctccaatttcacagttaccttctgtaaatctattttctcatctactgaatagaatcaggcgccctttttgtcttcccacctcttatctcttggcaattttaaggggaattaatgcaagaacaactttagtgtctcttgggaaaacaagccaaccaaatacaaaacccattaagcctactagggtgagtcctcttaacatgggaaggcgatgattatgcaaacaccagagttccctcctcttcagttcctaagaataaagaacaggtatcaagaactttctttaaagttagtgtaactatagttaacaaagtatccattgaagtttagtgcctgtaggactgagccagtgctttatcaacccaacacatcatcaccatgtgcatactctagaaaaaaaaatagcttccttaaaagttacagaggctcttaacgtgttaaaaccgaaaaatcacatttttcttgatttcaaatatgttctacggccttactgttgggatgatatttagtatgtaacttagcattccaatttctcaagaatttttaggccgggtgcggtggctcatgcctgtaatcccagcactttgggaggccgaggtgggcggaccacgaggtcaggagatcgagaccatcctggctaacacggtaccccgtctctactgaaaatac

SEQ ID NO: 1215 - DNA, 2062 bp, Homo sapiens
ccgcccggggcaagaggagggagaaggcagggccgtgactatgagggcggaggagagaagtgcggctgtgatctggggaaggagggaaacccaaggatgccagcacgtgcggttgaggtgagaagggatcttgcagaacgcttccaggacccagattcgtatgcacgccctgcccagctggtcagcctcagtttccccatctgtcagtctggacagtgacgctcccagcgtccggcgaagccccgctcttggcccttggtccctccgcctgatcacaagagggtgccgcgacggccggggacgggtctggcgtgggcagggacctctccgaccctcattgaggaaagaatggcggaacccgaaaaccgggccctggcgtccctcctgcaaggtggggaggagagctggacggcaggatttgggaagggcttggggagcagggccccctgagggtggcgggggaggcagtgctaccagaaccatggttcggttggttcagccgcctggacctcatctgctccctgaggttggtctttgctccgcaccctggtgcggcctggtacacagaaggcgctcagtaaacacttgtggatgaaggaaaaagagaatttattgtcgtcgatttacagaaaacagaatcaaaggccgtgccgtgctgggccctctggcacccggcttcacaagcacccaggcctgccaggaggagcaagtccggggccgaagtgccaaggggcagggtgtacagcagtgatggggtgggcagagagaggataggagggcacaactccagctctgaagaagagaaagaggagattggctgaggctgggcaagggtgggaggcgtccccctgggtggtgtcaggcagcctctttgtttgaaagcagtggataggcaggcagacattgggcaccaaggtggtaatcagcagaccagatgcccagcaactcctaggctcagtcatcagcctcattttactgcaagagagaatgaggcccctggctccaagctggtagagtgcagaagccacaaaagcacctaggagcgagctggttaagacggagaatgcggccagccccacccaatacccccagccccacccctggcctccccaggtcctcctgtatttgtgcaggctatgccactggcctcaatgccagctcctgagcatcctttaggatacagctccctcctccaggcagccttcctggtctaccctcaggcacagaacatcctctccctcttctgtgcaacaccaggcaagggcccctttctgactcccctgcttggcccgtctgggtcagaaataccattgcacacccccactcccctaggttgggtgggagagggaagcaatgaggaggatctctgagaccctatggtaggcagaataatggcctccaaagatatcccggtctgaatccctggaacttgtgaatcttttacctgacaccacaaaatggactttgcaggtgtgattaaattaatgatcatgagatggggagactatcttggattattcgggtgggcgctatgtacttgtagtgtccttataagtgaaagagggaggtaggagggtcagagagatctgaagatgctgcactgctggctttgaaggagccaggagccaaggaatgcagccctagaagctggaaaaactaatgaaatgaattctctcttagagcctctagaaagaactagccctatgggcaactcaactttagcccagtgaaactgatcgttgacttctggactgcagaactgcaagataagaagtgtgtgtttagccaggcatggtggcccatgcctgtaatcccagcactttgggaggctgaggtgggtagattacttgagaccaagagttcaagaccagcctggccaacatggtgaaaccccgtctctattacaaatacaaaaagccgggtgtggtggcgggcgcctgtaatatcagctacttgggagactgaggcaggagaatgatttgaacctaggaggcagaggttgcagtgaaccgaggttgcgccactgcactctagcctgggctacagagcgagactctgtctc

SEQ ID NO: 1216 - DNA, 3246 bp, Homo sapiens
ggcttgttggtcacaggcatcccagaggactgtgggcaggcagaaattgaggagaccttgaatggggtcctctccccactgggcccgtaccgcgtgctcaacaagatttttgtgagggaagagaatgttaaagctgccctcattgaggttggtgaaggtgtgaatctgagcaccatcccccgtgaattcccaggaaggggtggtgtctggagagtggtctgtagagaccctacccaggatgccgagtttttaaaaaatctgaatgaattcctggatgccgaggggcgcacctgggaggatgtggtccgcctgctccagctcaaccaccccaccctgtcccagaaccagcatcagcccccagagaactgggcagaagctctgggggtgcttctgggagcagtggtgcagatcatcttctgcatggatgccgagatccgcagccgggaggaaggtgaagaaagaaccggggcttgcagcagaggtgggttctgccttaaaggcagagacccccaacaactggaatgccacggaagaccagcatgagcctaccaaacctttggttcgcagggctggagctaagtctcgctccaggagaaagaagcagaagaagaactccaggcaggaagcagtgccctggaaaaaacccaaaggcatcaattccaacagcacagctaacttggaggatcctgaggtgggtgatgctgaaagcatggcgatctcagagccgatcaagggcagcagaaagccctgtgtgaataaggaggagttggctttgaagaagcccatggcgaaatgtgcctggaagggtcccagagagccacctcaggatgcccgggcagaagccgagagcccaggaggcgcctctgagtcagaccaagatggtggccatgaaagcccaccaaagaagaaggccgtggcctgggtgtctgccaagaaccccgctcccatgaggaagaagaagaaggtgagcttgggccctgtctcctacgtcttggttgactcagaagatggcaggaagaagccggtgatgccaaagaaagggccaggctcaagaagggaggcatcagatcagaaggcccctcggggccagcagcctgccgaggcaacagcctcaacctctaggggtccgaaggccaagccagaaggctctcctcggcgtgccaccaatgaatccagaaaggtttgatctgggggaccacccatactgaggagttgaaagaacaaggaagacgtaccaagtcaaccaagttctctcttgtcactgaataagactttggactctcttagggcccctgttgatagagatctggccctgaggtaaacgataggtgaggtcttgggtgggagggagttggggaagggaggtggatctctatgcccttttctctaccaggcctgccgtttcaccgccttctctactcaccttctcttcggaggcaggagagttggtaagaggattgggaaaattctagaacattcattcccctttatgcatgagcagggtcactgttacactcatccatgttcagcttttctcccccacgccttgctccctcctcggaatggtcagcgacctctgcaggccctggcatttggaagagctgggtggccctgccatattcttcctcccgccttcctcttgtgtaaccagcggggtaagttaagccaggaccttcgctgcaaacctggttttattgctccttcagtctccagcttccatcctccagttatctagccaggaggtcccaagagttagttttagggaaaaagaatgtctgcctagacctcaaagtctttgagttttagagtctgttagtaaaaatggcactttgattcccatttgggatgagccctctcaggaatcctgtggggaaggggggtgattatagggaaggacgcaggcattcctaggtccccagctctaattccatccatctacccaactgtcaccatctttgcaccaaactgtcaccatctttgcagcagaaggtcactactcacattatagtaagaggggaaaaaaatcttttaaaacttggctgttggccgggcacggtggctcacgcctgtaatcccagcactttgggaggctgaggcaggtcgatcacgaggtcaggcgtttaagaccagcttgaccaacatggtgaaaccccatctctacaaaaattagctgggcgtggtggcgcgcgcctgtaatcccagctactcaggaggctgaggcagatgaattgcttgaatccaggaggcagaggttgcaatgagccaagattgtgccacggcactccagcctgggcagcagagtgagactctctctcaaaaaaacaaaacttggctgttaatgtctgccctctgaattcagacacactatattagaccagaccaccatgtgtcattgtgtgtgtgtgtgtgtgtgtgtgtttgcgtgcgcatgtgtagaggagagagcagggtccctgagataatggtttccaaactgtatcgtagccgtccacaaagatgtaatccaaatctatttttctcacgtgtttaaaaaactgaaaagtgactactcagatatgttggaagtcacatcgaagactatcagaatattaccttgtgttcataggttaacttgtttttgtacacgtcttagttatttcaggcatctctttgcttaaaattgagtttcttgtaaatgtgactgatgagcgaggttagaagtggaagaaattcctgtgcatgttctataatctgacaccctgaaagcaagtttcctttcgtcattcacatgctcttgttctgccgtgactgttcaggtgtatggtagtaagtaaatgtattaacatggtgaacagtagtaatattctatcatagagtattagcccttgcaagttttcagggcgtcttttccgacttcagtttttgtgataaagaatgtgaacagttgttagatgttctcagtgattcaactttaaaacaaatttctcgtgatgattcatttcaaaatcctgagtgagtctgactgaaaaatacgagagaaaagagagtggtttccgtttgcagctacacagctgtgtgcatcgacgttctcctggggtgtgtgccaagcgaaacccaggggtgaattggattcttgaagagaccaaagcctgtaactgtccagcttctaatttcaaaacgggtccattagggcttcgttgtgttaacaagttgacaccatgactagtaaatgtaaacgtgtatgtataaaataaagtttagcaaatt

SEQ ID NO: 1217 - DNA, 2008 bp, Homo sapiens
gtcgctttaaggcggaggcccgggagggggccgacccggctcgccagctccacgctcggctccagactccggcatttcctccccgctagctggcgcggcctcgcctccccctcggaagaggaaactcccggggtccgagtaacagggtcaggcgcggagaggagcggcgggagagccaggagggccgcccaggctatgtcctcctgcgctgtcgccacgctgtccggcagcgcttcctgcccgggtctccccgtctggagggtcacgccgccttctcctcgagacacttccgagagccgggcctcagcatcctgctggagagttactacgagcatgaggtgcgcctgtctccgcacgtgttgggccacagcaaggcgcacgtgagccggatcgtgggcgagctggtgcgggctggccgcgcccgggggtcccccggtctcattcctgggggagcgctggccttggccttccgcggagacttcatccaggtgggcagcgcctacgagcaacataaaatccgccggcccgacagcttcgacgtgctggtgccactgcgcctcccgccgcttgtggcgctggagccacggagcctgggcgaggagccagcgctggccccggccttccgcggctgcttcttgtgcgccctcaaggcaccaccctcaccatcgggggcctcggggggccactggcttcgggactgcaaaccctttgctgatgccttctgcgtggatgtgcgcgggcggcgtcacctctctgctactctggtgctgcgctggttccagtcgcatctgcagcgctccttggccactgtgcgttacagcctggaggggcgctgtcgggtcaccttgaccccaggtggcctggaacagccccccaccttacacatcttgccctgccgcactgactacggctgctgccgcctttctatggctgtgcgtctcatccccgctgtccatctgggagatggggtcttccttgtggcgccaccaccgccacccttgcccagcgcgcccctgttggagctccctgagggcctgcgtgcggaggcactgtggggtgtgaacacagcacgccaggagcagaagctgctgagttggctgcaggaacgggcagctccaggtgcctgctacctcaagtgcctgcagttgcttaaggctctgcgcgatctgggggcccgtgggctggactcagcggccgccacccagtggggacgcatcctatcctcatatgtgctcaagacagtgctgctggcagtgctgctgcgcaagggggcccctgggcaaggctgggacgaggagcacctgggaaggtgtttggaggagttggtgcagttccttagggactgcctgctgcgacgccatacgctcttccactgcgtcctgggccctggtggggcggctgccgaggtgggtcccctgcccaaggcactgagggaagccgccccagttgacctcctggccgctttcgacgggcacgcccgggaacttgcagcagcgcggttgctgtccacgtggcaaaggctgccccagcttctccgggcctacgggggtccccgctaccttgccaggtgccccccaccccggagtcagcgcacccagggcttccttgaaggtgaaccgtaaaccctgacagcacccccacctgaccaaatgctcctaaagcctttcccactgggtgggggtgggaatggcggtgaagccagttaaatgcaagattgcagaaggcattggaaaatttggtggctgccacaagctttagtggcttaaatatcaccttctcgcttcacagtccagtataatatgacatcttcacacccactagagtgtcctgggcaaaccatgggaagacatccaacaggagacccaagaattggttcaaatattgttctgtgtagacggattctgtagaaggatgtggcttttagagaagtccagtagaagaagcaagaactagctgcagggaaagttccttctgtcggtttttagacacagatctctctgcccaaatt

SEQ ID NO: 1218 - DNA, 2020 bp, Homo sapiens
gtccgcagggagatttatgacaaagtccagttttcaacaatgctgaaatcaaatgattgcctgttttctttggaaaatttgttttttgaaaaaccagatgaagttgaaaaccatccagacaatgaaaagtcattggattggtttctccctcctgctccattgatttcagaaattccagatactcaggagttagaggaagaattagaaagtcataaactgttaggtcaggaaaagaggccaaaaatgttaacatcaaatttaaagataactaatgaagatacaaattatatttcactaacacaaaaattccagtttgcctttccttctgataagtatgaacaggatgatctaaatttagaaggggtaggtaataatgacttaccacatgttgctggcaagctgacatatgcttctcagaaatataaaaatcacattggcactgagatagcacctgagaagagtgttcctgatgatacaaaattagttaattttgcagaagataaaggagagagcacatcagtattccggaaaagattatttaaaatatctgacaatatacatgggagtgcttattctaatgacaatgaattggactctcacattggctcagtgaaaattgtacaaacagaaatgaacaaagggaaatcaaggaactatagcaatagtaagcagaaatttcagtattctgcaaatgtgtttacagcaaataatgctttttctgcttctgaaatcggagaaggcatgttcaaagcaccatctttttcagttgctttccaacctcatgatattcaagaggtaacagaaaatggtttaggttccttgaaggctgtcacagaaattccggcaaaatttagaagtattttcaaagaatttccatatttcaactatatacagtccaaggcctttgatgatcttctttacacagataggaattttgtgatttgtgctccaactggttctggaaaaactgtagtgtttgaactagctataacaagattgttaatggaagtaccattgccatggttgaatattaaaattgtttacatggcaccaataaaagccttgtgcagtcagcgttttgatgactggaaagaaaaatttggaccaataggattgaattgtaaagaacttactggagatacagtaatggatgatctatttgagattcagcatgcccatattattatgacaactccagtaggaaaaatgggatagcatgactaggaaatggagagacaactctttggttcagctggttcgactgtttctcattgatgaggtacatattgtaaaagatgaaaatcgtggtccaactcttgaagttgtagttagcagaatgaaaactgtacagtctgtttctcagactttaaaaaataccagcactgctattccaatgcgatttgtagctgtatctgcaacaattccaaatgctgaggatgtgagttacaattttaactgagctcttaggttttttatgacttgtgaaatatttagtcatcttgatcatagagaaaagtgaatttttttgtcctttcctttaataggaaagtatgttgtagaaagttgtggctagatctcataaatataacagtattaaggccataaaatttggttaatcaggtttaataaaacattttttgtggacatgtggacatctcgtttgctagtatctaacagtcttagtttcctgggtttcaggtgcctcatagtaacttcactaacaatatgtgatggttgttgtaactagctgactctaattgtatagcaaagtatggtggagaataaaaataattgcttagatgattaccacttgctcctcaattctgtatgcttggcattgtggtaagcactaaatatagatgcaaaagtgaaaatacatggactccgtccttgaggaggatctcatggttaatggggtacatggacatgtaaagaaataatcatgtgcactattatactttccataatgaatatatgacttaattttttcttcaatttttaagtaaacgtcttgaaaaat

SEQ ID NO: 1219 - DNA, 3215 bp, Homo sapiens
ctcctcggcgcagccatcctcttggctgccgcgggcggcaaagcccacggcatctgccatttgtcattcagcccgtcggtaccgccccgagccttgatttagacacggctggggcgtgctctggcctcactctccgggcgggtgctggacggacggacggacggggcagccgtgctcacagctcagcagcgcggggccttggcgcgcggggcgcttccccgggtcgccgtcatggccgcggaggtggcacgcccgagcggcctcgcctgagctccgggggtcgtcgccccgcagggattgctgtcacgtctaatgtggctgctgcctcgtgtcacatctgaaactcatctgtacctcacttagaaagtcgacagaaacctaatgggaccatttaagaattccaaacaggcaagtgacaggaacatatttgcatgttagaagaatcagcctggcagcagcattgtgattagaatgaaggggaaccatccaaaaacagactggggaaccaatatggatctgcctctagcatgcggaaatatctctctacactgacctaactgactcactaagcttgtggtttgtttaaaggaagccacatgaaaattgagtttgggccaatagagtgaactcgttctccattctctagcatccctccccatgcaaccaccctatccctgccaagtttctgggcaccacagattggaaagtagcctcctgtatttgcataggaatcagaggagttaatcttgtttgaatcttcagacaaacttctgggaggactcggtccctgcctcgcagcagatgttccctgtcactcagtagccaatccgggggacccaggacatgccccagctatagtgatgcagattacctttctgctcctgaatcgcacctgtgcctcagactttctcccctcagcttgagactgcatgtaaactgggatgtgtgaaagcaggaagcaaagctagtgacagctgagaggtccatgtctgggtagaaccaggcccacgatgctgcctctcccgtggtctggagttcagctgcagggactctgctgatgtgcccagcaccatcgttctgtttgtgcttaaatggcacagcatttggtcagcacatctgaaaaggaaggtgtgagaagcaaagcccatggccacgttcccctgccagttatgtggcaagacgttcctcaccctggagaagttcacgattcacaattattcccactccagggagcggccgtacaagtgtgtgcagcctgactgtggcaaagcctttgtttccagatataaattgatgaggcatatggctacccattctccccagaaatctcaccagtgtgctcactgtgagaagacgttcaaccggaaagaccacctgaaaaaccacctccagacccacgaccccaacaaaatggcctttgggtgtgaggagtgtgggaagaagtacaacaccatgctgggctataagaggcacctggccctccatgcggccagcagtggggacctcacctgtggggtctgtgccctggagctagggagcaccgaggtgctactggaccacctcaaagcccatgcggaagagaagccccctagcggaaccaaggaaaagaagcaccagtgcgaccactgtgaaagatgcttctacacccggaaggatgtgcgacgccacctggtggtccacacaggatgcaaggacttcctgtgccagttctgtgcccagagatttgggcgcaaggatcacctcacccggcataccaagaagacccactcacaggagctgatgaaagagagcttgcagaccggagaccttctgagcaccttccacaccatctcgccttcattccaactgaaggctgctgccttgcctcctttccctttaggagcttctgcccagaacgggcttgcaagtagcttgccagctgaggtccatggcctcaccctcagtcccccagaacaagccgcccagcctatgcagccgctgccagagtccctggcctccctccacccctcggtatcccctggctctcctccgccaccccttcccaatcacaagtacaacaccacttctacctcatactccccacttgcaagcctgccctcaaagcagatactaaaggtttttgcaatatcagtttgtttgaggacttgcctctgcaagagcctcagtcacctcaaaagctcaacccaggttttgatctggctaagggaaatgctggtaaagtaaacctgcccaaggagctgcctgcagatgctgtgaacctaacaatacctgcctctctggacctgtcccccctgttgggcttctggcagctgccccctcctgctacccaaaatacctttgggaatagcactcttgccctggggcctggggaatctttgccccacaggttaagctgtctggggcagcagcagcaagaacccccacttgccatgggcactgtgagcctgggccagctccccctgccccccatccctcatgtgttctcagctggcactggctctgccatcctgcctcatttccatcatgcattcagataattgatttttaaagtgtatttttcgtattctggaagatgttttaagaagcattttaaatgtcagttacaatatgagaaagatttggaaaacgagactgggactatggcttattcagtgatgactggcttgagatgataagagaattctcgaactgcatgtattgtgccaatctgtcctgagtgttcatgctttgtaccaaatttaatgaacgcgtgttctgtaatcaaactgcaaatattgtcataaccaacatccaaaatgacggctgctatatataagtgtttgtcatatggaatttaaccgtaagccatgatcataatgttaactaaataactttatgtggcactgcctagtaagggaactatggaaaggtttggatttctccaaatctgggagaattttcaaaataagaaaataacctttatatgatatactatgactaggctgtgtatttcttttcagggatttttctaccttcagggttggatgtagtttagttactattaccatagccaacctgtagttttacatatacattttcttgtggagcaatagagttctccattttacagaagcattttaaatgtagtttgaatattttccacaagatgctgcaatgtgagttatcacttcatttatcttaaagaaagactaaactggttgtcagttacatctgac

SEQ ID NO: 1220 - DNA, 2927 bp, Homo sapiens
atagcaacggtagctagctgcagggccagtggcacgctaggccatgtctggtccaactgatgagactgcaggagacttgcctgtgaaagatacaggtctaaacctctttggaatgggagggttacaagaaacttcaacaacacggacaatgaagtctcgccaggcagtgtcacgtgtcagtcgtgaggaactggaagacagatttttgcgtttgcatgatgagaacattttacttaaacagcatgcccgcaagcaggaggataaaattaaaagaatggccaccaagttaatacggctagttaatgacaagaaaagatatgagcgggttggtggcggccccaagcggctgggacgagatgtggaaatggaagaaatgattgagcagctgcaagagaaagttcatgagcttgaaaaacaaaatgaaaccctcaaaaacagactgatttcagccaaacagcaacttcaaacccagggttacaggcaaactccatacaataatgtacaatctcgtattaacactgggcgtagaaaagcaaatgaaaatgctggtttacaggaatgccccaggaaaggtataaaattccaagatgcagatgtagcagaaactccacatcccatgtttacaaaatatggcaacagtttacttgaagaagccagaggagaaataagaaatttagaaaacgttattcagtcacaaagaggccagatagaggagttagagcacttggctgagatcctgaaaactcagttgaggagaaaagaaaatgaaattgagttatctcttcttcagcttcgagaacagcaagctacagatcaaaggtcaaatattcgggacaatgtagaaatgattaagcttcataaacagctagtagagaaaagcaatgctctttcagcaatggaaggaaaatttattcagcttcaagagaagcaaagaactctcagaatcagccacgatgctttgatggcaaatggggatgaattaaacatgcaacttaaagagcagcgtttaaaatgctgcagtcttgagaaacaatcacattctatgaagttttctgaaagaagaatagaagagctgcaggatagaattaatgatttagaaaaggaacgggaacttttaaaggaaaactatgataaactttatgacagtgccttcagtgctgcccatgaagagcaatggaagttaaaggagcaacagctgaaagtgcagattgctcagctcgagactgccttgaagtctgacttaacagacaaaactgaaatccttgacagattaaaaactgaaagagatcaaaatgaaaaactcgttcaagagaatagagaactacagttacagtatctggaacaaaagcaacaacttgatgaacttaaaaaacgcataaaattgtacaaccaggagaatgatattaacgctgatgaattgagtgaagctctcctacttataaaggctcaaaaagaacaaaaaaatggagacctttcctttttagtgaaagtagatagcgaaattaataaagatctagaacgctctatgagagagctgcaagcaactcatgcagaaacggtgcaagagctggaaaagacaagaaacatgctaattatgcaacacaaaattaataaagattatcagatggaggttgaggcagtgacccgtaagatggaaaatttgcagcaagattatgaactcaaagtggaacagtatgttcatcttcttgatatcagggctgcacgtatccataaactagaagcccaattaaaggatattgcctatggcaccaagcagtacaaatttaaaccagaaatcatgccagatgactctgttgatgaatttgatgaaaccatccacttagaacgaggcgaaaatctatttgaaatccatatcaacaaagtaaccttttcttctgaagttttacaggcatctggagataaagagcctgtcactttctgtacctatgctttctatgattttgaactacagacaactcccgtagtgcgaggccttcatcccgaatataacttcacttctcaatatcttgttcatgttaatgacttatttttgcaatatattcagaagaatactatcacccttgaggtccaccaggcttatagcacagaatatgaaacaattgcagcatgtcaattaaaatttcacgaaattcttgaaaaaagcggccgaatattttgtacagcaagtttgattggaacaaaaggagacatcccaaattttggcacagtggaatactggttccgattaagagttcccatggatcaagcaattcgactttatcgagaaagggcaaaggctttggggtatataacatcaaattttaaggggccagagcatatgcagtcgttaagtcagcaagcacccaaaactgctcaactcagttctacggattccacagatggcaacttaaatgaacttcacattacaataagatgttgcaaccacctgcagtcccgagcaagccacctgcagccacacccatatgttgtgtacaagttttttgattttgcagaccatgatacagctatcattcccagtagcaatgatccacagtttgatgatcatatgtatttcccagtgccaatgaatatggacttggatcgataccttaagtcagagtctctgagtttttatgtttttgatgatagtgatacccaggagaatatttacataggaaaagtcaatgtgcctctgatttcgttggcacatgacaggtgtatctcaggaatatttgagttaacagaccatcaaaagcatcctgctggcaccatccatgttatattgaaatggaaatttgcttaccttccaccaagtggatcaataacaactgaagacttaggaaatttcattcgcagcgaagagccagaagttgttcaaagacttcctccagcatcctctgttagcacactagttttagcaccaactt

SEQ ID NO: 1221 - DNA, 3219 bp, Homo sapiens
tttcataaacaacaacggatttatgaccctttccccatcactgagaggaggcagctcttacaccggcgccatcttaccaccgaggccgccccgacttggggcctcaggttttacagacccttttgggccaggttttactaaaagagccataagaagcgggcccagcccaggcaggagactggagacgaggtcttgcaggcggaactcaggatgctctgagctgcccgcacaacccctggaccttcacccctcgccccttccccgcatccagctgccccagcccctgcccaggctgcgtagcctagcgggggtctgcggtcctagcccctccccgcgccacctactgcagtgccggaccctggggccccctcgcctggtctgcaggcggggtggggaccttaaatcccatttcctagcctggggctgggttcagggcgcatgcgaatccggaatcagctctgggtaatgcccctttccaagcccactgctcagccttagaggaaagtgtggatttgaaatttcctcatggaattgatggaggtttttaggtagattcatagaatataacgtatctaccaaagattccgttttcaagggatctagaagatgttagtgcacacgcaaaaaccagacaaacgtctctacacggataaaggcacatatacaattatgcacacagggaagggcatacactctattgtgggcacagaatgacatgcaattatggacacacaaaaacacatgcacccaattatggacaccaaaatatatacaattgtggaattaggtaaaaacacacacacagaaatacatacacagaaaaataagcacatactcatacaaatacacacataaaaatacattaaaaagatacatgacaccaatacatgggtacccaacacttggaccatcacaaggacagccaccccacttttgcttccccactgccccctgccctccagccatactcacctcccctttcccagtcccctctggataaggcagtccacatttttctttgtcaccacgcatctttattttcggttacataaaacacagctgggctgggaagtgtgccttccctgaaccccaggatggagctgagcagggtacaggacaacacaggagatgaagggcattgcggagggcattggacctccccacccactacagttaactcaagacaacataccatgctacaaagtcaccccattaacacatcctttccaagtcaagacactgccttacaaatgaactccaagactatagaaatgataaaaaaaaatcttgttcaaatatacagtatctgctattataggaaacatcagggcgtacatatttaacacagctgaacagtaagatacaggagccagaggaaaggacagcgaagctggaagcatctccacagtcctgctaagcagaagctaacccacagatctgcagccagctcaggaacattcccctccagaagtgggggttgatgggcctgagctgtgggtgccaagccagagaaggagggattgattctagggtgcaagcacttaggatgctttttggaataaatatattatttttcgatttaaatagatgccaataccctgatcctggacctcagcacattctcagggcagcctcagggaccccaaaagctgcgggctgtaagcagcaggggacttgcctgggagcagtcggcactaggtagcaggcaagccagccagcacaaaataggtagttttaggggagtaggtagtagtgagattcactttcttgcgggtctgggagggtggtgctgggtgtctgccagtgttgggatacatagggacttcctgggaatggaggccctctggggctggatacataggtagtttgggggtgcctcgagcagaggcctgtgctaggtagtattttggacgcgccagagcagggccggctggcctggggttgggggtgtcttttggggtcctcggaggcagagggaatccaaggcgacccagtctctgcggccgctcagtccacaaaagttgggagctggagtaggtgatgggggtgggtagagtgcaggttggggactgggttgcttttttgtttttgtttttgttttttacattttcttttatttttcccatttttgtaagtaaaaccagtgagtctcttaaagacgcttttccgactgtccggtgcagagagggccccggatcggcccctcattcctcctcgtcttcctcttcttcatcatcgtcctcctcgtcggccttgtccgcggcagcagtggcggcggcagagggcacggcgccctcgggagctgcggcggcagtcggaccttcgtccttatgctctttcttccacttcatgcggcggttctggaaccagatcttaatctggcgctcggtgaggcagagcgcgtgggcgatttcaatgcggcggcgccgcgtcaggtagcggttgaagtggaactccttctccagctccagcgtctggtagcgcgtgtaggtctggcggccccgctccctgtcaggtcctgagaacagacatgcagacacatgaacacaaggacagacaagtagacagggcactcgttaggctgctgtcccagagcccgcaccttcctcctggcctagtccccagcgagcatccccctctgccccaggccccgaactgagctaggggaggagggggagtgttagggaaagaccccaactgcagtgccagacgcgcaggcagctctgtaatgagcaaaggcacagaatctcaactttacaaccgacctttccagccggctaagcttccacaatgtcctgcttcctctgacaaaggaaaactgtaaatatagagtgtgagcaagtgggaaacgctgcacttttgccattcaaagatgagcccggccattcccctgccttgctaggcaagtgggcgactcttcccagcagcctgagccctcatccccaggaccttcctagggcaccccgaccctctgtcctcattccctcgcccccatcttgaaatggaccctggcacagggtcgggtgagaggccctggagggcttggctctcctagcttttgagaaagaaatgtcaggcagcaaggaaaatgaggagagagagaagaagaaagggagggagggtgacagaggagggagaaagagagacagaatagcgaacaaacttaatgttaaaattccaagacaaatggagttaaataaatttacgaggatcgaaccc

SEQ ID NO: 1222 - DNA, 3859 bp, Homo sapiens
gtgtgtcgccatggcggcggcagcggcgacgagaacggcgagcgaggggtcgagcgcggccggggcctgaggaggctacgcgaccatggtggcacgcagcactgacagcctggatggcccaggggagggctcggtgcagcctctacccactgctggggggcccagtgtgaaggggaagcctgggaagaggctctcagctcctcgaggccccttcccgcggctggctgactgcgcccatttccactacgagaacgttgactttggccacattcagctcctgctgtctccagaccgtgaagggcccagcctctctggagagaatgagctggtgttcggggtgcaggtgacctgtcagggccgttcctggccggttctccggagttacgatgactttcgttccctggatgcccacctccaccggtgcatatttgaccggaggtcctcctgccttccggagcttcccccgccccccgagggtgccagggctgcccagatgctggtgccactgctgctgcagtacctggagacactgtcaggactggtggacagtaacctcaactgcgggcctgtgctcacctggatggagctggacaatcacggccggcgactgctcctcagtgaggaggcgtcactcaatatccctgcagtggcggccgcccatgtgatcaaacggtatacagcccaggcgccagatgagctgtcctttgaggtgggagacattgtctcggtgatcgacatgccacccacagaggatcggagctggtggcggggcaagcgaggcttccaggtcgggttcttccccagtgagtgtgtggaactcttcacagagcggccaggtccgggcctgaaggcggatgccgatggccccccatgtggcatcccggctccccagggtatctcgtctctgacctcagctgtgccacggcctcgtgggaagctggccggcctgctccgcaccttcatgcgctcccgcccttctcggcagcggctgcggcagcggggaatcctgcgacagagggtgtttggctgcgatcttggcgagcacctcagcaactcaggccaggatgtgccccaggtgctgcgctgctgctccgagttcattgaggcccacggggtggtggatgggatctaccggctctcaggcgtgtcttccaacatccagaggcttcggcacgagtttgacagtgagaggatcccggagctgtctggccctgcattcctgcaggacatccacagcgtgtcctccctctgcaagctctacttccgagagcttccgaaccctctgctcacctaccagctctatgggaagttcagtgaggccatgtcagtgcctggggaggaggagcgtctggtgcgggtgcacgatgtcatccagcagctgcccccaccacattacaggaccctggagtacctgctgaggcacctggcccgcatggcgagacacagtgccaacaccagcatgcatgcccgcaacctggccattgtctgggcacccaacctgctacggtccatggagctggagtcagtgggaatgggtggcgcggcggcgttccgggaagttcgggtgcagtcggtggtggtggagtttctgctcacccatgtggacgtcctgttcagcgacaccttcacctccgccggcctcgaccctgcaggccgctgcctgctccccaggcccaagtcccttgcgggcagctgcccctccacccgcctgctgacgctggaggaagcccaggcacgcacccagggccggctggggacgcccacggagcccacaactcccaaggccccggcctcacctgcggaaaggaggaaaggggagagaggggagaagcagcggaagccagggggcagcagctggaagacgttctttgcactgggccggggccccagtgtccctcgaaagaagcccctgccctggctggggggcacccgtgccccaccgcagccttcaggcagcagacccgacaccgtcacactgagatctgccaagagcgaggagtctctgtcatcgcaggccagcggggctgaactgctgggggctgggggagcacctgcctcagccaccccaacaccagctctcagccccggccggagcctgcgcccccatctcatacccctgctgctgcgaggagccgaggccccgctgactgacgcctgccagcaggagatgtgcagcaagctccggggagcccagggcccactcggtcctgatatggagtcaccactgccaccccctcccctgtctctcctgcgccctgggggtgccccacccccgccccctaagaacccagcacgcctcatggccctggccctggctgagcgggctcagcaggtggccgagcaacagagccagcaggagtgtgggggcaccccacctgcttcccaatcccccttccaccgctcgctgtctctggaggtgggcggggagcccctggggacctcagggagtgggccacctcccaactccctagcacacccgggtgcctgggtcccgggacccccaccctacttaccaaggcaacaaagtgatgggagcctgctgaggagccagcggcccatggggacctcaaggagggggctccgaggccctgcccaggtcagtgcccagctcagggcaggtggcgggggcagggatgcgccagaggcagcagcccagtccccatgttctgtcccctcacaggttcctacccccggcttcttctccccagcccccagggagtgcctgccacccttcctcggggtccccaagccaggcttgtaccccctgggccccccatccttccagcccagttccccagccccagtctggaggagctctctgggcccccctgcaccactcgacaggggagagaacctgtactatgagatcggggcaagtgaggggtccccctattctggccccacccgctcctggagtccctttcgctccatgccccccgacaggctcaatgcctcctacggcatgcttggccaatcacccccactccacaggtcccccgacttcctgctcagctacccgccagccccctcctgctttccccctgaccaccttggctactcagccccccagcaccctgctcggcgccctacaccgcctgagcccctctacgttaacctagctctagggcccaggggtccctcacctgcctcttcctcctcctcttcccctcctgcccacccccgaagccgttcagatcccggtcccccagtcccccgccttccccagaaacaacgggcaccctggggaccccgtacccctcatagggtgccgggtccctggggccctcctgagcctctcctgctctacagggcagccccgccagcctacggaagggggggcgagctccaccgagggtccttgtacagaaatggagggcaaagaggggagggggctggtcccccacccccttaccccactcccagctggtccctccactctgagggccagacccgaagctactgctgagcaccagctgggaggggccgtccttccttcccttcaccctcactggatcttggcccaaccaaatcccttgttttgtattttcttgaaccccgaccactaccccaggtttctaactttgtaacttgcttctgatgtgggtccctaacctataatctcagcttccctaccctggactgaagggtctgcccatccccccaccaccctccatcctgggggccctcgcacaaatctggggtgggaggggctaggctgaccccatcctcctctccctccaggagcccccagcatgtcctgacctgtgcacggggatggggggacaactcctacccttctttccccacatgccccactaaaccatctgacaacattaatgaataaaatggtgaaaatgtg

SEQ ID NO: 1223 - DNA, 2891 bp, Homo sapiens
aattgccaaagcaggaagtgagctcgtggaagaagcgaaggaggagaagaagaagggaggggaaggcggaggagggcaggggcgcgcagagccacggtttgctccaggcgcgtcggaaccgcaggacttttcatccccgtggtcccacggtcctcccgcgccccggaggcctgccagccccgctcggacgctcgtttgcccctaacccgccgccatggcttcaccggacgaccctctgcgcgcagatcatatggtaaaggaaccagtggaagacacagaccctagcactttatcctttaatatgtcagacaaatatcccattcaagatacggaactccctaaagctgaagaatgtgatacaattactttgaactgcccacgaaattcagatatgaaaaatcagggagaagaaaatggctttccagatagcactggagatcctcttccagagatcagcaaggacaactcctgcaaagaaaactgtacttgttcctcctgcttgctccgggcccccaccataagtgacttgctcaatgatcaggacttactagatgtgatcaggataaagctggatccgtgtcacccaacggtgaaaaactggaggaattttgcaagcaaatgggggatgtcctatgacgaattgtgcttcctggagcagaggccacagagccccaccttggagttcttgctccggaacagtcagaggacggtgggccagctgatggagctctgcaggctctaccacagggccgacgtggagaaggttctgcgcaggtgggtggacgaggagtggcccaagcgggagcgtggagacccctccaggcacttctagagctcttcttcttccttcattggcctctccggatgttgaaacaaccacaggtcaagaaggaatgtgaatctgttgttttataagagtttaggacaaggacgtggaacagtggacactggttttccccaaagctggcagttttgtggaggggtagcttgtttcggtggtggatctctgtttatttttgcacatctgttataatttaatattcaaatctggaattaagaaaacatattttctagtatcctctaagggccaaagtcctacaatcggaatggattcatgccacgttgaagataaaattatcctctctctgaaatacggtaaagatttaaataggtcctgagactgttgatagccccagacatacccacagcattatatgtaacatctcccctgatcagtgccattcccacggtttcaaagaaaacagctacaaggaatgcttacctgagtgtctgcagcaccctccacttctctcctaggcaatgagacccagtggctagaaattcaccatgtctattctcaagatccatgccagggagctctttgactctcgtgggaattccactgttgaggttgatctcttcacctcagaaggtctcttcagagctgctgtgcccagtggtgcttcaactggtatctatgaggtcctagagctccaggacaatgataagactcgctatatggggaagggtgtctcaaagcctgttgagcccatcaataaaactattgcacctgtcctggttagcaagaaactgaacgtcacagaacaagagaagattgacaaacttatgatagagatggatggaacagaaaataaatctaaatttggtgcaaatgccattctgggagtgtccctcgctgcctgcaaagctagtgctgttgagaagggggttcccctgtaccaccacatcgccgacttgtctggcaactccaaagtcatcttgccagtcccggtgttcaatgtcatcaatggcagttctcatgctgtcaccaagctggccatgcaggagttcatggtcctcccagtcggtgcagcaaacttcagggaagccatgcccattggagcggaggtttaccacagcctgaagaatgtcatcaaggagaaatatgggaaagatgccaccggtgtgggggatggaggcgcgtttgctcccaacatcctggagaataaagaaggcctggagctgctgaagactgcgattgggaaagctggctacactgataaggtgatcgtcagcatggacgtagaggcctccgagttcttcaggtctggaaagtatgacctggaattcaagtttctcgacgaccccaccaggtacatctcacctgactgtctggctgacctgtacaagtccttcatcaaaaactacccagtggtgtctactgaagatccctttgaccaggatgactggggagcttggcagaagttcacggccagtgcaggaatccaggtagtggaggatgatctcagagtgaccaacccaaagaggacagcctcggccgtgaatgagaagaagtgcaactgcctcctgctcaaagtgaaccagattcgctctgtgactgagtcccttcaggcgtgcaagctggcccaggccaatggttggtgtgtcatggtgcctcatcattctggggagactgaaaataccttcatcactgacctggtggtggggctgtgacctgggcagctcaagactggtgccccttgctgatctgagcgcttggccaagtacaaccagctcctcagaattgaagaggagctgggcagcaaggctaagtttgccggcaggaacttcagaaaccccccagccaagtaagctgtgggcaggcaagcccttcagtcacctggtggctaattagacccctccccttgtgtcaactccggcagctcaagacccccgagcaacatttgtaggggccgctgctagttagctacccttgcccaccgccgtggagttcgcacctcttccttagaacttctacagaagcaggttgcagtgagccgagattgcgccactgcacaccagtctggagacagagtgagagtccgtcccag

SEQ ID NO: 1224 - DNA, 3457 bp, Homo sapiens
atccaagatggcgtccccaggagctgggagcgggtgaccggcggcggggaagcggcctgggttggccctcagattgcggggtctgggggcatctcgccgggcaaacccttggcccgcctacaaggacttcccccggccagagcaatggccgctgagaacagcaagcagttttggaagaggagcgctaagctgccggggagcattcagcctgtatatggagcacagcatcctcctcttgacccacggctcaccaaaaatttcattaaagaacgatcaaaagtcaacacagttcctctgaagaataagaaggcctccagttttcatgagtttgcacggaataccagtgatgcttgggacattggcgatgatgaggaagaggacttttcctcaccttctttccaaactctgaactcaaaagttgctttggcaactgcagcccaagttctagaaaaccacagcaagctgagagtaaaaccagaacggtcccagtcaacgacatcggacgtccctgccaactacaaggtcataaagtccagcagtgatgcccagctgtccagaaactctagtgatacatgcctgaggaacccactccacaaacagcaatcactccctctccggcccatcatccccctcgttgcccggatctcggatcagaacgcttctggggcccccccaatgactgtccgggagaaaacccgcctagaaaaattccgtcagcttctctccagccagaacactgacttagatgaactgaggaagtgtagctggccaggggttcccagggaggttcgacctataacctggagactcctgtcgggctatctcccagcaaacactgagaggaggaagttgaccctgcagcggaagcgggaggaatattttggcttcattgaacagtattatgactctcgaaatgaggaacatcaccaggatacctacagacagattcacattgacattccaaggacgaatcctctcattccgttgttccagcaaccacttgtacaggagatctttgaaagaattctatttatttgggccatccgccaccctgccagtgggtatgtccagggaattaatgacctggtcactccattctctgtcgtcttcctctcagaatatgtggaagaggatgtggagaactttgacgtgaccaacttgtctcaagacatgctgcgaagcattgaggctgacggcttttggtgcatgagcaagctgctggatggaatccaggataactacacctttgcacaaccaggaatccagaagaaggtgaaggcactggaagagcttgtcagccggattgatgagcaggtacataatcacttcaggaggtacgaggtagaatacctgcagtttgccttccgctggatgaacaacctgcttatgcgagagcttcctcttcgctgcaccatccgcctgtgggacacatatcagtctgaaccagaagggttctcccactttcatctctacgtgtgtgcagccttctgatcaagtggaggaaagagatcttggatgaggaggattttcagggtctcctcatgctgctacagaacctacctacaatacactggggcaacgaagaaattgggctgcttctcgccgaggcatacagactcaagtacatgtttgccgatgccccaaatcactaccgccgataggtgctgtctcctccggggacccagactgccttcatctctgatggcagtctgatcactgtggccactgtgcgagccgtggaccccggccaggaaccactcctgttgtacaaagctcacacccaccgcccaggtcttaactttctggcatccaccactccatgtctctggatgtgtcacttggaccactgtcagtattccatgccgcgtggatgggcccagttctgggagaggacagaaaaggtggtacagggttgtctgcccctttaaaagaaactggacaaagaaggggaaggctcagggtctcacctcacattgtccctacaaggacaggccccaactgataaccgttgctttttttttttgtgaacatagtttgatttgatcacaggtcaaaaacgccttatattttcgaaagactcctggcccctcttccctcttcctggtttcctagccgttccccttctgccccagtctgagccagtgaggggtagctttttaaaaccattattctagatggaggaggcactgatgcttgtaactctggaaagaggcctacacccaagggctaggaattttatttttccttttctcgccaggtgtctgcatgtgtgtgtgggtgtgaatgtgtatacatgcccatcagcatttagtcacatgtctgaatttctgtgtccagacgagccccatcaaactagttgggaagggccccagtgaccaagtgtataagcatcccttgaagagggattggggcaggggaggcagaaggggctctccagaccccttttccatgatgacccactccaagatattatgtgtaaattgtgttattatgtatatgggtaaagatgtacaaatatatgtcctctttgtagcagatatgattttatatttataatgtgcatcaacatgtgaaagcaatctaggtcactagcacagaggaagttgccaggaaggtggcttcagcacctccaggttggttctgggtgtcctgctgtgaggggtagaacgggaggctgccgaagtgagtagctgagcagctggagccatcccaagcatcagtgtctcagagtcctcctcgcccctttcttcaccccgccccccaacccccagactttcctggagcatctgccctttgctcctagcagcctccccaggaagggactgcagaggcgggcaagccctctctatgtgtttttatctccaccttccccggaatctggggagggcttttgtttttacgttttcaagttcagcattgtattcggacagaagctgtgactgaagactcagtgccaaggaaaggggcttcttgtgtgtccctcgggtttggggctcttctcagagagcagcactccatatcccttactgtcaccttcactccccacacagctcatgagatgtgtgacccctgtttgagttttggtatttggtagtggagggtggggggatgggggccagcagctgtcatcctcctgggaagccgagcggtgtccctggtgggtaacaccctcaagtctctttgccagtgaggccccaccacatcggtgtgagttaggtttctcatctggagctgtttcttaggcattcttcccaaccctcttccttttccccttcggtgtgcctcagtggtctccttcatagagtgagagggcttgagaccctccctcaaccggactaattaaagaaagacacttgtgttcccaagtggtggttttatttttttagtttttatgtttgtatgggaaattgtggataaagtgaaaagaattgtaaataaatggtgtatttcctcctcc

SEQ ID NO: 1225 - DNA, 3236 bp, Homo sapiens
gaacgggttcgcgaccgcagccgagagaccccgggcgaccggcacctccgagactcgcgggccacctgcctcgaccttccccggagcgcccccgcctccgagtcgctacttgccgggccgggccgggccgggcgtgatgcgccgcgggacccctgtcctggccactggccgccgccgccgccgccgctgagaccccgagacccccagtgacgccgcagccatggagagcggcccgcgtgcggagctgggggcgggcgcacccccagctgtggtcgccaggacccccccagagccaagaccttctccagaaggtgacccttcccccccaccaccaccaatgtcagccctggtccccgacactcccccggacacccctcctgccatgaagaatgccactagctctaagcagctcccactggaaccagagagcccctcagggcaggtcgggcctaggccagcccccccgcaggaagagtccccttcctctgaagcaaagagcagaggacccaccccaccagccatgggcccacgggatgccagacctcctcgaaggagcagccagccatctccaacagcagtgccagcctccgacagccctcccaccaagcaagaggtgaagaaggcaggagagagacacaagctggcaaaggagcggcgagaagagcgggccaagtacctggcggccaagaaggcagtgtggctggagaaggaggagaaggccaaggcgctgcgggagaagcagctccaggagcgccggcgccggctggaggagcaacgtcttaaagccgagcaacgccgtgcagccctggaggaacggcagcggcagaagctcgagaaaaacaaggagcgctatgaagcagccatccaacggtcagtgaagaagacgtgggccgaaatccggcagcagcgctggtcctgggcaggggccctgcaccacagctctccaggacataagaccagtgggagcaggtgctccgtgtcggcagttaacctgcccaaacacgtggactctataatcaacaagcggctctcaaagtcctctgccacgctctggaactcccccagtagaaatcgcagcctgcagctgagcgcatgggagagcagcatcgtggatcgtctgatgacgcccactctctccttccttgctcggagtcgcagcgcggtcacactgccccgcaacggccgggaccaggccgtgccggtgtgcccgcgctcggcctccgccagccccctgacgccgtgcagcgtcacccgaagcgtgcaccgctgcgcccccgccggtgagcgcggggagcgccgcaagcccaacgccgggggcagccccgctccggtgcgccgccggccggaggcctcgccggtgcagaaaaaggagaagaaggacaaggagcgggaaaacgagaaggagaagagtgccctagcccgggagcgcagcctcaagaagcgccagtcgctgcccgcctccccacgtgcccgcctctccgccagcaccgcctctgagctcagccccaaatccaaggccaggccatcctctccctccacatcctggcacaggcctgcctccccctgccccagcccagggccaggccacactctgcctccaaagccaccgtccccccgaggcaccactgcatcccccaaggggcgggttcggaggaaggaggaggcaaaggagagccccagcgccgcagggcccgaggacaagagccagagcaagcgcagggccagtaacgagaaggagtcagcagccccagcctcaccggcaccttcgccggcgccctcgcccaccccagccccgccccagaaggagcagccccccgcggagacccctacagacgctgctgtcttgacctcacccccagcccctgctcccccggtgacccctagcaaaccaatggccggcaccacagaccgagaagaagccactcggctcttggctgagaagcggcgccaggcccgggagcagcgggagcgcgaggagcaggagcggaggctgcaggcataaagggacaagcgaatgcgagaggagcagctggcacgggaggccgaggcccgggcggagcgggaggcggaggcccggaggcgggaggagcaggaggcacgagagaaggcgcaggccgagcaggaggagcaggagcggctgcagaagcagaaagaggaggccgaagctcggtcgcgggaagaggcggagcggcagcgtctggagcgggaaaagcacttccagcagcaggagcaagagcggcaagagcgcagaaagcgtctggaggagatcatgaagaggactcggaagtcagaagtttctgaaaccaagaagcaggacagcaaggaggccaacgccaacggttccagcccagagcctgtgaaagctgtggaggctcggtccccagggctgcagaaggaggctgtgcagaaagaggagcccatcccacaggagcctcagtggagtctcccaagcaaggagttgccagcgtccctggtgaatggcctgcagcctctcccagcacaccaggagaatggcttctccaccaacggaccctctggggacaagagtctgagccgaacaccagagacactcctgccctttgcagaggcagaagccttcctcaagaaagctgtggtgcagtccccgcaggtcacagaagtcctttaagagggtttgccttggatccgggcacagttgtgagggctcctctgcatcacctaccaggatgtctggaggagaaaaagacagaacaaagatggaagtggcctgggcccctgggggtgggtcctctctgttgtttttaatctgcaccttatagactgatgtctctttggccggagccagatctgcccctcagtgcattcgtgtgctcgcacgcgcagacatcccttctcccccatacacacatatacactcacagcctctctggcctcttcccttggggaggggccacctgtagtatttgccttgatttggtggggtacagtggatgtgaatactgtaaatagcttgtgctcagactcctctgcgtggagagggtgggtgcaggaggcagaccctccccccaaagccccctggggagatcttcctctctctatttaactgtaactgagggggatcccaggtctggggatgggggacaccttgggccacaggatactggttgcttcaggggtacccatgccccctgccctcgcctggaatcagtgttactgcatctgattaaatgtctccagaaataaagaataattctgcc

SEQ ID NO: 1226 - DNA, 2667 bp, Homo sapiens
gcagccggagctccaggtctcctcttcactactctgtgtcctgtgctcctacaggcccagcctctgtggccctgtgacctgcaggtattgggagatccacagctaagacaccaggacccctggaagcctagaaatgggaccattgcaatttagagatgtggccatagaattctctctggaggagtggcattgcctggacactgcacagcggaatctatataggaatgtgatgttagagaactacagtaacctggtcttccttggtattgttgtctctaagccagacctgatcgcccatctggagcaaggaaaaaaacctttgactatgaagagacatgagatggtagccaacccctcagttatatgttctcattttgcccaagatctttggccagagcagaacataaaatattctttccaaaaagtgatactgagaagatatgaaaaacgtggacatggaaatttacagttaataaaaaggtgtgaaagtgtagatgagtgtaaggtgcacacaggaggttataatggacttaaccagtgtagtacaactacccagagcaaagtatttcaatgtgataaatatgggaaagtctttcataaattttcaaattcaaatagacataatataagacatactgaaaaaaaacctttcaaatgcatagaatgtggcaaagcttttaaccagttctcaacccttataacacataagaaaattcatactggagagaaaccctacatttgtgaagaatgtggcaaagcctttaagtactcctctgcccttaatacacataagagaattcatactggagagaaaccatacaagtgtgataaatgtgacaaagcctttattgcatcctcaacccttagtaaacatgagatcattcatactggaaagaaaccctacaagtgtgaagaatgtggcaaagcttttaaccaatcctcgacacttactaaacataagaaaattcatactggagagaaaccctacaaatgtgaagaatgtggcaaagcttttaaccaatcctcaacacttactaaacataagaaaattcatactggagagaagccctacgtttgtgaagaatgtggcaaagcctttaagtactcccgtatccttactacacataagagaattcatactgaagagaaaccatacaagtgtaataaatgtggcaaagcctttattgcatcctcaacccttagtagacatgagttcattcatatgggaaagaaacattacaaatgtgaagaatgtggcaaagccttcatttggtcctcagtcctaactagacataagagagttcatactggagagaaaccctacaaatgtgaagaatgtggcaaagcctttgttgcatcctcaacccttagtaaacatgagatcattcatactggaaagaaaccctacaagtgtgaagaatgtggcaaagcttttaaccagtcctcatcccttactaaacataagaaaattcatactggagagaaaccctacaaatgtgaagaatgtggcaaagcttttaaccagtcctcttcccttactaaacataagaaaattcatactggagagaaaccctacaaatgtgaagaatgtggcaaagcttttaaccagtcctcaacccttattaaacataagaaaattcatactagagagaaaccctacaaatgtgaagaatgtggcaaagcttttcacctatccacacaccttactacacataagatacttcatactggagagaaaccttatagatgtagagaatgtggcaaagcttttaaccattctgcaaccctttcttcacataagaaaatccattctggagagaaaccatacgagtgtgatgaatgtggcaaagcctttatttcaccctcaagccttagtagacatgagataattcatactggggagaaaccctagaagtgtgaagaatgtggcaaagccttcaagtggtcctcacaccttactatacactgagagttctgaacttactctgtaaccatcccaaactcctcccaggcacagtctggcagaggtcctgccatttcggagacctggaggaagtggcccatttacagccatgtaggcaggcctgcagaccttggcctttactacggtacctgaagtggttcaatgactcagtttcagttacctgagccacagcttaaggtcagttctgcctatatagaaacccacacagttaacctgaggaaatgctctctggtactcactgaaagccacactcatccacatcctgatacaaggcccaccatatgcagacctgactgccaaaacatgccctagtgtctgccgtacagagtgaagtcctgaaggatatttagtctgtccaaaactaaaatgaagatttcaactccccaaccccctctaacaagccagctaaaggtggactatagtgcagacccagcaaccttgtgaccaagctaaaacccctcatcactacaaattcagagggcatctcatcaccctaagggcccaacgaaagatctttaccttctaacatcagtttatgaaaacttgaaaaggtgtttgctccatcaaattcagacaccagtacaaaactatattatgcccattgtctggttctattttaatgtagcactggaagtgtgtggcagaagaattagtcaaagaaataaaaatagccattgaaattg

SEQ ID NO: 1227 - DNA, 3567 bp, Homo sapiens
agtccggactcgccgccgccgccgccatattcccgtggcatcttccttactttgtccatcctccggactcgcgatcttccttccggagccatgtcagaaggagtggacttgattgatatatatgctgacgaggagttcaaccaggacccagagttcaacaatacagatcagattgacctgtatgatgatgtgctgacagccacctcacagccctcagatgacagaagcagcagcactgaaccacctcctcctgttcgccaggagccatctcccaagcccaacaacaagacccctgcaattctgtatacctacagtggcctgcgtaatagacgagctgccgtttatgtaggcagcttctcctggtggaccacagaccagcagctgatccaggttattcgctctataggagtctatgatgtggtggagttgaaatttgcagagaatcgagcaaatggccagtccaaagggtatgctgaggtggtggtagcctctgaaaactctgtccacaaattgttggaactcctaccagggaaagttcttaatggagaaaaagtggacgtgaggccggccacccggcagaacctgtcacagtttgaggcacaggctcggaaacgtgagtgtgtccgagtcccaagagggggaatacctccacgggcccattcccgagattctagtgattctgctgatggacgggccacaccctctgagaaccttgtaccctcatctgctcgtgtggataagccccccagtgtgctgccctacttcaatcgtcctccttcggcccttcccctgatgggtctgcccccaccaccaattccacccccaccacctctctcctcaagctttggggtccctcctcctcctcctggtatccactaccagcatctcatgcccccacctcctcgattacctcctcatcttgctgtacctccccctggggccatcccacctgcccttcacctcaatccagccttcttccccccaccaaacgctacagtggggcctccaccagatacttacatgaaggcctctgccccctataaccaccatggcagccgagattcgggccctccaccctctacagtgagtgaagccgaatttgaagatatcatgaagcgaaacagagcaatttccagcagtgccatttccaaagcagtatctggagccagtgcaggggattacagtgacgcaattgagacgctgctcacagccattgcggttatcaaacagtcccgggttgccaatgatgagcgttgccgtgtcctcatctcctctcttaaggactgtcttcatggcattgaagccaagtcctacagtgtgggtgccagtgggagctcttccaggaaaagacatcgctcccgggaaaggtcacctagccggtcccgggagagcagcaggaggcaccgggatctgcttcataatgaagatcggcatgatgattatttccaagaaaggaaccgggagcatgagagacaccgggatagagaacgggaccggcaccactgagaaaggagtctggttggaagcaaatgtttttttaatggacttgcatctcctcaccttgatcaggactaaaggacggaggccgccccacccccttccctttcctccaaacccctaactccctccagacacccagggaataccctctgccccacaggattgaagactgcttggcagtcctcccaatcccacacctcctgtttgccaggggaaagaacctaaagacttcgtgtgattgggaggggtggcagacaggaagaaaacatgtccaggcccctggtctccatagagaatggtgctttgtccaagaaaacgtatgagtttctgattctccgggagccgttcaatggtgaggttgatgggaagacttccttcccaaagaaaatagatcctccatgcaggatctaggagagtgactgggtgtgccaaaatatgcccagggtcctgccctcagcactagatttaatggggccaagagggtccaaaccccttgctaacataccacttctttgtttaactcctttacctttccagccctttgaggagggaccatgagaacagaaattaccttatgaaaagctacttctgttcctgctttccctctcacgtattgacggtttatttctttgacctcccagagggctgaactctttcaactctgcgctgcccagccttctcagtggacttgcccctcctaagcagagaaggcctatgaggttgcttgctgctgggaagcctggcagagccaattaccaccctctgctgcttagtgcttgggtacctcttgcaataaccagctcttagttgttccctttccctggggcttttccatttaacacatggagcccttcccccagaaggctacttccttgttttagaggaaggtactgcccattgggagatggggacattgggacctcagcaatgaagaacccttgtgaagtaaccaggaggaatggggaaagaagcaagttgggcaggatatggcctacttccataggcttttcttttttcaggtttgatgtaagcatgggcttacatcccccaggtacatacttttacttattgtgggataacctggcactagtaggcaggtaaagtcacaaatttggtgtcttttcaccttttgactgttgacttaatagctcctctcactctgcctggagatacttcctgcctcagatgaggagccagaagaaacagagcccgacttgaatgaactcagctcagagttctaaggaccagcattctgggggccattttctctacaggcaaatggaattgcttttccataacatccaaattgtaatgtggttgctgctgaaggaggaggcagcagcgaggtcctgcggtacccatggggtgatgctacttctgcatgcatctacagggcatctgacacctaacatgagacgtggcatgtgagatgagacttggcatgtgagacatagggtcactagagacccttctgggtcagaggagagagactgaattggactaaacccgtcctctgttcccagcacgtttctcatatagccctcagtcactgagggagtcccccgcaggattggagaggcacattcccttgggacagaggctacaggttggagctttttttcccctgtcccccaaccccatccccacctccacttcagaacatggcaccccacccaactggccaagtgttaagtgatgtgcttattgagagcaactccgggtgtcttttaaaatgtagagaaaaggtgacagtttaaggaaaaatatatatagaataccagaaatgccgtttacccggagaatttttttctccccatttgttttgtttttactcaatgacaccatttttagttttatttcctgatagcaaaaggaaaaaaaacacccatccctcaaaaaggccaaggtcccgtccccctgttgtcggtgatttgtttgtctttctgataggttgaaaattgtgtaataaacttgatgacgctgtcaatcttttatactgcattgtatttttttccttttgtaacaaaatatttttaaataataaatggggtgtgagctgttttatgg

SEQ ID NO: 1228 - DNA, 2858 bp, Homo sapiens
gtgcggaaggggtgcccgggacgaagccatggccctggaggcggcgggagggccgccggaggaaacgctgtcactgtggaaacgggagcaagctcggctgaaggcccacgtcgtagaccgggacaccgaggcgtggcagcgagaccccgccttctcgggtctgcagagggtcgggggcgttgacgtgtccttcgtgaaaggggacagtgtccgcgcttgtgcttccctggtggtgctcagcttccctgagctcgaggtggtgtatgaggagagccgcatggtcagcctcacagccccctacgtgtcgggcttcctggccttccgagaggtgcccttcttgctggagctggtgcagcagctgcgggagaaggagccgggcctcatgccccaggtccttcttgtggatggaaacggggtactccaccaccgaggctttggggtggcctgccaccttggcgtccttacagacctgccgtgtgttggggtggccaagaaacttctgcaggtggatgggctggagaacaacgccctgcacaaggagaagatccgactcctgcagactcgaggagactcattccctctgctgggagactctgggactgtcctgggaatggccctgaggagccacgaccgcagcaccaggcccctctacatctccgtgggccacaggatgagcctggaggccgctgtgcgcctgacttgctgctgctgcaggttccggatcccagagcccgtgcgccaggctgacatctgctcccgagagcacatccgcaagtcgctgggactccccgggccacccacaccgaggagcccgaaggcgcagaggccagtggcatgccccaaaggagactccggagagtcctcagcactttgttgaacgtggtggtgagagcacacgtcctcgtctcattcctgatcgaacgcggtggtgagagcacacgtcctcgtctcgttcctgatcgaacgcggtggtgagagcacacgtcctcgtctcgttcctgatcgaacgcggtggtgagagcacacgtcctcgtctcgctcctgatcgaacgcggtggtgagagcacacgtcctcgtctcgttcctgatcgaacgtggtggtgagagcacacgtccttgtcttgttcctgatcttaagggaacgtttgcagtctttcaccactagatgtgatgtgagctgttagattttcaaggatgctcttcatccagctgaagacggtcccttctagtcctaatttgttaagtgtttttatccttaaagggtactggattttgtcaaatgcttttctggcctctattgaaaagatcctgtgttcttctgttaatatgaggtgttacattgattgattttcatatgttgagccagtttccatttgtggaatacatctaactcggtcatggtgtataatccatttactctgctgctgaatgtgatttgcttgtattttggtgcggatttttacatctgtatttataagggatattggtctggtgttttcttatgatgtcttcctttggttttgatatcaggataatattagcctcatagattgggttaggaaatgttctctcctccgttttttttggaagagagagattggtgttaattcttgctagaacctttggtagaatttgccagtaagcctatctggtcttgggtctttgggaggattttgattcgattcaatctatgtatttgttatagatcgttcggattgtccatccctgagtcagttgctagcttgtgtgtttcttggagtttttccgtttcgtccatgttatctcatctgttggcataccgtcgttcacgggattttattgatgtgtgtgaggtctctgagaacgtccctgccttcactcctgcttttagtcactggcatcttcttttaacttgggccatctggccgtgcatggttttgggagagtcctccttgactctgcagatgctgagcagtgatctggctgggaaaggggaccaggagtgcagggcacctgctgaggactcacctaagcccaagagtcagagagtcggagctccaaccacatctgcctgcatgcctttcccaggctctccccaggcggacagccagcaccccctccccaaagaccgggcagttcctgaccagcaccccaccaagtcctcagtaaggcctgtctttgggggagcagggtttcaggaggacagtgggggtggtgtagaactcatggctggcggttccgggcctctcaggaagctttgccactgggcttggggttaagtgggtgtggggctccgaaccctaaatgggtgagagttgaaatgaaagcggcacctgtagtccgtttggggtgcaggtgtgtgccaggggtcttcagccccggctgatggccacatgaaccacatgaggagaggcagggcgtgtcagcagcaaacctaagtgtgtgctcatttctgtgggcccttactctgtgacactgcagctctccagagagacgctttgaaaacaaaacaggaaagaacacacggccccgcgtctgttgcctgagtcactgtattccttaaaaggtgaaggaccctggtccttggcttttcgtgcacatgagaaaatgttggccaaggttagcgattatgcttctgtaatctgtaaccagaagtgctcttatgcccaaaccttgatgtgattctgctgtaatgtaacttcggagccagctggatggatgtgactgtgcaggtcctgagccccggcccccgtaaccaagcagtgggccgagacactgagccgggcagtcaaacaggagctctctaaggctgctcccgggctgggacctgggtctaggattctcagtaagacctttgaataaaactaacttgaattctt

SEQ ID NO: 1229 - DNA, 4521 bp, Homo sapiens
gggtacagggaagtctcgcctgttggaactggctgtggggctgcggcggtggggacgggccacggcgttctgtgacatccccccgcctcccctcgtcttctcccggctggcggcgaccggcctcagctgcagcgggcccggggcgtggggcctgggttttttgtgacatcgtaaacatgagccccacacagtgggacttccctgtggaattatgttgccggcctatggcctttgttactctaacgggcctggatgtagtttataatgcagtccatcgagctgtctgggacgccttctgtgcaaatcggagagctgatcgagtaccaatttctttcaaggtgctcccaggtgaccatgagtatcccaaatatagacccaagagaacttcatatgagtggtacattcctaaagggatcttaaagactggctggatgaataagcatctgaatctggtgccagccctggtggttgtgttctatgaactggactgggatgagcctcagtggaaagaaaagcagtctgagtgcgccaccagagtggaaatagtcaggcaaagtttacaaggaagaagcacaaaagttgcagtggttctgattcagaagaaaacccctttgcccccaggagaagatgtcattgcttcagaaagggctgcagctttatgcaatgcatgtgaactctcaggaaagtctttgtttgtactgccgcacactgaccaccttgtgggttatattataagattggaaaatgccttttatgaacatgcacagacttattactacactgagatcagaagagtgaaatctcataaagaatttttgaataaaacaacacaccagcttttatttgttaggcatcagttcaaaatagctttcttcagtgagttgaaacaagatacacaaaatgcgctgaagaattataggaccgcctataatcttgtacacgaattgagagcccatgaaactaatattctggaaattaagactatggcaggatttataaactacaagatctgtaggctgtgttttcaacacaacaccccattggatgcaattgctcagttccgaaaacacatcgacttgtgtaagaaaaagattggaagtgcagagctgtcttttgagcatgatgcatggatgtctaaacaattccaggcctttggagatttatttgatgaagctattaagttagggttaacagctattcaaactcagaatcctggtttctattaccagcaggcagcatactatgcccaggagcggaaacagcttgcaaaaaccctctgtaaccacgaagcttctgtaatgtatcccaatcctgatcccttagaaacacaaacaggcgttcttgacttttatggacaaagatcatggcgacaaggaatactaagttttgatctttctgatcctgaaaaagaaaaggtgggaattcttgccattcagctgaaggagagaaatgttgttcactctgagataatcataactcttctgagcaatgctgttgcacagttcaagaagtataagtgcccgcgaatgaaaagtcacctaatggttcagatgggagaggaatattattacgcaaaggattataccaaagctttgaagttgctggattatgtgatgtgtgattatcggagtgaaggatggtggactctgctcacttctgtattaactacagctctgaagtgctcctacctcatggcccaattaaaggattacattacttactccctagaactccttggtagagcttcaactctgaaagatgaccagaagtctcggatagaaaagaacctcataaatgttttaatgaatgaaagtcctgatccagaacccgactgtgatatcttagctgtgaaaactgctcagaagctgtgggcagaccgaatttctctggctggcagcaatattttcacaataggagtacaggactttgtgccatttgtgcagtgcaaagccaagtttcatgccccaagttttcatgttgatgttcctgttcagtttgatatttatctgaaggctgattgtccacatcccattaggttttccaagctctgtgtcagctttaataatcaggaatacaaccagttctgtgtaatagaagaagcatccaaagcaaatgaagttttagaaaatctgactcaaggaaagatgtgcctagttcctggcaaaacaagaaaactgttatttaagtttgttgcaaaaactgaagatgtgggaaagaaaattgagattacttcagtggatcttgctctgggcaatgagacgggaagatgtgtggttttaaattggcagggaggaggaggagatgctgcttcctcccaagaagccttacaggcagctcggtctttcaaaaggcgacctaagctacctgacaatgaagttcactgggacagcattataattcaggcaagcacaatgatcatatccagagtcccaaacatttctgtacatctgctacatgaaccccctgcactgactaatgaaatgtattgtttggttgtgactgttcagtcccatgaaaagacccaaatcagagatgtgaagctcaccgctggcttaaaaccaggacaggatgccaatttaactcagaagactcacgtgactcttcatggaacagaactgtgtgatgaatcctacccggctttactcactgacattcctgttggagacttacatccaggggaacagctggaaaaaatgttgtatgttcgctgtggaacagtgggttccagaatgtttcttgtatatgtttcttacctgataaatacaaccgttgaagaaaaagaaattgtttgcaagtgtcacaaggatgaaactgtaacaattgaaacagtctttccatttgatgttgcggttaaatttgtttctaccaagtttgagcacctggaaagggtttatgctgacatcccctttctgttgatgacggacctcttaagtgcctcaccctgggccctcactattgtttccagtgagctccagcttgctccatccatgaccacagtggaccagctcgagtctcaagtggacaatgttatcttacagactggagagagtgctagtaaatgcttttgtcttcaatgcccatctcttggaaatattgaaggtggagtagcaaccgggcattatattatctcttggaaaaggacctcagcaatggagaatatccccatcatcacaactgtcatcactctgccgcacgtgattgtggagaatatccctctccatgtgaatgcagatctgccgtcatttgggcgtgtcagagagtcgttacctgtcaagtatcacctacagaataagaccgacttagttcaagatgtagaaatttctgtggagcccagtgatgccttcatgttctcaggtctcaaacagattcgattacgtatcctccctggcacggagcaggaaatgctatataatttctatcctctgatggctggataccagcagctgccatctctcaacatcaacttgcttagatttcctaacttcacaaatcagctgctcaggcgttttatacctaccagtatttttgtcaagccacagggtcgactcatggatgatacctctattgctgctgcatgatgttcaagaccggcccttggctgttgttacagagatgttgggcagagctatgcaggtgtttcattgtgaactctagctttgatcatggtaaaaagttaaccttttctattttttaatggatgttataccaactattcagaggaactcatacttcaaaaatattaggaaaatctgtcttatagtttctctaataaatatctgaaatctcagtacgacatgaaagaatgtcagaccattgttattgttgaaagtcatttgatgaatggtaaattctatgaaaagtaagtgatttgcatgtataatatcaggaaaattaagcatcccaagtgtgactggacaaagagagcagatgcaccagtgcctgtgccataaagttccgaatcccccatgtgtctctttcagagctggccagaccggaaataaatcattctcataaattcagtgtgtactcagaacacatacacaacaacatagggagttgtatgactgatacggaaaacttccagaaagttttaatcaaagcagtttaattaaggtatcaaaaatatctttgcttactatcaagaagtgtcaaataggttcagcttgctgccaaaatatggatcatttatgaagcaggttcatattttagaggtgttaataaaatcctcatcggaaaagatccaaagtgcaaggatttgattataaacataatttcctagactgaaagtttttggaaaagatgcagggtctgagtcaggccttctggttatattgtgcagtttcaaaagaactatttaaaactcttgaaaactcatgtaaataaaaatcatagggtgaaaattgtatttgttaaaataccttaataatttaaaatgacctgatttcctggaaaattttattattcaaaaggtggaggcattgtaaaaaggaaatagtgatgtaaataaacatgttctctttc

SEQ ID NO: 1230 - DNA, 3788 bp, Homo sapiens
atcccggctcctgcatccagtcgccattcgggaggccgctgcgctgcagggcctcgcggagccgcccgcgaccgcgagccgggccctccgcgcggtccatcgcccactggacgccgcccgcggccggaccggttcaacttctcatctttgttcttcttcatatactataggctgtttgctgtggtttagtcaaaaagccatgtagaatgcctgccttttgaagaccacttttaaggtgtctagtaagacagcagcagtattgaaagtttttaaagaatataaccgtgtgtgttggtaacagacagaagaatggaagcattccaggaacttcgtaaaccatcagcacgtttggagtgtgaccattgcagtttcagaggcacagactatgaaaatgtacaaatccatatgggtaccatccatccagaattttgtgatgaaatggatgctggtgggctaggcaaaatgatattttaccagaaaagtgcaaagttatttcactgccataaatgcttcttcaccagcaagatgtactctaatgtatactatcacatcacatccaaacatgcatccccagacaaatggaatgataaaccaaaaaatcagttgaacaaagaaacagatcctgtgaaaagccctcctcttcctgaacaccagaaaataccctgcaattcagcagaaccaaaatccatacctgccctttcaatggaaacacagaaacttggttcagttttgtctccagaatcgccaaaacctactcctcttactcccctggagcctcagaaacctggctctgttgtttctcctgagctacagacacctcttccttctcctgagccttcaaaacctgcctctgtttcttctcctgaacctccaaaatcagtccctgtttgtgagtctcagaaacttgcccctgttccttctccagaaccacagaaacctgcccctgtatctcctgagtcagtaaaggctactcttagtaatcccaaaccccagaagcagtctcatttcccggaaacattggggccaccttcagcctcatctccagagtcaccagttctagctgcttccccagaaccttggggaccatccccagctgcatctccagaatctcggaagtcagcccggactacctcccctgagccaaggaagccatccccttcagagtctcctgaaccttggaagccgttccctgctgtctccccagagcctaggagaccagcccccgctgtgtcaccaggctcttggaaaccagggccacctgggtcccctaggccttggaaatccaatccttcagcatcatcaggaccttggaagccagctaaacctgctccatctgtgtctcctggaccttggaaaccaattccttctgtatctcctggaccttggaaaccaactccatctgtgtcttctgcatcctggaaatcttcatcagtctcacccagctcctggaagtctccccctgcatctcctgagtcatggaagtctggcccaccagaactccgaaagacagctcccacgttgtctcctgaacattggaaggcagttcccccagtgtctccagagcttcgcaaacccggcccaccactatccccagagatccgtagtccagcaggatctccagagctcagaaaaccctcagggtcaccagatctttggaagctttctcctgatcagcggaaaacttctcctgcttcacttgatttccctgagtcccagaaaagttcccgtggtggttctcctgatctctggaagtcttccttttttattgagcctcagaaacctgtcttccctgagacccgaaaaccaggtccttctgggccatctgagtcccccaaagcagcctcagatatctggaagcctgttctctctatcgatactgagcctagaaaacctgccctgtttcccgagcctgccaaaacagcccctcctgcttctccagaagcacgcaaacgtgccctttttccagagccccggaagcatgcccttttccctgaactccccaaatctgctctattctcagaatcacagaaggctgttgagcttggtgatgaactacaaatagatgccatagatgatcaaaaatgtgatattttggttcaggaagaacttctagcttcacctaagaaactcttagaagatactttatttccttcctcaaagaagctcaagaaagacaaccaagagagctcagacgctgagcttagtagtagtgagtacataaaaacagatttggatgcgatggatattaagggccaggaatcaagcagtgatcaagagcaggttgatgtggaatccattgattttagcaaagagaacaaaatggacatgactagtccagagcagtctagaaatgtgctacagtttactgaagaaaaagaagcttttatctctgaagaggagattgcaaaatacatgaagcgtggaaaaggaaagtattattgcaaaatttgttgctgtcgtgctatgaaaaaaggtgctgttttgcatcatttggttaataagcataatgttcatagcccttacaaatgcacaatctgtggaaaggcttttcttttggaatctctccttaaaaatcatgtagcagcccatgggcaaagtttacttaaatgtccacgttgtaattttgaatcaaatttcccaagaggttttaagaaacatttaactcattgtcaaagccggcataatgaagaggcaaataaaaagctaatggaagctcttgaaccgccactggaggagcagcaaatttgataacacagtgtgaatatttgttctacaaaggtgtttgttggaaccattctttgtaagtatagcttatcagatagcatagttggatcagtagatgacatgtatggtgtaccgtgtttcactgtctcagttgtgttactaagaatgagcatttgatcatttttttctggtctctgtctatgtgactatcttgtaagtcaataaatttctgtatagtccagatggattaaacttctcatttcttttaaatatgtatgaataataatacaaggaagtaggcattccatttaataatcaagagcaagttgtactcaaagcattcagttaaagtgtatctgtgtgtggaactaatttcagacaatagaaaatattagttgaaatgtttaagaattaggcatgaaaaataaatttgagaaattttgtttccttacatgtatttttaaatcataagagttattttctatctgatgtaaaattagtttataaatcttaatcagcttctagatgtttattagcttttatgtcatgaaatgttggagtctcagggttgctgattttctgctaatgggaaaaattgactaagtctttaaaatagtttgcagccttctcccacaggagacaagtgaaagataagtgtgattttagatctttcttgtccatagttgttttcagtggagtcttccattctgtatcttaccctaagatctggttcttccctccccatccccaccccccacccaccgcctgccagctcacactaatagatgattcttaattgccaaatgtgttagagtttgtatatcctactcctgggccttacatgtcgcctgttggggcttaagaccaggttgataagtaggaactgaaagtcttccagattcacagtagaaaattttatagacatttctgttaaagaaatatatcgattttatgtttttcaattatgttactgtaaataccttgtacctgttcatggattattttattctaaaatattttgtcaaatgtgtatcaaccaaattaaaaagaaaggttttcatgtc

SEQ ID NO: 1231 - DNA, 4211 bp, Homo sapiens
aaactaaggccttcctggtagccaaggagcccagcagaggggctgctgctggctgctgggattgcagaggccggggtctctgtggtgttgctttcctggaaaggagggacggcacctccagggcagccagcagtgtgggagcccattccagggcgcaaatgggcactcaggaatggaaaatccaagaaggaaccaaccaccaacaaggaaatgcagtgtgagcggcagctgcgaagtctgtgccttcaaatatacagcgcccaggggacctgtgttggacggggagcaaattggcagggctgagagcgccttggttttctgtgcagacaggtccagctgcagaaattaagactggggctgagtcggggagaagccttccatgttgagatggcaactgggcaaagcaggacggagacctgtgtgtctgattagagaggcctgtggcattggcatgtggctggaagtccaggcagggtgccaccaccgcagaggtcaagcatgaattcagtcctgacaaaacatgggtctccacctcgaagctggctcagcctttgttcaggaaccgacgaccagagccccgctgaaaagaagggactgcgctgtcagaaccccgcctgcatggacaaggggcgggcggccaaggtatgtcaccacgccgactgccagcagctgcaccgccgggggcccctcaacctctgcgaggcctgtgacagcaagttccacagcaccatgcattatgatgggcatgtccgcttcgaccttcccccacaaggctctgtgctggcccggaacgtgtccacccggtcatgcccgccgcgcaccagccccgcagtggacttggaggaggaggaggaggagagctctgtggatggcaaaggggaccggaagagcacaggcctgaaactctccaagaagaaagcaaggaggagacacacggatgacccaagcaaggaatgcttcactctgaaatttgacctgaatgtggacattgagacagagatcgtcccagccatgaagaagaagtcactgggggaggtgctgctgcctgtatttgaaaggaagggcattgcgctgggcaaagtggacatctacctggaccagtccaacacacccctgtccctcaccttcgaggcctacaggttcgggggacactaccttcgtgtcaaagccccagccaagcctggagatgagggcaaggtggagcagggcatgaaggactccaagtccctgagtttgccgattctgcggccagctgggaccgggccccccgccctggagcgtgtggacgcccagagccgccgggagagcctggacatcttggcccctggccgccgccgcaagaacatgtcggagttcctgggggaggcgagcatccccgggcaggagccccccacgccctccagctgctctctgcccagcggcagcagtggcagcaccaacactggcgacagctggaagaaccgggcggccagtcgcttcagcggctttttcagctccggccccagcaccagcgcctttggccgggaggtagacaagatggagcagctggagggcaagctgcacacctacagcctcttcgggctgcccaggctgccccgggggctgcgcttcgaccatgactcctgggaggaggagtacgatgaagacgaggatgaggacaatgcctgcctgaggctggaggacagctggcgggagctcattgatgggcatgagaagctgacccggcggcagtgccaccagcaggaggcggtgtgggagctgctgcacacggaggcctcctacatcaggaaactgcgggtgatcatcaacctgttcctgtgctgcctcctgaacctgcaagagtcagggctgctgtgtgaggtggaggcggagcgcctgttcagcaacatcccggagatcgcgcagctgcaccgcaggctgtgggctagcgtgatggcgccggtgctggagaaggcgcggcgcacgcgagcgctgctacagcccggggacttcctcaaaggcttcaagatgttcggctcgctcttcaagccctacatccgctactgcatggaggaggagggctgcatggagtacatgcgcggcctgctgcgcgacaacgacctcttccgggcctacatcacgtgggcggagaagcacccacagtgccagaggctgaagctgagcgacatgctggccaaaccccaccagcggctcaccaagtacccgctgctgctcaagtcggtgctgaggaagaccgaggagccgcgcgccaaggaggccgtcgtcgccacgatcggctccgtggagcgcttcatccaccacgtgaacgcgtgcatgcggcagcggcaggagcggcagcggctggcggccgtggtgagccgcatcgacgcctacgaggtggtggaaagcagcagcgacgaagtggacaagctcctgaaggaatttctgcacctggacttgacagcgcccatccctggcgcctccccggaggagacgcggcagctgctgctggaggggagcctgaggatgaaggaggggaaggacagcaagatggatgtgtactgcttcctcttcacggatctgctgttggtgaccaaagcagtgaagaaggcagagaggaccagggtcatcaggccacccctgctcgtggacaagattgtgtgccgggagctacgggaccctgggtccttcctccttatctacctgaatgagtttcacagtgctgtaggggcctacacgttccaggccagtggccaggccttgtgccgtggctgggtggacaccatttacaatgcccagaaccagctgcaacagctgcgtgcacaggagcccccaggcagtcagcagcccctgcagagcctggaagaggaggaggatgagcaggaggaggaagaggaggaggaggaggaggaggaggaaggcgaggacagtggcacttcagctgccagctcccctaccatcatgcggaaaagcagcggcagccccgactctcagcactgtgcctcagatggctccacggagaccctggccatggttgtggtagagcctggggacacgctgtcctcccccgagttcgacagcggtcctttcagctcccagtctgatgagacctctctcagcaccactgcctcatctgccacgcccaccagtgagctgctgcccctgggtccggtggacggccgctcctgctccatggactctgcctacggcaccctctccccaacctccttacaagactttgtggccccaggcccaatggcagagctagtgcctcgggccccagagtccccacgagttccttcccctccaccctcgccccgtctccgccgccgcacccctgtccagctgttgagctgcccgccccacctgctcaagtctaagtccgaggccagcctcctccagctgctggcaggggctggcacccatgggacaccctctgcccccagccgcagcctgtcagggctctgcctggctgttccagccccaggtattaggactcagggctcccctcaggaagctgggcccagctgggattgccgaggggcccctagccctggcagcggtcctgggctagtcggctgcctggccggggaacctgcaggctcccacaggaagaggtgtggagacctgccctcgggggcctctcccagggtccagcctgagcccccaccaggggtctctgcccagcacaggaagctgaccctggcccagctctaccgaatcaggaccaccctgctgcttaactccacgctcactgcctcggaggtctgagcagagggaggcccccaagagtgccattgaccaagagacagcagacagcctgcctcctggggcgtgccggcacctgcttcagctactgcctcctgtatgcatgagccggatgctgggcaggatccctgcctacgcccgggcccgatttgcgctttgccggactggatggagtggaggaggcccaggccacagtaccaccccacctgcccaggcagcccctcgtcacctactccccgaagttaccagctcagctcgagtcttcagggctgggctcctaggctgcccatcctacttctaccctcactggcctccagtgggattcactcctgccctgcccccaccttcccagtcccacaggccacccctggcttgggctgggttctgtgaagttacgtatttattgagcttttggttcttttataaagacttgtctagactccaaaaaaaaaaaaaaaaaaaag

SEQ ID NO: 1232 - DNA, 4337 bp, Homo sapiens
ctcccctgatataaatgaattggaggtttttgttgttgtttatggtcataacaaccccaggaaagctcgtcaagtataatagtagctgctccctaaatacacacaaccagaagtctagtcggccaccatcttggaggccattcatctgcccgcatctcttcctcacctatgaacaggcgtgcgtgcatactgcagttctctctcctgcgcccttagtgggcattgctaattaatggtcaagctgtggcactgagcttagagacatactttataatacggtcttacaggtggccactccagcaagttgggattggcttacaaaatgaaccatgtatattattcctgggctaggatagatcccaaagtcagcattataacagatttccaaggtggcttagttgtcatgttaaatgtgctactaaaagaagatgactaacacctgatggaaaacattgagttttttactgacagcttaagtacgatagtattttatggccccaaattgtattttgaaggggtgctttctgtaaggaaaatgcattataaatttagcctccagtaacatgtctgccctagagttgtttttttttttttgagacggagtctcactctgtcgcccaggctggagtggagtggcgcaatctcggctcactgcaagctccgcctcctgggttggcaccattctcctgcctcagcctccccagtagctgggactgcaggcacctgccaccatgcctggctaattttttgtatttttagtagagacagggtttcaccgtgtcagccaggatggtctcgatctcctgacctcgtgatccgcccacctcgacctcccaaagtgctgggattacaggcgtgagccaccgtgcctggccgccctagagttgtttttgccagtgtaaaaagttggtttagtgtaagttaaggaagacagtttaatattcagtctttcagaagtaggctacttcctgaagtagtaactttttctgacagtgaaaagagattaatatttgttggtggtgatacacaagatttattcagaggttttcagttagatgagctgacctccaggaatctcttactgttttaataagacgcagtaggaacatgttgctcttcaaaactaccagtacggagttcatttttatactaccatgctctaagtcccagatggtacccacccaggatgtgctggatcccagtgccatgggcaagcccacatacccccaggtttctgtaaaaactcagattactttctgtgagctggctactttgtatttgcttatttcctgtggattgaataataccgtgagggctgagaagtccttcctcctgggcaacagtgactctttggaagaaagcagcagcccagagagagaagagcagcagacattctcatctctagaggctaccctccagctgcccctttgcaggggacttgtaaatcagagccaagcatttttctttcctcaacttcttccactcttgaggcagctgtttcaacccgaaaattggatgtcccttggaattcttcataagcactaatttgtaattaatttaatgtaagtgatgtgtaaaatgtgagttcatctcattatctctacataatgaggggtgctaggtgcttttcatgtttaatcatcaggactgtgttgcaaagttaggtgtcacctctcatcttagtccctggatctaggcccaggtctgagaacccaaggagaccctccctctcaggcacatgcctgtgcagattgcctgcttccctcttatcccagccctacctggcacacagtagatgttccgtaaatacttattaactgattggcctaaggttccacctctattctctggtggaatactcaaaagatctctaactattagagatgatcgcctttgcttccggagcaagcctttgtgtcagtcacatctattttctttgataaagacatgtatttcctgaattggacttgctgttcttgtcataactgttgcatgtgggcaacaacatgcttagtgctgtgaaagaggacactaacccctctctgtccctactgtgtcgacaggcttacccaggacagttccgagcccttctaggacttggagcagcctttggctggagtattgccatgagtccatcagcaagagtccagtttcggctctcaggagtgtgttcacctgtttctttctgggctgtgtcgagtctggagacacagcaccaggccaggctcattcaggtacacgggaggccctctgagctctaatgtggagagttgtcggagcctgcagctggagtgcatatttctgaggataccatgcattaggactagtgcctgtgacctcctcttcactctgcaatctagggccttgcaggacgaactctgcagaggcctaaaggttttgaaattgagaaggaaaatcttctaccaataatttttttttatagaatgaaaacaaaacatgaatgattgctaaaatgattaaagagaggcgagaacagagccgatgaaagggaaagaaaaaaatgaaaaagttaaaggccaatttagtaagaatgcctctctttataacccctaggggactcctgacatgcacaacctaaacccatgctctgtgtgtggggtatgtttcagtgtgtgtattgtggtatgtgtgtggtgggggggtgtgtgtggtggggtttgttgggggatatgttgtgtgaaatatgtgatgtgtgcatggtatgaaatgtgtgatgtgtgtgtcctatgtgtttgcgaggtgtggttatgtagagtaatctgatagcaacatagcatattggcgaacagctcattctggaagctccccttgcctgttttctcttggggtggagcagccttggtgttggatcacaggagggaaggcaggtcggctcacaggaaggcctgtgcatggtagtggtggttgtggagatgatcctgtatgttccgagtctacttctgggaaagcttctgaaagctgagctgtgctggagatccacaggatcggggtgggggcagtgccttagattgtgcgtccaacgacaggatatgcttcgtgatggagaccttattggttttatatctatacctaaaagtattgaataaaaacaaataagcatgtatttatatatacatgtatgtctgttttgacttgatggactttaagcatttggagtgtttgaaatattcctttaacatctaaacactgagatattcaaatgtaaatgaaagacatttgcctaatgagagcagtaacatttttgtaaaaggaaaattttcagtgactgccttaacttgtaccccagctctgcccggcaggcttcacgtaaggggacactatctggagttggctccagaagggcttgtcacagagccctatgaggtcttgactcaacgtgttcctatacgtgacactgttacctgacttgtcaggtattgaaatgtatttaagcattttttttctgttgctgagaaactgtgtatccaagtgtctaactcctggtgtttttcatgacattttaagagattattgtattgcctgactatatttagactcagagtggaactggagattagccagtaatacatttaactctgtcctgcttttggattcttcagaatgccttaggtattactttagagaagacaaacccagagagattaatgtaatttggatagaatgaatatgttgaagatcaaattagagtttatgatagcatcctggtctccgtacagacactggccttggagtgggtcgtgcactggagtgtgtcagccagggacggtgcctttgctcatgtgtagcagcactgggcaagggacaacaccaggccccgctttggttctggtgtttattcaactaaagtgaaccacttgttacttataaaatgcacacccagatttccctattgggttgttacctcagtgcagttgatgagattttaacattctgctgtgcaatatggattgtttttgttttatttccttgtcattgttttttccttaatttattgggaaatcaatcaagtgggaaaatgtgcatgtttatgtatttgtaagaatggattgactaatagtgaaacatctgtggataaaaggtattgtttccatgttacatcaacttagaacttcttgtcttttttgaggcgaaatgttggataactttacactctgtctgaagtcttgctgaatagaattactgtgtgctggcatcatctgggacttcaaaacttggaatatttgcatctacttgtgttttactggccagtcttaaaaatagagtttaacagttacatttgttgaagtgggaggttcagtaaagtggctactgcatgc

SEQ ID NO: 1233 - DNA, 3588 bp, Homo sapiens
gagtcaccgcagtggctgagctgctgacaggaggcggcagcggagtaggaggcgaggcaagacctgcggctcggcccggccacagccgcggtagtgctaggcaagcccacggagtcacgccggcctcagccagtctgcgaacctctcgcccccgcccacccctgcatccgcccggcccctgcccgcccgagtggtccggggaggcctagtctgcaccacccgccgggctcctggggccgccgccccgcgcggtcctgtcggcgtccgcggccgcgcccggcccctggcccgctcgcccgccggcaccatgatggaggagatcgaccggttccaggtgcccaccgcgcactcggagatgcagccgctggacccagccgccgcctccatctctgacggagactgtgacgcccgggaggagaagcagcgggagctggcccggaagggctccctgaagaatggcagcatgggtagccctgtcaaccagcaacccaagaagaacaatgtcatggcccgaacaaggctggtcgtccccaataaaggctactcctcacttgaccagagccctgatgagaagccactggtagcccttgacacggacagcgatgatgactttgacatgtctagatactcctcctccggctactcctctgctgagcagatcaaccaagatttgaacatccagctgctgaaggacggctaccggttagatgagatccccgacgacgaggacctagacctcatcccccccaagtccgtgaaccccacgtgcatgtgctgccaggccacgtcctccaccgcctgccacattcagtagcgggcggggccactgcggtcgccggggcggggccgccaagggccgggtaggacgggcagaggccgaccccttcccagctcgtctgcctgcccccggccccgcgcccctacagccgccaacctcgtataacagtcattgcttcctcctatggtaggacgtgtacctctgtgtgttcatggagctggagaaaccaaaactgggtctctctccacccgggagctgaggaggggtgggggccgtttgttcagttacctgggggaacctcacccagcaccctgccccgcttcccagggctggccaagagagaagactggacggcagggaggtcaacattaacgagtggggggatcacaaagccaggggcttggccccaccccagcgaagccatgaactcccaagccccggcctcagcctaaccaggaaaggggctcggagggagaaaggcccagggcagtggggacgggtcccagcacctcggagcccccttcacacgccccctaccggcccatgtttctatttgcatttccccctcctcagatgggaagcctggcaaagctgcccaaccgggtagtgcccctcacccatcggatcactgccttcttcctcctcttgccccattcacccgcttccttgcactctgggagtggggcagggtaaggtgggccttacagacaggctgaggtttgggtggtgtgatctgtcctaattggcccctcaccaatgcatctatctgtctgccaccagcccaccccaccctgcccccaccctcacccacgcttctgctcattggtctcaatcccagcctggaagcagggagtaaggctggactccaatggcccattcccctcaccccagcccaagacgtgggaggctgcttcccagtaagaatccaggagcaagctttggtgaatccagtgggctgagtggctctatggatgtggttgtttggatgtggtagggagtgcttagcagaatgtgtgtgtatctctgaggctgtcagggggtgggtgggtgtgtgtctctgttggacctgtctctcctcagtctattcctgtcatagatgtgggtgtccctggtagggaagtgcctgtgtggtctgtttacagtgcagaaggcggctcagcagtgcaatgggctgacagccttggaccgggagtcagaagcctgggttctggttgtagctctggcccctccctgtgatcttcaacaagccacttgctttctctcgtcttcagtttcctcaactagaaaatgaacagcagctgaaattatgttgaagatccttttatacctgaaagagtttcttcatagaaatttctgtggtggggagggggcaatctctgtgtgtctcagtatacctaaaggttggggtggggcggagttgtgtgtctctgtagaaaggcgaaggggcagttcctatcaggactgtgtatgtctgagcacatgtggctctgtttgggattacgtgtttgtctgtgaatgtgtgtgtgtgttggagggttgtctattgtgtgtggctgtatagggtgtctgtagatcaagatgtgtatacagctgcttctgctattgctggtttgggggaggggactggaaagctgagactgaaaatcaagagggaagaggcgaggaaggcccacccctggggctgggcagtgtagacctgccaccgtgtgaagaaaaatgaaagcacagatagcctaagactgcacaggcctgtgcccacataccttatagcacaggcccaggtggatcatctcatgctaacaccccacatgtgctggtggatccactcccatggatccactcacatgctgcaggcatgcagtagactcacccacagcccactctctggacaccaatcctgggaggtgggagctggaatggggagcaatgagaggagggagtgagactgttggcttaggaagggtggtacctctccctgcatcatacccaggaacttccagctccaaaatattggggtacagctcaccaccccccactccgccaacccattcctacctcctctagtgcagggacccaagttagatgatgagaaaatgccaaacaaagggaggcaaggacagagaaggtacctgcaggacccacaaggcccatactggcccccatctgaacccacctctcccacccagatcaacatccccccaacccctgtgcccccatcatctggaccccagagccagccctcccactaccaccaccaccaccccggggctccttggctcacctttctagaacatgggtacctcctctttttgggggctcatttagactgctgcctttgctgctgacttgcagtgtgactcgggcccattgttcaatctctgtggccctgagacaccagggaaaatctccccccccacaggacatactagttccctggcaggcaagggcttccaactgaggcagtgcatgtgtggcagagagaggcaggaagctggcagtggcagcttctgtgtctagggaggggtgtggctccctccttccctgtctgggaggttggagggaagaatctaggccttagcttgccctcctgccacccttccccttgtagatactgccttaacactccctcctctctcagctgtggctgccacccagccaggtttctccgtgctcactaatttatttccaggaaggtgtgtggaagacatgagccgtgtataatattttttttaacattttcattgcagtattgaccatcatccttggttgtgtatcgtgtaacacaaataatgatattaaaagcatcaaac

SEQ ID NO: 1234 - DNA, 3710 bp, Homo sapiens
cgtaaaacacatacacatgcatgtgcacacacaaacctccaggctatcacttcagtgccagccagcagcatttcttactctaaccactgcaactgtgtccctgcttcatcttggggcttcattctcatatattttcttcacacagcagccacagagaagcttttacaatgtaaaccagagtctattacttctgttctccaactacttcagtggctaaattggtaccagtagagtggggtgctgccgtagatactcaaaaatgggtatgtgactttggaactgggtaacaggcagggtttggaacagtttggagggctcagaagaagacaggcaaatgtgggaaagtttggaacttcctagagacttgttgaatggctttgcccaaaatgctgatagcactgtggacaataaagtccataggctgaggtggtctcagacggaaatgaggaacttgttgggaactggagcaaaggggactcttgttatgttttagcaaagatactggcggcattttgcccctgcacgagatatttgtagaactttgaacttcagagagatgatttagagtatctggcaggagaaatttctaagcagcaaagcattcaagaggtgacttgggtgctgttaaagacattcagttttataagggaagcagagcataaaagttcggaaaatttgcagcctgacaatgtgatagaaaagaaaaattcccattttctgaggagaaattcaagctggctgcagaaatttgcatgagtaacaggagccaaatgctaattcccaagacaatggggaaaatgtctccagggcatgtcagaggtctttatggcaacccctcccatcacaggtccagaggtatcaggaaaaaatggttttgttggccaggcccggggtcctcatgctgtgtgcagcctagggacttggtgccctgcatcccagccactcccaaccatgactgacaggaggcaaggtagagcttgggctgtagcttcggggagtgcaagccccaagccttgacagcttccatgtggtgttgagactgcgagtgcacagaagtcaagaattggggtttggaaaccttcgcctagattaaagaggatgtgcggaaatgcctggatgcccagtcagaagtttgctgcaggagcagggccctcatggagatcctctgccagggcagtgcagaagggaaatgtggggtcagagaccccacacacagtccctactggggcaccacctagtggagctgtgagaagaggtcctccagaccccagaatggtagatccaccgacagcttgcaccgtgtacctggaaaagctgcagacactcaatgccagcccatgaaagcagctgagagggaggctgtaccctgcaaaggtacaggggcagagctgcccaagaccatgggaacccaccccttccatctgcgtgacctggatgtgagatgtggagtcaaaggagatcattttggagctttaagatttgactgccccactggattttggactctcatgggcctgtagcctctttgttttgaccaatttatcccatttggaatggctgtatttacccaatgcctgtacccccattgtatctaggaagtaactaacttgctttggattttataggctcataaatggaaaggacttgccttgtctcagatgagacattagactgtggacttttgagttaatgctgaaatcatttaagactttgagggactgttgggatggtgtgattggttttgaaatgtgaggacatgaaatttgggaggggccattggtggaatgatagggtttggttgtgtccccacccaaatctcatcctgaattcccatgcgttgtgggagggacccagtgggaggtaactgaatcatggggacaggtcttacccgtgctgttcttgtgatagtgaataagtctaacaggatctgatggctctataagggggagtttctctgcacaagctgtctttgtctttgcctgccatccacgtaagacgtgacttgctcctcattgcctttcgccatgattgtgaggcctccccagccatgtggaactgtaagtccattaaacctctctttcttttgtaaattgcctagtctcgggtttgtgaacagactaatacaatggcttttcaccttgcagaataaagtcctacgagatcttcatgctctagctcctggccaggccacctcctcaggagttagatcacttatccgtctctccctggcccacccttctctgtcacatggcttctttgctgaccctgatacacaccacacttgtcttctctacctggaagttgtattccccatatccacatggctcacttcttcacttcattcaagtctctgctcagatattaacctcttcagagagcccttccttcacacactgtcttgcatagcagcctcccctacaagttgtcttctttctccttaacttttgtgatggttaattttaggtgtcagcttgactggattaaagaatacctagagaactggaaaggcattatttgttagtgtgtctgtgagggtatttccagaagagattgatatatgactgaatggactaagagggaaccatccgccctcaatgtgcaggtggcttgaaacaaaaacggaagaaaggcaaattggtcttactctcttggagctggaatacacgcttccattcctgcccttggatttcaggatcccaggctgttgggtctcaggactccaggacctacatcagcctttccgtcaccgctggggttctaaggcctttgggctaagaattatatcatcagctttcctgattctgaggctttgggacttggactgagccatgctaccagtatccctgggtctccagcttgcagacaatctgctgtgggacttctcagcctctgtaatcatgtgagccctttctaactcataaaccctcttttatatatctatgtatccgattggctgtgtctctttggcgaaccctgactacgtatacttttgtttgaattcaaagtatttatccctacctgatattacatcctatatctgtttgttttctgtttcttccattagaatacaagtttcatgaggacagggactttatccatttgtttactgctgtatcttaggctcaaagttggcactcaataaatattggttaaataagtgaattacaagcaggttggattattaggtaatatggttcgcagtgtgggactcctgaactccaagatgtctttgaaagtagccattttttaaatttctaatggtttagtcagactacagattacttaataacagggactatagttgattcatggatatatccccagaatcaggaacagtttctagaatacacttgagtgctcaatagacatagctattatagttaattgaaatggaattggcaatgtgggaaataagaaatcacatttttggccaggcacagtggctcacacctgtaatcccagcactttgggaggccgaggcaggaggatcacttgaggtcaggagttcgggaccatcctggccaacatggtgaaaccccatttctactaaaaatacaaaaagtagctaggtgtggtggcgtgtgcctgtgatcccagctacacgggaggcagaggtgggagaatcgcttgaacatggtagacagaggttgcagtgagccaaaatcataacactgcactccaggctgggcaacacagcaagactccatctc

SEQ ID NO: 1235 - DNA, 2516 bp, Homo sapiens
atcagcgctgcgaatccccgggttatcgacgacagcagagcccgcaagctctccacagatctgaagcggtgcacctactatgagacgtgcgcgacctacgggctcaatgtggagcgtgtcttccaggacgtggcccagaaggtagtggccttgcgaaagaagcagcaactggccatcgggccctgcaagtcaccgcccaactcgcccagccactcggccgtgtccgccgcctccatcccggccgtgcacatcaaccaggccacgaatggcggcggcagcgccttcagcgactactcgtcctcagtcccctccacccccagcatcagccagcgggagctgcgcatcgagaccatcgctgcctcctccacccccacacccatccgaaagcagtccaagcggcgctccaacatcttcacgtctcggaagggtgctgacctggaccgggagaagaaggctgccgagtgcaaggtggacagcatcgggagcggccgcgccatccccatcaagcaggggatcctgctaaagcggagcggcaagtccctgaacaaggagtggaagaagaagtatgtgacgctctgtgacaacgggctgctcacctatcaccccagcctgcatgattacatgcagaacatccacggcaaggagattgacctgctgcggacaacggtgaaagtgccagggaagcgcctgccccgagccacacctgccacagccccgggcaccagcccccgtgccaacgggctgtccgtggagcggagtaacacacagctgggtgggggcacaggtgccccccactcggccagcagcgcatccctgcactctgagcgccccctcagcagctcggcctgggctggcccgcgccctgaggggctgcaccagcgctcctgctccgtttccagcgccgaccagtggagtgaggccaccacttccctgcccccaggcatgcagcaccctgccagtggcccagctgaggtactcagttccagccccaagctggatcctcccccatctccccactccaaccggaagaagcaccggaggaaaaagagcaccgggaccccccgaccagacggccccagcagtgctactgaagaggcagaggagtcgtttgaatttgtggtggtgtccctcactgggcagacgtggcacttcgaggcttcaacggcggaggagcgggagctgtgggttcagagtgtgcaggcccagatccttgccagcctgcaaggctgccgcagtgccaaggacaagactcgactggggaaccagaacgcagctctggctgtgcaggccgtccgcaccgtccgcggcaacagcttttgtatcgactgcgatgcacccaatccagactgggccagcctgaacctgggtgccctgatgtgccttgagtgctcaggcatccaccgacacctgggggctcacctgtcccgggtgcgctcccttgacctcgatgactggccgcctgagctgctggctgtcatgactgccatgggcaatgccctcgccaacagcgtctgggagggggcctcgggtggctactccaagccagggcctgatgcctgcagagaggagaaggaacgctggatacgggccaagtatgaacagaagctcttcctggccccactgccaagctcagatgtgccactggggcagcagctgctccgggccgtggtggaagatgacctgcggctgttggtgatgctcctggcacatggctccaaagaggaggtgaatgagacctatggggacggggacgggcggacggctctacatctctccagtgccatggccaacgttgtcttcacgcagctgctcatctggtacggggtggacgtgaggagccgggacacccggggcctgactccactggcatatgctcgccgggccggcagccaggagtgtgcagacatcttgatccagcatggctgccctggggagggctgtggcttagcgcctacccccaacagagagcctgccaatggcaccaacccctctgctgagctgcaccgtagtcctagcctcctataaggcccaggaagagggcagaggggccagaaggactccatggcccaaagaccctcctccctgcaggcactgtgggaacagacacagagatggagaagcagggacatgctgagaggacgaagccaaggaaattagggaggagagtcaaagggatcaaggagagttggggatttgagctgcagcagagagggatgagggatttagccctctgccctaaggtgccattgaaaagggacaggacccttcggaggtgcctgtgaggagaggggagcaggacctctccctcctccagatccctgcctcctagtgccagcccctcacacgccttcatcctgaaacaggaagaggacggcaccaagttgggggtgctggatgaaagagacgaggggtgatctgtgagtcccatgtaaactttgtacattggaatatttatgtttgtgtacatatttgatgtgtgtgtgtatgatgagccaataaaccagactgtgtgcgtg

SEQ ID NO: 1236 - DNA, 4226 bp, Homo sapiens
gtcgctgcggccgaggctccggcccccaggaccactggctgcccatgagagatgaaggatggcatccaagggggccggcatgtctttctcccgcaagagctataggctgacctcagatgctgagaaatccagggtcacaggcattgtgcaggagaagctgctgaatgactacctgaaccgcatcttttcctcttctgaacatgcacccccagcagccaccagcaggaaacccctgaacttccagaacctgccagaacatttggaccagttgctacaggtggacaatgaggaggaggaaagccagggacaggttgaagggcggcttggcccatccactgtggtcctggaccacacaggcggctttgaggggcttctcctggtggatgatgacctgctgggggtgattggacacagcaactttggcaccatccgctctaccacatgcgtgtacaaagggaaatggctctacgaggtcctcatctcctcccaggggctcatgcagatcggctggtgcaccatcagctgccgcttcaaccaggaggagggggttggagatacacacaactcctatgcctatgatggcaaccgcgtgcgcaagtggaatgtgaccacaacgaattatggcaaggcgtgggcagcgggggacatcgtgagctgcctgattgacctggatgatggcactctgtccttctgcctgaacggtgtatcactgggcactgcctttgagaacctgtccaggggcctgggtatggcctacttcccagccatcagcctctctttcaaggagtccgtggccttcaactttggcagccgtcctctgcgctacccagtggcaggctaccggcccctgcaggacccaccgagtgctgacctggtgcgggcacagaggttgctgggctgcttccgggcagtgctgagtgtggagctggaccctgtggaggggcggctgttggacaaggagagctccaagtggcggttgcggggccagcccaccgtcctcctcacactggcccacatcttccatcactttgcaccgcttctgcgcaaggtgtatctggtggaggctgtgctcatgagcttcttgctgggcatcgtggagaagggcacacccacacaggcacagtccgtggtgcaccaggtcctggacctcttgtggctcttcatggaggactacgaggtacaagattgcctcaagcagttgatgatgtctctgcttcggctgtaccgattctcacccattgtcccagacctgggcctacagatccattacctgcggctcactatcgccatcctgaggcatgagaagtcccgcaagtttctgcttagcaatgtcctcttcgacgtgctccgctccgtcgtcttcttttacatcaagagccccctgcgtgtggaggaggccggcctgcaggagctcattcccaccacctggtggccccactgctccagtagggagggcaaagagagcacggagatgaaggaggagaccgcagaggagcggctgcggcggcgagcctacgaacggggctgtcagcggctcaggaagcgcatcgaagtggtggaagaactacaggtccagatcctgaagctgctgctggacaataaagatgacaatgggggtgaagcttctaggtatatcttcctgaccaagtttcgcaagtttctgcaggagaacgccagtggccgggggaacatgcccatgctctgcccccctgagtacatggtctgcttcttacaccggctgatctctgccctgcgctactattgggatgaatacaaggcttccaatcctcatgcttccttcagtgaggaggcctacatcccgccccaggtcttctataatggcaaggtggactactttgacctgcagcgcctggggggcctcctctcgcacctgcggaagaccctcaaagatgaccttgcttccaaagccaacattgtgatcgacccactggagctccagtcaaccgccatggatgacctagatgaggatgaggagccagccccagctatggcccagcgccccatgcaggccctggctgttggggggccactgcccctgccccggcccggctggctcagttctccaactttgggccgagccaaccgcttcctcagcacagcggctgtgagcctcatgaccccacggcggcctctgagcacctcggagaaagtgaaggtccgcacgctgagcgtggagcagaggacccgtgaggacattgaaggcagccactggaatgagggcttgctgctggggcggccccccgaggagcctgagcagcccctcaccgagaactcgctgctggaagtcctggatggggcggtcatgatgtacaacctcagcgtacaccagcagctgggcaagatggtgggtgtctccgatgatgtcaatgaatacgctatggctctgagggacacagaggacaagctccgccggtgccccaagaggaggaaggacatccttgcagagttgaccaagagccagaaggctttctcagaaaagctggaccacctgagccgccgtcttgcctgggtccatgccactgtctactcccaggagaagatgctggacatctactggctgctgcgcgtctgcctgcggaccattgagcacggtgatcgcacagggtctctctttgccttcatgcccgagttctacctgagcgtggccatcaacagctacagtgctctcaagaattactttggtcccgtgcacagcatggaggagctcccaggctatgaagagaccctgacccgcctggctgccattctcgccaaacactttgccgacgcacgcattgtgggcactgacatccgagactcactgatgcaggccctggccagctacgtgtgctacccacactccctgcgggctgtggagcgaatccccgaggagcagcgtatcgccatggtgaggaacctcctggcgccctatgagcagcgggcctgggcccagaccaactggatcctggtgcggctctggaggggctgtggcttcgggtaccgctatacacggctgccacatctgctgaaaaccaaacttgaggacgccaatttgcccagcctccagaagccctgcccttccaccctgctgcagcagcacatggcggacctcctacagcagggtcctgatgtggcacccagcttcctcaacagcgtcctcaatcagctcaactgggccttctctgaattcattggcatgatccaagagatccagcaggctgctgagcgcctggagcggaactttgtggacagccggcagctcaaggtatgtgccacctgctttgacctctcggtcagcctgctgcgtgtcttggagatgactatcacactggtgcctgagatattccttgactggacccggcctacctctgagatgctgctgcggcgtcttgcacagctgctaaaccaggtgctgaaccgggtgacagctgagaggaacctgtttgatcgtgtggtcaccctacggctgcctggcctagagagcgtggaccactatcccattctggtggcagtgacgggcatcctggtgcagctcctggtgcgtggcccagcctcagagagagagcaagccacatcagtgctcctggcagatccctgcttccagctacgctcaatatgctatctcctgggacagccagagcccccagcacctggcactgctctgccagcccctgaccggaagcgcttctccctgcagagctatgcggattatatcagtgccgatgagctggcccaagtggaacagatgctggcgcacctgacctctgcatctgcccaggcagcagctgcctccctgcccaccagtgaggaggacctctgccccatctgctatgcccaccccatctctgctgtgttccagccctgtggccacaagtcctgcaaagcctgtatcaaccagcacctgatgaacaacaaggactgcttcttctgcaaaaccaccatcgtgtctgtagaggactgggagaagggagccaatacgagtactacctcctcagctgcctagccctcacagcctgtgccatcctggaacctccacctttgaacccagagccaggctgggccctatttatgagctccctttgcccttctcctgtatcccacaccaccacatccaacctccttgcctgcctgtatcctcattggtgggagcccagccatggccctaattgtgcctgagcttgactttcagtcagggccacagtgagcattaaattattattccatac

SEQ ID NO: 1237 - DNA, 3321 bp, Homo sapiens
gttcgggcagctggagtgtacgggcccgcgggccacggccatgcagcccctggaggtaggtctggttcccgctccagctggggagccgagactgacccgctggctgcggagaggcagtgggatcttggcgcacctggtagctttgggcttcaccatctttctgacagcgctgtcccggccaggaaccagtcttttctcctggcaccctgtattcatggccttggcgttctgcctctgcatggctgaagccatcctactcttctcacctgaacactccctgttcttcttctgctcccgaaaagcacggatccggctccactgggcagggcagaccctagccatcctctgtgcagctctgggcctgggcttcatcatctccagcaggacccgcagtgagctgcctcatctggtgtcctggcacagctgggtgggagccctgacactgctggccactgctgtccaggcactgtgtgggctctgcctcctttgtccccgggcagccagggtctcaagggtggctcgcctcaagctctaccatctgacatgtggactggtggtctacctgatggctacagtaacggtgcttctgggcatgtactcagtatggttccaggcccagatcaaaggtgcggcctggtacctgtgcctggcactgcccgtctatccagccctggtgatcatgcaccagatttccagatcctacttgccgaggaagaaaatggaaatgtgagttcctgcgaacgctgaatctaggtgggacgcttgccttgaacatcatggttcctttggtgatctataagggatctatttaagaagtggtcaggttttcgcacttcttggctggtccagggactgcagaaaccaaagctgctattgttgaggaataattcagtgggtcaaaatggggagatgtactgggtatgagtggaaggtgatggagagcctgatcctgaagcctctacttgatgagagacagagttttgggtggtggtagtgatgtgctggtggtcatttcttgcttgtgtgcctgatgaaaaactgggttcctgtaagttatgaatggcatccagggatatttgggttacttttaagaaagcagtgtgatgtagtggagagagcccatgggtcttatttatgggatatggtcctcttaggctctgttgtacaaccttaggtacattccatatcttaagaccactgtttcttcatctgtgaaatgtttctaaacaatctctaagtcccttccttctctaatatacagcgtctgtcaggtcgatgtctcagaacactctcccagctgtggaccacgtggaccacttagcagactcagggggtagttctttactctccctttactaccctggagggacagctctgcccttgaggcccttcagaaatttgtgctgatttggtccctgtgccagggcacagggggtcaggcactgtggaaagaagggactcaggtgagggtcttctggactctaagacggtaaaggcactaaagtcactttaaagcttttggagaagcaggagggcattggcttaaccaagccgaaggctgctggctgggctgcctagcccagctaagatcttccttcagcccacctcaggatccgggcttgagggctgcagggcctgcgtgcgctccctcccccgaaatcacttctcagggcaaaggagccccaggcatctcatgctttgcccttcttagggctcaggttcttgccttagcacatagcttctgggagcttttttgaagcatttcataagggccaaggaagtggggcagggcttttctgatccaaagaaaacaaagtttctctggttacccctcttcccttgttatctaagctttcctcagttgtcatctcttcccagctctttggtccaagagggggctgagtttggtgtcagctggcaaatgagggctggactctcttccctccagagaccaccccgctccttgctgcagctgaaagtagttccccaggctgccctcggtggtgaggactggatgctagactgctgagctgtggtctgggctcagttgagaagataggatctccctagatcatggcaaggcctgacaacagctgagccaggaaagtgctgctgaggcaagtcgacatagctcacagggaactctgggaagcctggggtgtaggcgctggagctccagttcccaggagcaggggcaggtgttcctagatgttagtgttgtggatgtccttggtcttctgaagattcaggtcctcctctccgggtagcttagaagtaaggaggttggtttgattcaatagtacaagaatggggacagcaagggcagaagtgtcctctccacgtaactcattatgcccctcctgggggagattgcatctccaggacaagcatctaaaggaggcccctgctgtgcagaggggtattgttcctgtctctttcattgtcctccctcctctcaaactctccagtgtggtgtgaactcagaagaaacggttactggggctgcatggagaatttcacctgcggtgattttgatccagggactgcatctcctctttcctcatcacagccagtgctgagaggctccttctacctgccgcagggtaggagggccaggcaaagttcaccagcttgctctaagagcaagcaggcaatgccgtaaagcctgagcctgcctgaggtgctgcctcctcccaggtggtgcggggggtggtgggcgggcgggcaggcgtgctgacagccggcagtttgcgtgggctgtgccatctgatgtctattcccagccctggtaggaagggggagtcatttatattctgcaggaggaaggggccccagctgtcgcctttctgaccagcaggcctggagggcaggggcacagagcagagaggagggcactggtggtctcctgcttagcctggtctgactgcagtgtagggaataggtcaccaggaggagcccttcatcctggcaggccggattgtggagggacttccctccccctcttttccatttctccctccatcaccacctgccctcacatcctggggcagcagctggacagccattagacctcagtgccagggcactcttcctccagctgggatctcagtggctcccagctgcatgggctcctgcttgtgtgttccctcctccgccatcctctgttccccgcacctcccttattctgctcatgtctggggtattcacttggctcctcagcaaggaagcaaacgccttggaggagaagcacatggttgcccttttgtccttgctccctggctagggaaagctgctagtggtcagcctgttttgccttttttt

SEQ ID NO: 1238 - DNA, 3058 bp, Homo sapiens
ataatgaatgaagagacctggggaagaggccactctataaacagcagctgggatgggccccgcctgctaccaggaccctcctggccccagcacgggactcctgcacagaactctctccgctcctcctttgactcgtgcggagaactccatccgctcccctctcgactcctgcaggtaactccgtccgctcctccctcagctcctgcgggtaactccgtccactcctccctcgactcctgtgggtaactccgtccactcctccctcaactcctgcgggtaactctgtccactcctccctcgactcctgcgggtaactccatccgcttctccctcgactgctgtgggtaactccatccactcctccctgaactccttcaggtaactctgtccgctcctccctcgactcctgcgggtagctccgtccctcctctgtccgctacagggctacagagggagtagctctgtcctcctctcagagctacagagggagtagctctgtcctcctctcagagccacagagggagtagctctctccgctcctccctcgactcctgcaggtaactccatccgctcctccctcaactcctgcgggtaactctgtctgctcccccatcaactcctgcggagaactctctctgctcctcccttttggctgttgggttgcccaccacaaatagccagcaccttccgcgcacctggccacaggcccttcctctggggccgggcctgggaccccagcctcgagctcccacgagtcctcctggaccctggagagcacacctgggaacaaacacaaccccagagctcagggacgacctccggtggccctagccatcccttccagtgccctggccctgcaggggcccccaagtgggctgccctgccctgctcccaccaagcaccagagcctggtgagggtgagggtggcctcaagagaccgactctgaccttgctggctcaccctgaggaagccaccagcgagctgccctacgcaggggcccacaaggcaaagtgcaagaacacacccccaccaacagcccacaaggagcgggatcccaccagcagccgggcactaggaggtgacagacgctgctggttcaagttgctaagtccaggcaggagacgctgggtgaccgccaggcccagcccttctcagctacggaggccaacacctccccacctcaggcaagaggagatggtgccaccacagaggagggatgcagcagaaaagaacctcgcatctggagaagatccaggacagcgtgaaggctcatctcacaaacacgctccgagtgagcaaaagcatcaagtgggaagagcaggagggttctctctcgtggtcctggagccctacgtgcaaggcttctgtctcatggtcctggagccccacgtgcgaggattctctctcacggttctgggtcctgggttctctcttgcagtcctgagttctctatcacggtcctggagttctacgtgtgagggttgtctctcacggtcctgtagccctacgtgcaaggattctctctcacggtcctgggttctctatcgcggtcctggagccctacgtgagggttctctctcatggtcctggagccctacatgcaaggattctctctcaccatcctgagttctctatcgcggtcctggatccccacgtgagggttctgtctcatggtcctggagccctacgtacaaggattctctctcatggttctgggttctctcttgcagtcctggagccctatgtgcaagggttctctctcacagtcctggagccctaagtgcaaggattctcgctcacggtcctgggttctctatcgcggtcctggagccctatgtgtgagggttctctctcatggtcctggagccctacgtgcaagggttctctctcacggtcctgagttctctatcgcggtcctggagccctatgtgtgagggttctctctcatggtcctggagccctaagcacgagggttctctctcacggtcctggagccctacgtgcaaggattctctctcacggtcctgggttctctctcacggctctggagccctacatacaaggattctctctcacggtcctgggttctctctcatggtcctggagccctacgtgcaaggattctctctcacagtcctgggttctctctcacggttctggagccctacatacaaggattctctctcacggtcctgggctctctctcatggtcctggagccctacgtgcaaggattctttatcacagtcctgggttctctctcacggttctggagccctacacacaaggattctctctggcagtcctgaagccctaagcacaagggttctctttcacggtcctgggttctttctcatggtcctgggttctctctcacggtcctgggttctctctcgtagtcctggagccctaagtgcaaggattctctctcacggtcctggatgtggaagcgggaggtcagggcagagccagcttccaggctgcacctactacctcctccttgggcctcgcaaggtgggaaaagggcaggctcgccgtggggactggctatcaggacactgatccaacagggcaggggggactacacccgcgtgccctcactcaattctagtcactcccaaaggccccaacacccaacacctttgagggtttcgaaggatgaacattcagccagggcagcccatcaacagggtggagtacgtgagggcgcatcagcgagaccagactccagcagcctggagggggcgaggctccaatgcaaacaaactttccaaatttgagacaacttgagaaatgtaaatgctgcctatgtgacaataagagtgaatgactatctctgagagacacatgtcagaatatttaataactacttaatgatcaccctggcccggcagggagtcacccaggtccgtgacagggacgaggcaccagcacaatctctctcctttgtgtgtgtctgaaacgttccacaaattttttagaattatctctgcttatatttattgatgtgaaaaaaaaaaacctaggacaaactgttgagtaaaacatagcagtgaac

SEQ ID NO: 1239 - DNA, 2196 bp, Homo sapiens
agttcaagcacacaccaactagctgtccaggaagcagcctaaccagagagaggggcgtgggagggagagaggcggggaaaagcagcgtctccgcttttcttctcacgtcttgccgcggagaagtgggttcctgggcagtgcagattttttttttttaattcaagattttctttaatttcccgcctaaagcctccccacggtagggccgcatcccctgtaataaaatgaattctgattcgagctctgtctccagcagagcttcatctccggacatggatgagatgtacctgagggaccaccaccaccgccaccaccaccaccaggagagccgtctcaactcggtctcgtccacgcagggcgatatgatgcagaagatgcccggggaaagcctctcgcgggctggcgccaaggccgcgggagagagcagcaagtacaaaatcaagaagcagctgtcggagcaggacctacagcagttgaggctgaagatcaacggacgcgaacgcaagcggatgcacgacctgaacctagccatggacgggctgcgcgaagtcatgccctacgcgcatgggccgtcggtgcgcaagctctccaagatcgccacactcctgctcgccagaaactacatcctcatgctcaccagctccctggaggagatgaagaggctggttggcgagatctatgggggccaccactcggcctttcactgcgggaccgtgggccactcggccggccaccccgcgcacgcggccaactccgtgcacccggtgcaccccatcttgggcggcgcgctctcatctggcaacgcctcgtcaccgctgtccgccgcctcacttcccgccatcggcaccatccggcctccccactcgctactcaaggcgccctccacgccgcccgcgctgcagctgggcagcggcttccagcactgggctggtctgccctgcccctgcaccatctgccagatgccgccgccgccgcacctgtccgctctctccacagccaacatggcccggctgtcggccgagtccaaggacttgctcaagtgagcagcgggcgggcccggctgccaaggaggagggagagcggcgggaggggccgcggtgccgggccgggagggaagagggaggctgcacgctcggcccacgggagggcaggctccggggcccgcagcctcccacgctgtctgagagatctcagactccacttgacccccggagggaaaggaccaaaatcaaaccgcaatttctaggtggtagcaaagggggactcgaaccagatgtcgtgtgttttgcatgcatgcttcttttccccatgccgcgccagtatttttcactgccatatgctcttgtcaaaactgcatttgttgtataaagatgggatcggtgtagttaaaaacttgcgaagggacttttgagttggctttctctgactctgtgttctcgctttggaaaaagacggccatcccttttgtgcaaaacaaatgtaaatattttcttgagatggatgcgattatgattgtctctgtccttgccacagtttttctagagacaatggagagagaaagagagagagagcgcgagagagatcaagacccaagttttgaatctcaaccgaggtccagggcatgacacctcctatgtgggttttcctttcgacgcagtgtaggtcaaaagaatgcatgcacgcttctaaatgaatcttgtctgaatatgtcgtgcaggctgtggtgccgttttccttgtaacaaggatttattagtgaattatcccaagtactccatatatctgtctgtggttgtatgaaatgaaaaaaggggcagagtgcaaagacccacactcacgcacacgcgcttcttctcccacccccacccccttcaaactttattcggaaccttcctttgctgttctggggccgctattgtaaaagcctgggctccctctagtagcttgcgccaccccccctcgctcagttattctgcatgcggggttggctctctctattatcagctttgaaaacttatcctggttttgggaggggtgccgtttttattttcctgaacatttgcttgaaatattttgttagggcctcaaagacgatacctgtctttattttttatatattcttgataactatgatatatttattaataaccagtgtttctggatgagatttcaaataaaaaagaacctttaaatcgtg

SEQ ID NO: 1240 - DNA, 2104 bp, Homo sapiens
gagttgtttgccggctcccgggccgccagacgctcggagggagcccggccggctcggactgggcggccgggagggagggcgccccgggtcacgacggcgcccgcaagccgagcgcggccgggacgtgcaccatggacccaaaggcgggcggcggcggcgaggaggacgactgcgtggactcgggcgccgagaccggagggtccgactacagccacctgtcctccacgagcaatggattctccacctggcggatgccatgttgcctgttcctttactgtacacacggtgacaaagaaaagggaagatggagcctccaggttgaacatacctggccctcaggtgagctttccgttgaagaggcgcaggaccctttcctggtcagcatccacataatcgcagacccaggggagtcccagcccctgcaggaggccatcgacaacgtcctggcgtggatccaccccgacctcccgctgttccgggtgtccgagaggcgggcgtcccggcggcggcggaagccccccaagggcgctcagccagcgctggctgtggtgctgttcctgcaggaggagtacggcgaagagcagatcctgcagctgcaccgcacactgcagcagccgccctggcgccaccaccacaccgagcaggtgcacggccggttcctgccctacctgccctgcagccaggacttcttcacgctggcccctgggacgccgctttgggccatccggcccgtgcactacggcaaggaaatcgtgcgcttcaccgtctactgtcgctacgacaactatgctgacagcctcaggttctaccagctgattctccggaggaaccccagccagaagaaagcggacttctgcatcttccctattttttccaacctggatgtggacatccagttctccctgaaaagactgccctgtgaccagtgcccggtgcccaccgactcctccgtgctggagttccgagtgagggacataggcgagctcgtgcctctcctgcccaacccttgcagccccatcagcgaggggcgctggcagacggaggaccatgatgggaacaagatcctcctacaggcacaaagggtgcataagaagtttcctaaacctggcagagtacatcatgcctccgagaagaaacgtcattccactcctttgccgagcactgctgtaccaagccatacacctggcagcagccagcagtccccgctcaacagtcctcacccggggcccatccggacaggcctgcctcctgggcaccagcaggaatttgccggacgagccaacagcacccccaaccctccctggtctttccagagaagcaagtccttgttttgtttgcccacgggaggcccctccctggcctcctcagctgaaccacagtggttttcaaacacaggtgccccagggcacagggcatcagagtggaggcatggccacctcctctccatcgatgacctagagggggcccaggagacagacgtggacacaggcctgcggctgtcctcatcggacctgtctgtggtctctgcatattctgcacccagtaggttctgcagcacagtggagacacccctcccctccgaaagatgcagcagccactgggcagctcacaaggattccagggagggaccactgcccactgtcagcagggtgaccacagaggcctcctgggcttccctccctttcttcaccaaaaggtcttccagctcctcagcgacagctcgtgctgctcccccagctcccagcacctccaccctcacagactcctccccacagctcccatgcgatacccccaaagtcaagcagactgatggagacatgccaccacccccagggtcggctggccccggggataacgacatggaggaattctacatctgaatgccctctgctcttgttctcgaaacacacaaactcagagacacagactcaggccccactgcccctctggccactgagcacaccacattcttcatgatccatttcccaggagcccgtagcacatttgcctaccacccactcttagctggggggtggtatatctctagagacacagcagaaaaatactggcatttttatgcaaataaattctcaacaaacttgtc

SEQ ID NO: 1241 - DNA, 2784 bp, Homo sapiens
cggataaaaaaatcaatctaccaatctttagcagtaagagggaaagttagacctcagctggggaactttcctgtccatgtccacagatagagcagaggacaaagccataggttggatcagaagtgtccttttaggagtcagagttgggagaaggagacatcctgggactgttcatcctagttaatgaagtgggcaattctcaggccattagggggttttagagcagaccgacatataattagtcagcatttctcagcccagccaggcctgctgctagtgtgggaggggtcctgctcaccatctgtacccctggcttggagcctgctggtaccctgggggttgtggggataaggaggcatcaggccgggcgcgctggctcacgcctgtaatcccagcactttgggaggccgaggtgggcggatcacaagttcaggagatcgagaccatcctggctaacacggtgaaaccccatctctactaaaaatacaaaaaattagccaggcgcggtggcagtgcctgtagtcccagctgctcgggaggctgaggcaggagaatggtgtgaacccgggtgaacctgggaggcggagcttgcagtgagccgagattgcgccactgcattctagcctggatgacagagcaagactctgtctccaaaaaaaaaaaaaaaaaaaaaaaaaagaaggcatcaaaagcctccacatcacagaagctacccctgtacagcgtgaagtttcctaagaggtcagtagtttgattctggggtctccttagaggctcaggccagggacctttctctcctcccatgctgagtttcatgatggctttcaggggagcatcagctgttagagtcacccctaccctgtcccttaaaggaaagacggtggagaggacggctgagcgcctgttgtcaggaaagacagtactggtctgttttctcgggagtctggtttcagattgtcctgtattcccttcctggctctggtcccactggcctcttttcggtgacattctcccccaggagccatccctggcccttccctcccccagccctagccagttctcccagacacactggaagagaacactgaccttacccaactatctgctgggatcccacccaaatttatagcccattcctccctcattcattcattcagcaagtatgtactgaacaccaactgtgtggcatacactggcttgggagattgcaaggaccagtctctaagcttttggaggccagcccagtgtggaagagaggtacctcaggtgtgagggtgccatggctgagggatatttgtacatgtatgggatgctatgggagctccttgcagcctgagaagccagtcctgtgagccaggtcctgagggttgaagaggagttttccgggcagggaaggggtaggaaaggcactctgggcagagggtacagcatgtgtaaacacgtggagatgagaatgagcatagcactgttggggctcccatggcagggagaatagaagacaaggctaggaaggtacactgaggctactgcagggtccacagaggaatcagaatttcattctgaggatgaatgaaatcatcctcagaggatgaagccaccaggaatttcaggcagagagtgaagtgatcagagttgttttttggatagatggttatctggatgtggtgttggagctgggagatttggctctgaggtgtgtcatttaaaataatagcttctcggcagtggctcacacctataatcccagccaagattcctcctttgggaggccaagctgggaggatcgcttgaggccaggagttagagactgcagtgagctatgatcatgccattgtcttccagcctgagtgtcagagtgagaccctgtctctaaaaaaaattaaaaaataaaaaataaaaaatagcttctcctttcccttatgccaggttccagtcttgagaggaaaggaatccctacccaccactccctggatcatcagatatccctatcccaacctctcctatgggactagttcatctcagccagtctcaaagattctaggataacttcaatggcatttgaaattatctaagtgtgcttggataaccaccccctcaaactgagacctggttagggactgactcaaagaccctgagtcctcggctaagggtacaggagagggcaggggctccaggcccagctaggtggatctccatctgtctctgaggactgaccctttccccacaaggacctgccataaaaatcgacttgcgatttttagctgagtggcttctcttttccactttggacttctcagtgtatagcaggttcaagcctgcaaccaccaaagtgcagagtgtggagtgtttgtgccccctctttcctccaacctccatatcctgccatgtgagctcagggaatgcaaatgcatttaaatatccatctaaagcaaacataattagaaaaatcaatcagctggaggaccccccaaagtttaatacattttcaataccaccaggaatggatttttggtccctttctgcaggtctgggttgccagacgttttatttctggggaggagggctctgggctaaggagctcagtgggtgggaggagggaatgggactgttgctgatcctcaaaggcctctgtaggatggagggaggggaccttactcccttccccaccccagatgcaggagtcacccagcttccttctctgcgctgtttccttcacaaattagacattggtttgggaaacaatgtagcctcgttaaacatttaatgaaataaacaaataatcac

SEQ ID NO: 1242 - DNA, 2122 bp, Homo sapiens
aacgaccgggcctcttccggaggcctgcggcagagtcgcctaagcatttgaatggacctcagccctaggaccctggcgccctcggaaaccggatctgaggtccggatcactaacgttcagagatgcaagggaagccgagaagttgccgaaagggcctgagagctgcttctccttctccctgggcagcaaacctccaagcctgtgcgggccaatctttgcatcctggtaaccagcgctttatttagcgcctaatcgctttcctgtcctgcaatggagactgagggcagaggagagtgcagcttatccaagatctcaaggctagtaattggtgagaaaattctgcacagaaccattcccagtggtgagactgtttttgtccttcagcccgggaaaggcagacctggctccctccttttatttgcaagcctcaaaaccatcaagacaggcaaagacactcgaagggcgcggaccttcgctgagacgccacccacgcaagtggaggaagcacttgcgccactgctgagcggttggaaggggaacactgcagcgatgacccacgagtgtcaacgagaccaggtgcccattagggaaacagagatggagaagaaatcacgcgccaaggtctgaaattcggcgtggctctcactcgacatctccccattctcgccacccgtgcacccgcctgcagcggcgcaccgggctcggtgctgcacctgcctcctggcgcctgcgccactgcccccgcgcgggtcccaccgcgcaggacgccccttcctgcttccgacgtctgctgtggatcacacgcggtcgctgccaaagcctccatttcggttctgacccagtgactttggggacgcccagggaggagatgtggagaggatgtggccaaggtgaaccagccagtgtaagtgctaatgcttctggcttctcggtaacacctaccctgccccaccacccaaatcgggccttgatcaaaaaagaagcgtcttgacaatacatttttagacataaataagttgaaggtgcccacggagggaggttgaaaacatttgattatcaggacagagtagaagcctgtttggctcatccttttggccagctctaaagcagcagtggacacttctttgcgattttgcaaggatgtttgtgaatgtactttgtaactcctagaaaataggcaaaaaaccgtgagtggatgtagtcgcaccgctggcacctgtaagaacgcgccctaaagctgtggaactgctattcaggttccaggcacacgtctcaagcctcaaacctccaagagttgccttagctgctcattttactggtaagaagacggaggtcaagcctgaagatagtggctctgctgttttcttaggctgcttgaagctttagataagcaggaaaattccatcaaagaaatccctgtatgtaaattgggagaaaaagatatgatgaatattaatgcagaggcctctgaacaaatggaacctccattttcacatccagcacaggatcatttgcagccagacaacctgagagtcaaccccaactctaccttttactaattgcatgatattgggcctcagtttgctcatctgtaaattgggtgcagtgatagaatctatcccacagggttttgctgagcattaaatgagtttaaacttgtagatggcttagaataatgcctggcatgtagcaagtacgcatttactggcgcctggtgtatatagtaagtactcgatatacattaactatttttcaaagacaccacagctcacctgggaaggaatctcaggtatttgcctgagattcaagcaaacaaatatggaagctaccaaaggctcatgaagcctgaaggatccttgcagagagatgttctaaatgttgcctagaaaggcagtttggagggaggcctctccagtcagaggtctggatgctaagtttagctctgccacatattagccaggtaattttgaagtaataaacaatctctttgtgcctccatttcttcttgtgtaaaatgaggggctgttgtgaagattaaataaatacatgtaaagcatttaaagccagacctggcagaaagggtgctttatgtttgctttaaaaatatatatgtacaacattt

SEQ ID NO: 1243 - DNA, 2247 bp, Homo sapiens
aattacaacatgcttccttacttgttaccatcatatgtaaattattacttattttgagttctccaggaatgttagccttagaacactttattaacatcctctcacattttgttttactattctcatgtatttcatttcacacacactttaaagcccccaaaccattataataatatactaaaatatgtacgaatatatactaataattagtatataatgaatcagtataaaatatataatatacactaatatgtatactaataaatatacactaatatataacatactaatatataataatatatgtttttagtatatgtggttgatactcatttatatttacctacatacttgcctcttttgttgctcttttatttcttcctgcaattctgtgtttccctgtgtgattatttttcttctgcctgaagaacttctttttgtttttctttttttgtttttttttgtgagatggagtctcactctgtcgtccaggctggagtgcagtggtgcgatctcggctcactgcaacttctgccacccccgagttcaaaagattctcctgcctcagcctcctgagaagctgggattacaggcgcctgccaccgcattcggctaatttttgtatttttagtagagacggggtttcaccatcttggccaggctggtcttgaactcctgagcctgtgatccacccgccttgaactcccaaagtgctgggattacaggcgtgagtcaccgtgcctggccgaacttcttttatttttcccattagttcatatttcctagtgatgattttttttcagtttttgttggtgaggaaacgtatttattctcctttcattctgaggaatattttccctgagtatagagttctaatttggggaattagaattttttcctctacagatagccaattatcccagcactgtttactgaagacttccttgaatttccttgacatttttcaaaaaattaatttccatattagcatgggtctatttctggactctctattctgttccattgatatatctattcctatggcatttataccacactgtattgattattataggtttatagcaagtcttgacattattataggtttatagcaagtcttgaaaatcttatggcatttataccacactgtattgaaattacaggtttatagcaagtcttggctagttgttttatgctaaaacaattttgaaaaaagaacacaattggaaaaacataaccaaaacatgtgcatttccatataaattttagaatttgcttggaaatttctacaaaaagtcttgctggaattttgattggtattgcattgatatatcaatctggggagaactggcatcttaaaaatattgagtgtcccagtccaccagcctggtatgtttctctgtttatttaagtatgctttagtttttctttaaatattttgttgtttttactatgtgggtcttgcacatattttgttaaattaatgccaaaatattttaattttcttaatactgccataaattgaattgttatttacatttttattttctattctttcactatatatagaaatacaattaatttttgtgttttgaacatgtatcctgcaactttactaaattgacttatattaatccttgtaacttttttctggatttcttagagctttgtacatacaaaatcatgtctgcaaataggacagttttacttcttctttccaatttgcctttttctttttcttgccttattcactatctgggtcttacaatacaaatttaaatgcaaatagtgagagtggatatgcctgctttgctttgtttgtgattttaggtagaaaacattaaatcttcaccattgagtttgatgttagctgtagattttttttataaccttaattggatgaggaagacttctattcctagttgttgagagatttagtgatgaaagagtgttgatttttatcaaatgttttttctgcatccatttaaataattatatggttctttttctgttttctattcatagagtagattatattgattgattttctgatgttaagccaaccttgcattctgagataaaccccacttggatatgatagatagtattctttttacatgttattggttcttatttgctatattttgttaggaactttttgtttctatgctcatgagtaatattgctctgcagttctattatcttgtgatgtatttgattttctaataaaggtaatgttagccccat

SEQ ID NO: 1244 - DNA, 2059 bp, Homo sapiens
aagtaccagatggggaattgcccatgtgatggtgaagagtctctcacattgattttcttccttttctcctcttctctcctccttctcttctctcctctttctcttctcttctttctcttctcttctgtcttcctcttcctcttctcttcctctcctcttcctctttctctctcttcctttttctcttcctctttctctttctctttctcttctcttctctctctcttccttccttctttctttccttccttccttccttccttccttccttctttccctccctccctccctccctcctccctttttctttttctttctttttttttggtttggcagagtcttgctctgttgcccaggctgcagtgcagtggtgtgatctcggctcactgcaacctccacctcccgggttcaagcaattctcttgcctcagcttctccagttactgggactacaggtgcataccaccatgcccggctaatttttgtatttttagtagaggcggggttttgtcatgttggccaggctgatctcaaactcctgacctcaggtgatccgcctgcctcagccttccaaagtgctgagattacaggcatgagccgctgtacccggcctgattttctatgattctgcctttaaaagacagcacgtataccaagcctttttcagaaagcttttctcttaactccttctaatgctgaattttctctctattatcctcacccaattttggctgagagttagtgtacacaatttaacttcttagaaaaattccagtgtctatgcttatattgctcacttgaatcatttgaattagaaagggatctacaaataataaaagcaaagagtgcagacagattagggatagtaattcttaaagtgccatctatcccagatttccgttatagaccagcatatgtgtaattgtgcagtgggaggtaagtagtacccaggacattgcatgtacaatactttgaaacaaagtggcaacaaagatttcctggctcaggtatgcaccccagctgctggtttagatgaagtgctgagaatatttagaaaaagcgctttaaaaagcatctagagattatcatgaaaataattggagacaaagtcactaggctgctttgtgagaggcagcataccatggctctaaacccgttcacaaaaaacaatgttagagacattaggaattcaggttttgaaaatctttttttcgatttatttgtaatttacataccaaaaaaccacattaaaatagtcctcccttcaacatggctatcttttttcaagttttatatgcatagctctctcagcacttgaatggaaaaactgttacagcatttgggagttgtttttcttttagacatttgcagatcttatctcaaggtgactaggaacccagagctaagtatctgtgaggcaatctctgcgaacgctgaacttacctagttggtttctatgaaatatgtagaatgcactgcagtagccattgtaagaaggtactataccggttttttggggcttgttgttgttgtttggtctgagaatgtactgccaacccctcttttataagagagaactgattttgatacatattttaaaatatgatagtacagagttaatggatgttaaaattttatttctttgttttggtaagtagattaaatcgagaatcatataatcagtacatttgagaattatataaccagtatataataatactggacacaaccatttgccatcttttcctgttatcatcccatagagtgggtggggagaatgaatagacataaacctagaataatgataaatggtttttaaaactctatattgaatacattccagctgataatgacttttctttttcaccttggtgatatcagcctcagggtaaaaaaaaaagtttcataaatcttttagttataaacaggaaagttttatattagtgtgtcatttcatttctagactgttgatggtgatgatgataaagaatttggagccaattttgatatatgaatgtattgcttttacatgtgatgattaaagctctccattagcagtt

SEQ ID NO: 1245 - DNA, 2063 bp, Homo sapiens
gaacactcgttgggacacacttgctgtggaaaggacatccttactgtggaaatgagctactaactgcaggtctccttcctcttcatcttccttatccttctgttccattgctcagtaatgctcctcttcatctgtctcattctccacttgtctgcttgatgcaggagctgaggagctgcacagcaaggttaaaagagctgtaacacaaacagggctgcaacatgccccttgctccccacagggagagaagagctctggccctcggagaagcccagacctgggagctccttgagcccgggctgtgactccctctttggggccctggttggcgtcactgcattcgccagtgccactgttggaagctgcttgtgatgcgcctggtccagggggaagctgtttgttgtgtgcctggtccagccacctcatggagagcctgtgctggcacctggagctgcccaacctgggcagcagcttgtgtgtgtgactgcacagtggccacgcttgctcacacacccctagcacacccctctgctccacccgtctcaatctcccttggatccgggatccaggttggtagcaagtgcgagtgggcagaagcagcccagtgggcccagagcaaaactcaggcaaaggtgccactagactggccaggaaagcgacaccctaaagatcccataatgctgatatgttaattctattctataagcaccacacagaagtgatagcttttatttcttattttgtctagcctggagacagagctaaggattccttgaactgcaaagtcttttccagttcttagtttatacaatccatactcaccttctgcctaactaagcattgtcatttttgtgccaaatgaagagtaggactcctacgattgtcctcagactctcttggctcaatcctcctgctttaacctttcctacttcaaaaactcctgaagttttgcttccccttctatagaatggaaatatatgtcgcaatacttactgcaaagaaaattatatattttaaaaatagactaaagagatgttgtgagacatcagacatcaatcagatgttgtgagaactgatttctgcatcagaatatctccttgactttacagctatcctttaatcctggctcaaagttccagaagaaagatgatccaatataatactcctatttggactttgagtcatacacattccttcttctgagaaaacgtgcttctgcatgaatcctcccttcattattttcagctcatctattattgaatctgaaaccccaggttaactgactgatcactctcatcagtggcagattttggtgtaacataggacacatcactcccaattcaggtcaagtcccaattatcttgcctctcaatatgacctgttcaatgttgtatttcattctacttcattttaatgtaaaaagtcttttctggtgaagtcagtcttttattttctcataaaaattcaccctttgggtttttcatagggtattcccataaccaaacacactttacactttcctagtacataacccaatactttcttctttccccacagtccttacatgaagcctactcagaccgacatcactgtatcattttttgtattctgaagtccttcagcacttgattcctttaagtttaatcttggtattctattgggaatcatatggaaatgtacaatgatatttattgaatgaacaggaaacagggaaagacattgaccagaaaaagtgtttattcatcaagtctttaaagatacaaaaacacgtgtcttctgtggagctctgagaacaggactccagcaaagcacttttcagccttgtggtcttcaagcatttccaagatctgtgacattggaaagaaaaaaaattaagacagatttgggtctccatgagcagagagtattctttcccttagttctgggtagcatagtgcccaaggaaacctaatcagtacagtgggaaaccaaatctattccaaatcattacccataagcaatcctatggactctctgaggtttgacagagtcagcggccctctccaataaatgtgtttttctat

SEQ ID NO: 1246 - DNA, 2610 bp, Homo sapiens
aaccgctgcctcgctcccggaagtggagggtctacacgaagcgccgctgggtctgggtgcccggaggcagcagcgttcgcggagttcgcccgctggcccccgatcaccatgtcggctttcgacaccaaccccttctcagagacaaatgcagcgacaacagttcctgtcacccaactccctgggtcctcacagccagcggttctccagccatcagtggaaccaacccagccgaccccccaggccgtggtgtctgcagcccaggcaggcctgctccggcagcaggaagaactggacaggaaagctgccgagctggaacgcaaggagcgggagctgcagaacactgtagccaacttgcatgtgagacagaacaactggccccctctgccctcgtggtgccctgtgaagccctgcttctatcaggatttctccacagagatccctgccgactaccagcggatatgcaagatgctctactatctgtggatgttgcattcagtgactctgtttctgaacctgcttgcctgcctggcctggttctcgggcaacagctccaagggagtggactttggcctctccatcctgtggtttctgatcttcactccctgtgccttcctttgttggtaccgacccatctataaggcctttaggtccgacaactctttcagcttctttgtgttcttctttgtatttttttgtcaaatagggatctacatcatccagttggttggcatccctggcctgggggacagcggttggattgcagccctgtctacactggataatcattccctggccatatcagtcatcatgatggtggtggctggcttcttcaccctctgtgccgtgctctcagtcttcctcctgcagcgggtgagtggtgtgggcagggctgacagcaaatgggaggaggcaggcaaccgtttcctgcccttgccacgagatgtttttcaccactgcagttgggcatcctaggcccccaaaggtccagtacctttctccagggatctgggtggggggtcaggcagtgccaggcttctggtgacccctttgggggtataacctggatggctggcttcctggtgggcccaaaggacaggcttctctcaccccacccctcttcgccaggtgcactccctctaccgacggacaggggccagcttccagcaggcccaggaggagttttcccagggcatcttcagcagcagaaccttccacagagctgcttcatctgctgcccaaggagccttccaggggaattagtcctcctctcttctctccccctcagcctttctctcgcctgccttctgagctgcactttccgtgggtgccttatgtggtggtggttgtgcccagcacagacctggcagggttcttgccgtggctcttcctcctccctcagcgaccagctctccctggaacgggagggacagggaattttttccccctctatgtacaaaaaaaaacaaagctctctttccttctctggtgatggtttggtaggattcttttgtctctggaagcagtgggactgaagttctcttcgtcctgtgcacacacagacacccccacacagttgggatcacaggctggcctgggcccatcccagctggagctttctgccagggtcctgggccttgactcccccaccctgcaggcctggcctgaatctggcttcttagacacagcccagtccttcctgcctgggctgggaataagcctctcacaggttctggtggacagatctgttccccaggtcactccagtggtctccaggcttccagagaaggctggttgcctcaagctcttctctgcctcataaacggatccagagaaggctggttgccttaagctcttccctgcctcgtgttcctgagaaacggattaatagccctttatccccctgcaccctcctgcaggggatggcactttgagccctctggagccctccccttgctgagccttactctcttcagactttctgaatgtacagtgccgttggttgggatttggggactggaagggaccaaggacactgaccccaagctgtcctgcctagcgtccagcgtcttctaggagggtggggtctgcctgtcctggtgtggttggtttggccctgtttgctgtgactacccccccccctccccgaaccgagggacggctgcctttgtctctgcctcagatgccacctgccccgccatgctccccatcagcagcatccagactttcaggaagggcagggccagccagtccagaaccgcatccctcagcagggactgataagccatctctcggagggccccctaatacccagtggagtctggttcacaccctggggggtgtgtcactgtgatgggacacgtaggagtccacccttaaaaccagcaccctgtccctcgaggctgccgagtgggtgtgtggactcgggggccttcccacaaaactagcctccggctctgggcccgagacagccgcaggccccagccactgaatgatactggcagcggctggggttttatgaactcctttctggtattttttcccctctatgtacaaatgtatatgttacgtctcaatttttgtgcttaagtaaaaataaaaacattttcagac

SEQ ID NO: 1247 - DNA, 3547 bp, Homo sapiens
acttgtccttgtgagtttctgacatggtcctcctctgtctcttcctcgccagcttggctgccacccctcgggctggggtcactggggcatggcccaccagcggcctctccattctggcccagctccagccgtcctgtgagctcaggtggactcagctttccaggtcatcttggagggatctggtcatgaccacatcactctggagtctggcttatttccagcatttttcccaggagactacaactcaggagcagctggatgagatggaagagatccccagagagagccagtgtgggaggcaggacttccatgccctctcctgtcccaccgcctccccaagagacagagtcttgctctgttgtccaggctggagagcaatggtgccatcatagctcactgcagccttgaccgcctgggctcaagcgatcctcccacctcagcctcctgagtagctgggactacaggtgtgcacaaccacactcggccaattatttatttattgtccgtctctccagtgaaatggtcctgaaaattaggtatcatgttttgtttaactctttatccttatccttaatgttagacactgttttatttgactcaataaagacttcttgaatgactgaataaaccagtgagggaaaagggggtgtcaggatggggagatcctgacattgagctttagcctgaaccttgaaggtgtttgttcagattggtgcctgggaatagaagtgatgcccaactttctgccagatgtagatcttagactcccacagaggggactgtctgtatcaaggtctccaggtggtccagaggatagcattgcgtataaaaaagcccaatgacaacaactctgtgagcctctgggctttcctgttgggatcaacagaggggaaattgtgacctttttttgttttgacatgttattaggtcatagtatgatgctgtgaaaagagatgagtttaggctcaagcaacaaataaacctcctttgaattctgactcaacaagctaatagcttgtaaaatcaggtgaattatttaacctctctgagcctattttatagggctgttgtgaggattaaatgaataatccatgttaaatgctctgctcagtgtttggtacctagaaagaactgcctaattgttgctgttgttgttgctgttaatattattagttgtcccagctctctaataacaaatgatttgagtaggctgcttcctttagctgtaagattatcatctttttgggacaagatgacctctgcagtctctccagctctaggattcaatgatcaggggactttgagatcacccccatgctggaactctttgaagcatttccatgggaaaggaaagaatcacttctctttgcagccatgctcaaacggattgtcctggaagataagcaaagatgacacatgtaggagaggaaagtccagttcagtctggctcagaccctcctggaatctggtacttttgggtgggacaggagacagatgttccatgacagccaacatcgtgtacttcagactttctgggaatgatggcaggagaggaaccagaagagcaggatgacttgaatttattttcttggaaagactattttgttggcaagacttatccctggcctcataaatggaccagaggctaatggactaggaagaactgctcttgagccgctccctccctgctggtcaggtccaagaacattgcctccaagagcatggaccctcaccccaacccacacttgccttcccctgaggtcgcaggctgcctttctgcccctttggtgatctgccattaatctgatacatgtgtaatttgaatccatttggatgaaattgtagaggaggaaaagaagagaatgcagaaaggaacaatgatgctaagtagcatggacaaagaacagaggcatcttgtgcaatagataggcctctatccaactgaatgacagaaaccctaaattacagtagtttaatcaaagttaagatttattggtatctcacattaaattgtagggaggcagatgagagttgcaattgtgactctgcaatcatttgtgactgcccttgttctataccactcctctgccctcttcaatatttctattttgtggcccaagacagtggctccaatttttgtcattacatctgcattctagccagctagaaaaagaaagaaaggggaggggaagtgcatgtgccttctctttaaggacacttcccagaaattgaacacattgcttcaacttatatcccactggccagtacttagtcacgtggctacatctagctgtagagacactggaaaatatgtctttattccaagtggctgtgtggtcagctaatttttatatagttctattattttttaaaaaggcaagaacaggtatcagaagacaattagcagtctctgcctcccttggaaacaagagtggatattacagattgatgtcataaaaattgccacagtcagccttgggtgtaatctctagatccaggcagcaagggccgattggaattttattccgaccagatgctagctgggcaatgctgggcacattgtttaatctccctgaacttcagctttctcttctgtaaataatagtaataacaaagacttccaagaattgtaaacagaacaaaatgagtgatgtgtgtagagtgcttcgtgccctttttgtatgtagtcatgggccgcagtagatattgaggatcactctatttgttctggatgcacagcctccctgaggatgctcttttcctcgggatgctcttttcctcgggatttctagtatcatcattcttgtgactactatccacacccttcagaaaagccatcattttctcctggattaatctctttcttgaattttgaattcccctaaaagccaaaacctccattctgtcagggcagaacagagccccaatgtttctaaagaaataacttacaaccagaaagtatcagtaaattcccttttccatgttgcttcattctctcaagcatgcatgaaatttagccttaataagtggttattgtccacttactaataactgcttatgaaaaccatgcctggggtctgcggtacaggcatacagccccaagaacagctccaacctccccttcaccttctcctccacctgctacctaacagccaaagtctgtgcttctccaagaggactgtaggaaccgttatcattgcaggaaaggagcctgtctaggctgcttcttccaactccatcccagtaatgaacttgaccctaagatgcaaggcgtctaatcccttgaacccgcttgaacccgcttgaacatatctgctggactgatgtcttctgcaggttgcagatcctgaccatgggctgcatgtgctgccggatggaggcagggccatgccctgagtgttttcttcacatggcaccagtagcgttgtgtgtgatttctgataaaattgtagaatagctaatgacatttgacatttgttcagagttttgcagttcacaaaacattttcatatgtcagtaaaaatagcgaggataatactaaccatgt

SEQ ID NO: 1248 - DNA, 2369 bp, Homo sapiens
aagcagaggatggtggatggcagaacaaggactatcatcaatgacattttcttcactgagcccaccccagaaatgagctcccttcctgtgcgctctcacagctccttgtcgttgaatctcgtatcactgatggtaatttgcagaggaataattaagttggtgattcactttaggatgtactgccctccgaggctgaaagctaaacacatagagcccacgttacgcccagtaccacttaaggaactgcggattagtcactggcccaatgaatgcatcagacactcagcttcagttcccatggcaacaggggctaatggcctagagactaaagatgagacaaagagaaacgcagagaaatgtgcgtgttctgtcttcctctgaggtacgcaagcccctattcagggattgaaaagaacattcgctttagttctaccctgccctcccctcaatgctgggtggaggagggcagaaacgcagacgggcctgacatgaatccagaatttctacatcctctcaatgcacctgcacggtttggagacaggcttctttgtccccgagccatcatgttaccaacaatgtattgtacctgcaaaccatgcctgtggaacctaggattcctgctaccccaactcaccttcctctttaccaccctctagcctctatcacagtaggggagttttttcagtcattcctattttctgacagaaagttccagccagcccaatttcagaagcgctgtctcaggagggctccctgatccttcctgccagagtcacacaggacacacctcctccctcttctcctctgtggcctgggagacctctgcccagaccatgggacaagttcctagggctcccccttcctgccacactcctgttccgccagggccttggggagactcagacgagggaggtttctgatagtctcccacttctggaagcagccaaactaatgagaggcctcttgcctgcccctcttcctgagaagcccaccacctcctgtgtattgactccccttaccagaggctggacaaacagcgtgccaggcccgacatgagacgtcccacactataaatttgtgataaacaacaactcaaaagctgggcatatgcccccaactttccctcccttctttccatttattccagtgagtctcagaagtccctttgtccagctgcactctcctctcctgggacccagctgccctccatttcccatgtcctggaacccctcagtccaaaatacctaagtaaactcgtcttcactgcaatgtgcaacccacacccacagccatgccctacgccagaaggaaccacatgaagttctgcccatcttcctgacctccacggatgttgcgcgacatccagtctcctctgggtcagggggtttgtctcatatgcactcctgagtgcccacctgccagtgactcccctgtgtttcacacccctctcgggggatctcagatccactcggctcctggtctctgtctggatgaccacgaccagtttcccttggagaaggaccaatggggaatggcaatgccaggaaggcaacgcttcgcttgactgctctgctccttaaatccccaaaagcaccactcacaggactgtagacgctatgccagttacagacttcagcgaagggtcaatagtgactacatgaaattatagtggaacaaactactagtgagcgatggctaagcatccatgctgctagaatccaaaaagaatcacccatcccctgcctcccacggaaaagataaggtcttctgaggacattccatttccggtgaattcccgttcatggcttttcttcctgttttgagcactgcccttttctctccctggaaagaaggaagtccctccattaatctgcttcattgtagggatttctttatctctcagtaatgggatctgtctatgtctccacctccctgtgaacatgtgaacacccagagacaatcaccaaacactaaggagctatgagtgtcacatcataatccctcacctagctctgcgcagtggctcacacctataaccccagctatgcaagacaccgaggcaggaggattggttgaggccaggagttggacacgagcctggtcaatgtagcgagacctcatctctaaaattataaaaatagaaaaaattagccttatatggtggcacgcatctgtggtcccagctactcgggagactcatgcaggaggatcacttgagcccaggagtttgaggctgcagtgagttatgacagcaccactgcacagagctttgggaggctgcactttgaaggcaggagttcaagaccagcttgggcatcacagcgagaccccaactgcagaaaaaaaataaaattaaatttaaaaaaatt

SEQ ID NO: 1249 - DNA, 2113 bp, Homo sapiens
aaccgggaccaagggacaacaagagctcaggagaaggggagagacaggtcgcccagagagtagacaatccagggcttgaggaggctggctgtgcggtttattctttctctccacaaagacacacactgtctaaactgtgtggctggttgttactaagaagctgctgcgagagggaaaaatgtatttaataaaaggccctgtgtttgtggtcttcttgggcttgctgtgagctctggaaatcttgaggtgtgaccagatttcagccttcaaaaccaagatggactgcccttgagaaggggtggtcagagggaaacatgttcacgctctccctcctgagccggggccacgggaagctgggccaggacaaacagaagttagaagtctactttgaaccagaggattacttgaactggaggtccccagaagactatgttcctgccagcaaacctcaagataagaacaatgccagtcagcactcctggagcctctttctccctaaaactttcagtactagaaagggtgccctgatcctgtactcagaaggttttgccatttcggcatggacacccaaagagaggagaaaaggcccctactgccccagaggtccctggaggaagctggatcttgaactgcacacacttcaagacctcaaagaagccatcctggcatatggaaggcagcagttgaatttgccaatgggagacgctggaaagagattggagagggagaagaagaggaagaccacagtatttctcccttcccactctgcctcaagtgaaaagaagcatctgcattacctctgtgatacagctctcaacagacaggcccactatgacccccagctcctccagggagagcaggacagagcctggcaaccatacctccacttccgaagccagctggagagccaggcccaacggcagatccagccagggcattcagccaagagatacctccgaggcctcctgcggacttggcccccagacgccatgtataggctctggtgcgcaggatacatcaaggattctgtgctactccaggacagtcaacttaatgtaccaaagaagctcaggccacaacaagatctttcaggtgtacccccaaaataccatctcctgcctgtcttcccttcattttggattcaacaaggaaaatcttttgaacaacgtcaacagggcctggatgaaggggaagctggagctgctggacacgtggaccagggccctctagccaagaaccatggcagtcaggggactcgcttgccaccacgcaggaagcagccctggcaggaagatgaaacgcaggcagaggacacgtcaatagagaatcacctttgtttatatgcttcaaaggaaagctacaatgaaaagacacagcaaacctccaggaaggcctttgggcatggccgcatcgatcactcttggctcccaagtgacaaatcccacattacattctgtggaggcgccttccctaataggaaggcagatctcagcgataaacaaaggaacgtgaaactccacaaggccagaagcagccacttgttacaggtgcttcctgctgaaagaagcctcttccctcctgtagcatctgccactggctccagaataatcacccctggggaagtgaagaagaaaaaggcaccaaaggctttgaaattacctcctatctcagaagaaccacccagagtcttggagcccctgaagagccaatttaaagccaatgagcccccaacagagctcttcatcttaccggtggagattcattaccacaccaaacaacccccaaaagagaaagcccacagaagaggtgctccacaccctgagtcagaaccagaaagcagcgaagaatccacacctgtgtggagacctcccctgaagcatgcgtccttagaaacaccatgggagttaacagtgcatctcccagtggacgcgagcagggacacactctcacctcaaggtagctcctccctccctccagcatccctcgggaacctcactctgaagggaagcaaggcaagacacacaagggtccacagccaaggaaaaggagtctggaagggagatgatgatgccccacctcacgatgtggccccaccattggatcttctaccccc

SEQ ID NO: 1250 - DNA, 2263 bp, Homo sapiens
gggccgaggccgcggcggaggccgcggctggtactgggagggtggcagggagggacggggaaggaagatggcgacgtcgggggcgaacgggcctggttcggccacggcctcggcttccaatccgcgcaaatttagtgagaagattgcgctgcagaagcagcgtcaggccgaggagacggcggccttcgaggaggtgatgatggacatcggctccacccggttacaggcccaaaaactgcgactggcatacacaaggagctctcattatggtgggtctctgcccaatgttaaccagattggctctggcctggccgagttccaggtgagtagaccccagccagggaggagtggagtttcttaggctgcttcctctgctgacttctgtcctttttggcagagccccctccactcacctttggattcatctcggagcactcggcaccatgggctggtggaacgggtgcagcgagatcctcgaagaatggtgtccccacttcgccgatacacccgccacattgacagctctccctatagtcctgcctacttatctcctcccccagagtctagctggcgaaggacgatggcctggggcaatttccctgcagagaaggggcagttgtttcgactaccatctgcacttaacaggacaagctctgactctgcccttcatacaagtgtgatgaaccccagtccccaggatacctacccaggccccacacctcccagcatcctgcccagccgacgtgggggtattctggatggtgaaatggaccccaaagtctttctctttcaagtacctgctattgaggagaacttgctagatgacaagcatttgctgaagccatgggatgctaagaagctatcctcatcctcttcccgacctcggtcctgtgaagtccctggaattaacatctttccatctcctgaccagcctgccaatgtgcctgtcctcccacctgccatgaacacggggggctccctacctgacctcaccaacctgcactttcccccaccactgcccacccccctggaccctgaagagacagcctaccctagcctgagtgggggcaacagtacctccaatttgacccacaccatgactcacctgggcatcagcaggggcatgggcctgggcccaggctatgatgcaccagggcgtccccctggataccagtaaactgtccactgaccagcggttacccccatacccatacagctccccaagtctggttctgcctacccagccccacaccccaaagtctctacagcagccagggctgccctctcagtcttgttcagtgcagtcctcaggtgggcagcccccaggcaggcagtctcattatgggacaccgtacccacctgggcccagtgggcatgggcaacagtcttaccaccggccaatgagtgacttcaacctggggaatctggagcagttcagcatggagagcccatcagccagcctggtgctggatccccctggcttttctgaagggcctggatttttagggggtgaggggccaatgggtggcccccaggatccccacaccttcaaccaccagaacttgacccactgttcccgccatggctcagggcctaacatcatcctcacaggggactcctctccaggtttctctaaggagattgcagcagccctggccggagtgcctggctttgaggtgtcagcagctggattggagctagggcttgggctagaagatgagctgcgcatggagccactgggcctggaagggctaaacatgctgagtgacccctgtgccctgctgcctgatcctgctgtggaggagtcattccgcagtgaccggctccaatgagggcacctcatcaccatccctcttcttggccccatcccccaccaccattcctttcctcccttccccctggcaggtagagactctactctctgtccccagatcctctttctagcatgaatgaaggatgccaagaatgagaaaaagcaaggggtttgtccaggtggcccctgaattctgcgcaagggatgggcctgggggaactcaagggagggcctaaagcacttgtaactttgaaccgtctgtctggaggtcagagcctgttggaaagcaggggtagaggggagccctggaagcagggcttttccggatgcctaggggtgggcagtgccagcccctcctcaccactcttccccttgcagtggaggagagagccagagtggatactattttttattaaatatattattatatgttaataaaaaaatcatatc

SEQ ID NO: 1251 - DNA, 3361 bp, Homo sapiens
ttcacgcagtccccctcttccggggttccccagcgcaggcaccaatttgatccatcttccgcctgccagctccccatccacccttccctccctgtcttcacccgtgtgctcaaggactcaacaaacacctgtcagcagcccaagagctaagttcagggacacgcaagttcctcgggtcaggtgggccagtcggcactgaggcagaggaggcaagggctggtccagagagcctggtcacagcagaagggcctgctccaatgtcggggccaggtggaggcagtggggaggcgtcccctaggggtgcccttccccaccacgttccctgctcctaccgtcctcctcgcctgggatgtcctgccccatccatccgtgcaaggctgagtgtagatgccagccccgctgaggctcctcctggacctcaggatcgctgtgtttctcccccaccagggggctgccccctctaccaccagctcacccagcaggtatctctcatcagcctttggcctggctccttgctgggctctgaatgtctgcattcccccaaactttatgtgttgcgatcctaacccccaaggttatggtatcagaagtggggcttttgggagatgaccaggggtggaacctcatgagtgggattagtgtccttataaaagagaccccagagttctcccaagcccctccaccatgtggagacccagtgagaagctgtctgtgaaccaggaagggatcctcactagagagcgagctggcaccttcatcttgggcttccagcctccagaactgtgagaaataagtatctgttgatgaaccacctgtctctgctattctgttggggcagtccagatagacaaagacatgcccgttcccgcggcccaccacctctgccctgagcacagtgggtgagtctcggttccccttatcccatccctgctggggtccagccctggcttttcctgaggtagtttctccaggaccaagcagacacccacaaccagcagcccttaaggcatggacgcactcgtccctgaggcctgggtgtcccgcctggaggggcatgtccacagctgctctgggtcctgacgctccaggagctcacgctgtctgcagatccaccacttccctgggcagcccccggcctgcgtcttcctcagtgctcagctggaggtggagagaaatcaggctgggacggagggtggcccttgctttgcacgattcctgcctcgacgttacaccagggacattccagcatctccccttcattaactgtagaccgccagcaaatccagatttcattcaaccaagtaaactggtagagtcatttccagcagctaatgtgagctagcgcattaaattcagaatctctagtaagtgtacctgcatcaataaagccaagccggtccagctgcattaataccctaccctccattcccacacggttcccaggtctccgtgtgtgaatttgtaacatcttacgagcattttggtgtgaaagtggttccttcctgagtcaggctttgtacttgacccttcccctccctgggagtacactgaggttctagaggcaacagggtggctacggtggttaaataaaatgagcatcatttctaggcacctggccaggtaagcttatcacagcattttcaagcagaacaaaaaaaataaataaaggctactctcagatcttggaggacaagctgcttcccctggaaggagaggctcagagaaccagggggttcacaattctcagcttcatctgagcccaaccagacatccccatgccaagcttcagcatccagttccttcccactcagtgcccacgtttcagtagtgaggctgtgagtgtgagccacacagcagtcacacaactcagagttaaactgtgcatccgagttgtagcagcagcagccccgaggctctcaggaacaagggactcttccatggccatggcagtcctgattctctgtctatgacttaaactgagtttagagacctgaacgtgtggttccttcctgttagtgctgctggacactcaggggaccccccacagccctcgtggttgtggtcatcctcgtggccgtgacagcctcacacagcagcacgtgggttcccgaggccctcaattctgctggtgcctcacagccagcatgggggatggcttggttaactgtgaagctcccccaacaacactgtgggccaacagcctccccttcccactggccaggagatcggcctgcagcccagcccaagcaacaactacactaacctaatccccggaccccaccttttgatagtgacaggaggcagacaaatcctaggcagacagggacaggttcccagtgaaaccccacctccgagccaaagacagtttaaagcctgaaagccaagctacaaattaaatcctcagcctggattgagaacccatcttcccatttggctgctttcctctgattgatccccacccttcacctattttacatgtacctatcttttcctaattcattttctacactggcatgcccacctttgagtggtacctttgtttaagccttttttgcataatcagaagccaatcagcatgcactcccccattctgagcccataaatgccccggacccagccacactaggagagaaaccacctgacttcaggtcgggaaccacccgtgcatcccctctctgctgagagctgttccgtctctcaataaaattcttctctgcccttctcacacttcgattggcagcatctcctcactcttcttggacacgggacaagaacttgggaactgccatacatgggtacaagctataacacaagcaggctggaacatgcccagcccagccacaggctgagctggtgaacagccaggtgtggcccaggcaggctgagtgggtgggccacctcctgcggcaggtagcatggccaagagaggcctggggagggggggtgtcagcagccagaggtacctggctggcaaagtgaccaaagaggtacctgactgtgtcactttgagggcctgtctctggggaccccctcctagtatgaatttatgtatcagttggggtctacttgggagatggaaaccacaacagtgattctaatagcatgaatttaatgtgcagaatttttcattagttctgggtaaaaacagctctagggaatcatggaggttgcaaccacaaaattcagagaggtgacctggctggcgacactggtgataatggtcacctgccatgcagcctttcagctcaggtgggcacactcctctgcccctgcccacttcctctcccaggtgaatcttgaccacacctgtgcctggcactgtgcacacattctctgttgttcaactctgcgatcaatctgg

SEQ ID NO: 1252 - DNA, 2603 bp, Homo sapiens
atgcgctgtccagggccgacgcggttgtatcatgctgagaaggagccgggcgggggccggcggggctgcgagggccctgtgtggaggggcacctgccactagaagcggcctctgggacgtcgcgctgagccctgctttggagtcagaggggctttccgcctcggtgaactcgagagtagcaactctcctccgggtaaccggagtgccacagcgggcaggcgtcataaggacaggcctcggagaggagaggggctacccgagaatggcctcaaaagtatgcataggagttgggaaggcagaggaacaagtgtattcagagacgcaagccggtttctgcccgctactcaggattgtctgccgtggtggcttctcacacaagcctgtactttcctgtgggagaatatttcctaggagcctatattccagttcatctctgacgtcataaatcatgactgtgtagaaaggccataacatgtgacacatggcagccattttggagatggccagatgagaggacaatcaatccacatgcctaaatggaaccaacagacatgtgccagcttgcttctccagcctatgttctcagacacttgtagaagaccagagggaaaatggaatcagaaaaaacagcaacaacaacaaaaagccatccagggccatgcacagtggctcactcctgtaatcccaacagtttgggaggccaaggcaggtggattgcttgagctcagcagtttaagaccagcctgggcaacatggcgaaaccctttctctactaaatacaaaaaccagctgggtgtggtggcatgcacctgtagtcccagctactcgggaggctgaggtgggaggatcacctgagcctgggaggttgaagctgcagtgagctgtgatggtgccactgcactcccacctgggtgacagagcaagaccctgtctcaaaaaaacaaaactaaacaaaaaaatccatgtgggaaaaggcccaatcagagccaactcactgctgggattagtagaaatgattagtcaccagaaggcaaatcgtggaagaatgaagagatgacaggacctcaggaactacacccagaggtgtagttgtgccgtaggcaaagcatcatgccggtcatccccaagaaagggagaaggggtagagctcagactcttccctgcttccccataagtccagtttaccctgggctgatcctttcagcatggcagcctccgtggggaggcacgagatccaaagatgaagatgtctatgggggtgaagaagaatggcaaactttgcaggcaagagtaggcattagagagatcagaggaggaagacaatagagaaggatgacacaggacaggctgtatctagaggatataatgccatggactttggactattccagagaggctgagagacctgtctcctgcctacaaggctccttgaactctgcacccttctttttgctaaagtgctgctgaggcctgtctcacttcccaatgaaaagcaactcaggaaattggcttcctgccccactccttctttgggagagagaaacagaactgaagaggaaggaaggaagcccaaagaaacagaggctttctttcctggctgagatttgttggcactgcccactaacatagagaataaggtggttccctaagcgagccttaagctggcatgaggctacaaacaagtgattgtatcttcgttctgctcagcagcctacctgggctggcctggacaacctcaattgtatactgaggtcttaagctggccatggcccttggtaaagcaggagaaaggaataaggctggaaggtacagaatttgcttgatgccttgcctacataattcctttgctgttgcaactggcaactctttgcttgcattatatgaaaaaaaggcggtaaaaaattgtcagaaatgtttgccaccagcctaaccccactgtccatgcattgctcccaagaaagctaattaaggcccattgctattagagttacatgattctgaaggcttgttatgacaagaaaaaataatgaagacatggttcctccaagtcataagcatccaagtcaaaacatactgcatcccaggcgagtgtggtggctcacgcctgtaatcccagcacttcgggaggccaaggcagccggatcacgaggtcaggagttcgagaccagccttgccaagatgatgaaaccccgtctctactaaaaatacaaaaattagccaggcatggtggcgggcgcctgtactcccagctactcaggaagctgaggcaggagaatcgcttgaaaccgggaggcggaggttgcaatgagccgagatcacaccactgcactgtaccctgggcgtcagagcaagactccatctcaagaaaaaaagaaaaaaacatcctgcatcccttgttcctttgtgttcccctagacaagcctctgggctggctttgcctatctcatgcatgcaggcagtcatcctcctttggccagtgcatacctgactcctactcagtgccaggcctggagaagactgtgagacctgcccttgaggagttctgtttgcaggaagagagtgataggcacacaaattatttccaataaactacagaaaatgtc

SEQ ID NO: 1253 - DNA, 2024 bp, Homo sapiens
gtcggctccagttagagctcgggtctcctcgccacagctccgagtctttcgttctgggaggcccaggcggcttcgcgttctgagaataaacagaacctctgttgctctgcgacttgcaggcactgggagattcgtagctaagacgccagggcatcccggaagctgggaaatgggactgttgacattcagggatgtggccgtagaattctctttggaggagtgggaacacctggaaccagctcagaagaatttgtatcaggatgtgatgttagaaaactacagaaacctggtctctctgggtcttgttgtctctaagccggacctgttgacagagcactgcacagaagcttcattccaaaaagtgatatcgaggagacatgggagctgtgatcttgagaatttacatttaagaaaaaggtggaaaagggaggagtgtgaagggcacaatggatgttatgatgaaaagacttttaaatatgatcaatttgatgaatcctctgttgaaagtttgtttcaccagcaaatactttcttcttgtgccaaaagctataactttgatcaatataggaaggtctttactcattcatcattgcttaatcaacaagaggaaatagatatttggggaaaacatcacatatatgataaaacttcagtgttatttaggcaggtctctactctaaatagttaccgaaatgtttttattggagagaaaaattatcattgcaataattctgaaaaaaccttgaaccaaagctcaagccctaaaaatcatcaggaaaattattttctagaaaaacaatacaaatgtaaagaatttgaggaagtctttcttcagagtatgcatgggcaagagaaacaagaacagtcttacaaatgtaataaatgtgtagaagtttgtacccagtcattaaaacatattcaacatcagaccatccatatcagagaaaactcatatagctataacaaatatgataaaggtcttagtcagtcatcaaatcttagatagcagataatccataatgaagagaaaccatacaaatgtgatgaatgtggtaaagccttcagctataggtcatacctcactacacatcggagaagtcatagtggagagagaccctacaaatgtgaagaatgtggcaaagcctttaactctaggtcatacctcattgcacatcagagaagtcatactagagaaaaactttaaaaatgtaaaacatggagcagattttttacttgttacccatgtcttattgtgcatcagataatttatatgggagtgaaaccctacaaatgttaagaatgtggcataacctttaactattttcaagccttacacaatagcagagaatataaactgaaaaaatccatacaaatattaaaaatgtggcaaattattttaaactgtgctcaacccttactcaagataatccatactagagaaacactatagatgtaaaaatgtgaaaagttttattcaaaatatcaaacttatgagtcacctaggggttcatagaaaaaggaagtttgcagatgcaataaatgtgaggaagtatttaataaaaaatgaagtctaaatgtgtcagagaatttatgtgagaaaggactaaagcacagacactttcagcctttatactaaataagagtattttttgtacagaataatctaaaggcaaaataattagataatttatttgcttatatgttttaaagtagcaagaacattgatgttttgacaggtatatttcatagatacttcatttgtatttacagtatttgaggtttttggaaagcaaatattatttatataattcagctttcaaatctgttgctgcttttccttaatccgtggtgttcatgtgaaaatatgtgttctgtttttttttctgcatcagaacaatgtgaggtcattctacgttaatatcattaatatcagcatttttcatggaagtttaatgccaaatgtaaaacacatgaaaatttttaaaaatatgctctttgtgtttgaataaagtagtaatgcacgt

SEQ ID NO: 1254 - DNA, 1947 bp, Homo sapiens
ggatccccgcagccagcatcacgggcagctaggccaaccgtcccggcgtcttcctattttagacatctcgctgcctcagtcccttctaatgtttccagccaggctgcggggggaggaaaaagaggttactgctactttaaatgtactgtatgaaggcgagggctggaaaggggcctgcttgcaggaatacccagtcatctagttggaaaagccgccagatggaatacaaaaggaggaacccagacgctcatggagacagcctcggttcataaatcaggtggggccaggggctgggggcccacacgccatggagcccgactcccttctggaccaagacgactcctacgagtcgcctcaagaaaggccgggctctcggcgcagcctgcctggcagcctttccgagaagagccccagcatggagccctcggccgccacgccgttccgggtcacgggcttcctcagccgccgcctcaagggctccatcaagcgcaccaagagccagcccaagctggaccgcaaccacagcttccgccacatcctgccggggttccggagcgccgccgccgccgccgcggacaatgagaggtcccatctgatgccgaggctgaaggagtctcgctcccacgagtccctgctcagccccagcagtgcggtggaggcgctggacctcagcatggaggaagaggtggtcatcaagcccgtgcacagcagcatccttggccaggactactgcttcgaggtgacgacgtcatcaggaagcaagtgcttttcctgccggtctgcagctgagcgggataagtggatggagaacctccggcgagcggtgcatcccaacaaggacaacagccggcgtgtggagcacatcctgaagctgtgggtgatcgaggccaaggacctgccagctgcccttgcagggtgggtgagctctcaggccgagagccttatttacctagtgcaaaaactgtaaaagtgtacagactcttcacagatttttatcttaattgcaagtctgccgattttgtaaatgttcttggtgtttgactgtaatgtaactatctcacctaatggttgtacatatcctttggtcctggtgctgccgagggctggccgggactgctgctctcccaagggttttattttatttctgaatctagagaacagtattgggcaggaggaaaaggcttggtgtctgcggggggtgtcttccctgcctgtggcatttgtgtgttggctttgcagctgctgtctgagtagtggccactggggtgccttcactgggccagtcaacggggggctcctgcccaggccacagagaacctgagttcccgggagctgggccctgcctgcagccagggctggggttgccagaggccctggagggaaggacagtccctgctggggaagaacagccccggggccccctggtcaccgagactcagcctctgctggagaaagccacgccctccctgctagcacagaggcctgactgacttttttgcttaacttccatgttctgggtgatggaaactgccaaacctcctgtcagtgaggactctttccgactgcccagaaagtgggggtggaggaccgaggctacagctccacacgccccggtcccccagagcatctgccccaggtacacctccccctgcgccccgcacgactgcgggagccagactgtccagggaaacagcctctctcttttctacacactcagccacaaagccccccagctcccacaccgcgtcccagctcccctcttttgtaagtatgtgaaaaggaaaaaatgcaaacgttggagtttgggctggagctcctccctccagctgcgacttttaactatgtaataatgtacagaggaagctgttggtgttctaagactctgtgtggctgtgcaatttctgtacatttgcaattagaaatattaaagatttatttagctatttt

SEQ ID NO: 1255 - DNA, 2748 bp, Homo sapiens
ctgccatgtgaccggcgggtgttctacaagggctgaccagtgggcgggacagaacgcaaagggcgatattaaaagccggactcttccggtgaagcggaggtgtggtggggcttgctgggatcatggcggggaatcactgcgagctcctgccgctggcccgtggcaggctcggggcggggttggggtggcttcttgtgcctcccttaaagcgcggggctcagcgtcctggcccagcgccccagcagcaggtccaagtgggtccggctctacagcggcggcacctacttcctcaccactgggcagacgccgctgtgtcaggacccgaaatccttcctgtacctcttgagccaggccgaccccgacccggactcggacaagacggagttttgttcttgttgcccaagctggagtacaatggcacaatcttggctcaccacaacctctgccacctgggttcaagcgagtctcctccttcagtctcctgagtagctgggattacaggcatgcaccaccacacacagctaagttttatatttttagtagagatggtttcaccatgttggccaggccagtctcaaactcctgacctcgtgatccgcccaccttggcctcccaaagtgctgggattacaggtgtgagccaccacacccagccaattagggctgtcttacaaaaaaaaaaaccaccacgaacctttgcgagaatcgagcgcagcctgtgctggttgtgtaagccgtgggacacacgggaaagccaggaagaagaggaagagcacccccacaccccacccgcgtgaagaagagcaaccccactccccgcccgtgggaagaagagcaccctcacgccgggcccgcaggaagaagagcacccccacgcccggcccgcagcatcccgctggcttcctggccacctctcctcacccatcttagaggcatggccgggctggggcatctttccctccttgggcaggatgaaacaggcgcctatttaatcgacagagaccccacctactttgggcctgtgctgaactacctgagacacggcaagctggtgattaacaaagacctcgcggaggaagatgataccacgagtcaacccaaaagttgctggggagaagttgctctttaatgaattgcatctcatgaatgtatcaggctgtgacctttctgcactctctaatgagttcatgaatttaggccaattatggccacaaatgctgctgctgtcacagagagatgccggataaagaacacccaccaccagtctctgaacagggaggggagaatcaactctgaatgtgatgtagtggccaggagagaggaccatgttcaacaatgccacacagatgcaaatgacttgtttcttcaacaaactgcaagggaaaaaataaaaatgggggaagctacagattaaaatacatgtgtttggataggagagtatttaatggcaaaagaaaaagaaaaaatttaaaaataaaattgtgcaaaacttatttgaatcctgttcaagtgagcaacaaaacattatgatgtacatgagacaactggaaatataactctgactggacactttgagatattaagcaattaccgttcatttttacatatcaaacagtatggtattgtggttacgcttttaaaaagatttgtattttagcgacacatactggaatttttacagggaaaacccactgaggatgctgggcatcaggtcactagcaccgagtgaattttttacaataagcagtaattctccccagccccatgcatcatagccaatcctaaatgaatgccaatctggaaaagaccaaaataaaccacgtgaagatgggaagagctgctcttggtgatgggagaatggggactctctcttttattgtgcaaattccactttccatcatgcaggaaaatccgtcttgaaggcagctcctctctgtgccgggggtgggtgatccagcctaagctagaatggcggcaagctcaaggcagctgtggccctcaggagagcgtctggagtccacagcacagtgggaagcgcaacggcagctagtctgagggtctggacgatggccatgcacagatgaggacagaggagccactgtagtgactgaagcccacggcatccaccctctccagccagccccgcccacacctgaagcccacagcgtccaccctgtccacccagccctgcccacacctgtggccttcctctccttcctgtttggtgagtgctgcctccacacctggctgcatgccagaaaggcctgcacaggtcagaacacaggtttccaaaccctactccaagtctgaacctccaaggacaccccgagctccccaaggttcttgcatagagggcacaggccagagacagcccaggtgggaagcttactctgagtcagctgccctcaccaagatacatccacaggctcctgtacaaggagaggaggcagaagtccctctctgccaggaggtcctcctcaatctcccaagcccacaccactgccctgctccatctcccaccacctccccctgcagatacgggggccaccctacccaccccacaggaacgatgggaaaacctgcctccctctaggaggagggcgtggcacggctgctgcgcgggtaaggaacctcgctatgccttgctcccatcaacacttttattctagatttgaaggtgttttggggaagccatctctgcacaaaagaagtcaacgcaggaataaattccaagatactgaactacctc

SEQ ID NO: 1256 - DNA, 2196 bp, Homo sapiens
gctacaagaatccatccacctacaccccttctccacctgggtgtctctcagacccagaaaatggtgccattggcccactgacaactaaatgtggggacaggtctcttacaagccactgggtagtaaaagcatcctgaggtggcataccatatcgcataattgcattaagaaaggcttttcgctgacgagcattaaaaccaagtacctaggggaagaagaaacccaggtgagaggcagcaggtcgcattccaccaaagatgcaatatctgacactcacccctccttagaatcgtatggcacttacttcaatattcccaccaacacgggccaacagaggaggcaatggcttatctttatcattccgcaggcccttacgactgggcctacggggagctgcaagaagaaaaagatgaatgagtgacacaggtaggatattaaacaaagcaacatttagaaaagcaacaaaaaaagcacagccctcaccttctgaacgttcatcaaagtcttcatcaccttcctctgaagccactgagtaatcggactggttgtcggactggtcgtcctgccaatctggagggagagagggcagatgagcggggcccactgctctagtggaacggcccatgggtggggggcggggccggccacacacacctcggtcctcctgggagccatcattgtagttgacctgtttacggattctttttcctttgcccagatttcgggctagatcttcttgctgctgctcataatggtgccgcagcaatttctcccagtagtcaggatccacactttcttcctgtttaatgatttcccgttctacctcctcttcctcctgggacagagggagggccaggactcaggagtgctgaagtcagcaccaccagctacccctggtcctcacagttcccactctgctagctccttttcatgactggactcttaaatacttggtgtgcctgtttggacctaagaacttagaagaaatttgattgagagtacacagctcctcataattacatatagattagcagtcagcataactcaagaaaaacatgggatagagctattatcacaggtaaggatgaagagacagaatgctttcttctaaccccttgcactgatgcatatacaattgaaagatagcaaaaagaaaagaggtcagagccttagcaaggcagaatggagaaacttctgaagtactgtaaaagattttcataagagagaaggaaggagaggatgactataagcctttctattcttcataaacttcataaaagcttaccaactgtctgcagaacgaaaagaattctatatagcctcttatgtcccaaaaacgttgatactcctctaaaagtgaatttttttcagacacttgaggaccactcactgattccacatcccttatattggaattaaacagctgctaatagcataacattagaaacaacctaaaagcccatcattatggaactaattaaataaattacaatcggccctctgtatccacgggttccgcacctgtggattcaaacaaccatagatggaaaatattcagagaaaaaacaaaattatgtctgtactcaacatttacagacttttttcttgtcattattccctaaccaatgtagcatttacattgcattggtattacttttatgtttacaaggaaaaaaaagtctttgggtacatatatgtgagtgtacatatatgtgtatgaatatatgtataatttgtatacacataaaatatttttggaaagatataaaaggaactgaaaacattagttgtccccaagaagggaactaaattgttagaggacaggagagaaaagagatacgtgtgtgtacatataaatatatatatatttttttgagagagggtctagctgtgttgcccaggctggagtagagtggcgtcattacggctcactgcagcctcgactgccaagtttaagcaatcctcccacgcagctgggaccacaagcgtgagcaaccacactcggctaatgtttttattatttagagacggaattttaccatgttgcccaagttggtctccaactcctgggctcaaacgaccctcctgcctcagcctcccaaagtactgggattctaggcatgagccaccgtgtctggcccttttgtgtattttgaactatgtaaattctatctattaaaaataaaacttaaaaat

SEQ ID NO: 1257 - DNA, 2667 bp, Homo sapiens
gcacagaagtttgctgcatcactggtgagctggggagtgtcctgtgtggtgtccacttaatcttactaggaaggatcccctcatttcaacaagatgcacccactgggcctatgtaataacaatgacgaagaggacttgtatgaatatggctgggtaggagtggtgaagctggaacagccagaattggacccgaaaccatgcctcactgtcctaggcaaggccaagcgagcagtacagcggggagctactgcagtcatctttgatgtgtctgaaaacccagaagctattgatcagctgaaccagggctctgaagacccgctcaagaggccggtggtgtatgtgaagggtgcagatgccattaagctgatgaacatcgtcaacaagcagaaagtggctcgagcaaggatccagcaccgccctcctcgacaacccactgaatactttgacatggggattttcctggctttcttcgtcgtggtctccttggtctgcctcatcctccttgtcaaaatcaagctgaagcagcgacgcagtcagaattccatgaacaggctggctgtgcaggctctagagaagatggaaaccagaaagttcaactccaagagcaaggggcgccgggaggggagctgtggggccctggacacactcagcagcagctccacgtccgactgtgccatctgtctggagaagtacattgatggagaggagctgcgggtcatcccctgtactcaccggtttcacaggaagtgcgtggacccctggctgctgcagcaccacacctgcccccactgtcggcacaacatcatagaacaaaagggaaacccaagcgcggtgtgtgtggagaccagcaacctctcacgtggtcggcagcagagggtgaccctgccggtgcattaccccggccgcgtgcacaggaccaacgccatcccagcctaccctacgaggacaagcatggactcccacggcaaccccgtcaccttgctgaccatggaccggcacggggagcagagcctctattccccgcagacccccgcctacatccgcagctacccacccctccacctggaccacagcctggccgctcaccgctgcggcctggagcaccgggcctactccccagcccaccccttccgcaggcccaagttgagtggccgcagcttctccaaggcagcttgcttctcccagtatgagaccatgtaccagcactactacttccagggcctcagctacccggagcaggaggggcagtccccacctagcctcgcaccccggggcccggcccgtgcctttcctccgagcggcagtggcagcctgctcttccccaccgtggtgcacgtggccccgccctcccacctggagagcggcagcacgtccagcttcagctgctatcacggccaccgctcggtgtgcagtggctacctggccgactgcccaggcagcgacagcagcagcagcagcagctccggccagtgccactgttcctccagtgactctgtggtagactgcactgaggtcagcaaccagggcgtgtacgggagctgctccaccttccgcagctccctcagcagcgactatgaccccttcatctaccgcagccggagcccctgtcgtgccagtgaggcggggggctcgggcagctcgggccggggacctgccctgtgcttcgagggctccccgcctcccgaggagctcccggcggtgcacagtcatggtgctgggcggggcgagccttggccgggccctgcctctccctcgggggatcaggtgtccacctgcagcctggagatgaactacagcagcaactcctccctggagcacagggggcccaatagctctacctcagaagtggggctcgaggcttctcctggggccgcccctgacctcaggaggacctggaaggggggccacgagttgccgtcgtgtgcctgctgctgcgagccccagccctccccagccgggcctagcgccggagcagctggcagcagcaccttgttcctggggccccacctctacgagggctctggcctggcgggtggggagccccagtcaggaagctcccagggcttgtacggccttcaccccgaccatttgcccaggacagatggggtgaaatacgagggtctgccctgctgcttctatgaagagaagcaggtggcccgcgggggcggagggggcagcggctgctacactgaggactactcggtgagtgtgcagtacacgctcgccgaggaacccccgcccggctgctaccccggggcccgggacctgagccagcgcatccccatcattccagaggatgtggactgtgatctgggcctgccctcggactgccaagggacccacagcctcggctcctggggtgggacgcgaggcccggataccccacggccccacaggggcctgggagcaacccgggaagaggagcgggctctgtgctgccaggctagggccctactgcggcctggctgccctccggaggaggcgggtgctgtcagggccaacttccctagtgccctccaggacactcaggagtccagcaccactgccactgaggctgcaggaccgagatctcactcagcagacagcagcagcccgggagcctgagctcaggaggaactcttacctggaaattgggaactgtatggagactccaaactgacttctttc

SEQ ID NO: 1258 - DNA, 2126 bp, Homo sapiens
agcaatcagcgagattccgtgggcgtaggaccctccgagccagttcccgagagatcccatgatccagagacaaaggtggcagctttggagcaagtggagagccagaaaaggatccagaactggagtggaagctgaagctatgccatcttttatgtctgatgaggcagtttcatctgatttgaagatgatgaagaaaagttctttgcaaggttgcttattgaatattactgggaaaacaggaaaattaggaggaatgttctggagtgatttatctttttcatcaggggcccgcgttcagtccagccaccagatcaacacattctccaaactcattaactttggagaggctacccagagttcctgaagagttcatctgaaagtcacacagcaagaacacagcagaacaaagattagatcccagcttggtcttcttcaatggtcatgcttttccagataccttaaagaaaaccaaatggacagtgattctacactgacagataagcatgcttataattgcttgtttgatatctgtttttttccctggtagttcgtaagatgtgaaagaaaaaatatgtgttgccttttctgacagccactcccccaaccccagcacctagtatatattattttctattagctgttaaataaatacttaccatatgaacaagtgaacctgaataaagcagtactcattggtcctggagtggatgaaatagactagggactggccagctagaaggatcagggactcccaaatatgtagcatttttagttggtactgaatgtgtgaatgagatgggtagctatggcatccaggctaggtgaagtcagttataggcatggatgtggaggactctgtgggagggaaagagtgagtggttcagggcactggaggtcatgcagagatttgatgctatgaaaagcaagttgcacctgtgagagtgtcattaggttaataacaccctcctcttctgtctgcctccctcacaatcatgaggcttggaaaagtgagggatggaagttattatctaggagcttgttcactgctgccaaaaatagttagctttattatgagctcttgtactggcttcagacagagcctttgggcatcatgggagttactgctgcttcccttgggaactactgtcactgccatgggcatctgcatctgagaagcattccttctctgtgacaattatcatagtaacttttgcccagcaagttggcttttctggatgtgttaatgatggtaataatgataattgctaagattatgaatgtcttgcatgaattatttcatttaatcctcacaataaccgaatgaggcagaaacaattttgtgtcttttttacaaatggggaactgagatttggggaagttaaatcatttgccaaagtcatttgttcaatgatgagtagtctcaaaattttaacccaaatctaatcaacatattgtaagattgttacagtaagaatgttattagaacatcctgagaaagagctgatatacatattaaagagtccttcattttcgtgatgcctactccttgcttgggtgcaaggttatttctgcttgttgattctgtccctttgaaaatcagattttaacctctagcctgctagttcctttgtggggaaaaatgattattgctgttttccaaaataccaaaaaatgtcagcccaaccgcctgagtttaatcagatgtttaatctgatatagcatctgcataatgacaccacaaagaataaacaagaagatcgggactgtgtcataaatattgattcttctatagtcagggcctgctgactttcatataaaactttttatttaattaaatctattgcaaacaatgcagcaaaaccttattctagttttatctttcagaatgttgaaatagtcacagcccatggaatcaatgttttgggtaagattttttttaatggaattctgtctctattgctttaatttctttaatctttcactgcatgaaaaatactctaatatcttaaaatttcatgtatttccagcctaaaaataacatctattatagattttcctcattttattgtgtaaatgtagataagcataaagaagaaaataaaaattgtccagaaagaaccacaatt

SEQ ID NO: 1259 - DNA, 3128 bp, Homo sapiens
tatgataacccctcagttttcagtgctgtgcacctaaattgtagaaacctggtatttaagaggacaaatttaatgttaagtgtggactcttggagaacctagacagccaacagctacttgttcattcctgagttcttaaagcttccattattaacagctctgcattccattactcatcacagaagagataaaataatctaaattaaatataaattaagtttgtggtgactcttctaaattactaaaataggttaagaccaattttttttgtcaagcatataatcccaataagacaatcaaaacttcttgtacatttctgctacctgatgagccatttaaacatttatacagaaattttatttaattgtcattttaatgcatgttttcttgtataaaagttttctcatgcaagagggttgatgttataacagtaactaaaaggatattaggatacatgttttctcatatcttcagtgataaagatacttatttctctagacaagttgtaaaactgttaaacaagatattaggctgggcatggtggcttatgcctgtaatcccagcagttttggaggctgaggtgggtggaacacttgaggtcgggagttcgagaccagcctggtcggcatggtggagccccgtctctactggaaattacggaagattggccgggcatggtggtgcatgcctgtggtcccggctgctcgggaggctgaggcgggggagttgcttgagcccgggaggcggaggtttcggtgggccgacatcgcaccactgcactccagtctggagatagaacaagactccgtctcaaaaaaaaaaaaaagatagatacagtagtattgagcaaaactaactaaattgactggattgcttttgtaattgcagattgatgacatatcagatccatttagagtggaaaaaatatgttggccatttaaaaatagtcattggaaggcctatgcacctaagagaacctcatgtatcttctgctactgaagtctaatattactaaattcaaaaaggctttaatgcattatgacaaagcatatgaagaaagccttaaggtgaagaaagccttaatagtctactgactgtggacagtaagaccctttattatctagaacccagagattgagtctgcctgccatgtacactgaagcaagacatcaagactttgaaagctgggttgataatctcacaacttagaagggtccctccagactctttaattgtaaacccataggagatcttaaagctaaccagaaagatttctcctaaaaagcagatggatatctttatgtagatagcttttttaataagatcaaaaatcaagacacatttgctatcatgatactcttagttaagtttgtttatggctctacaaacaatagaaatttaaaaagcatcttttgtgtgcactcattgggtatacttatatgtagagaattttgcagccagcgtgtgaaaaaacataacatcttttataggtaaaaaatgaaaggcaggccgggcacggtggctgatgcctgtggtcccagcactttgggaggctgaggtgggcggatcatgaggtcaggagtttgagaccagcctgaccagcgtggtggggccccgtctctactaaagatacagagattggtcagcgtggtggtgcactcctgtggtcccagctactcgtgggagactggggcacgagaatcgcttgggcccgggaggtggaggttgcagtgggctgaagtcgcgccactgccctccaggctgggctacagagcgagacttcgtctcagaaaaatagaagaaaaaaaaaaaaaactggaaggccaatatgggtgagaaattttaatgggacatttgttgtctcatcagaaacagaatgtgtgtccactgctcttaacctatttcacaagttaaagagaacttattcaaaataggttaaagagcattgccagggtgccattacttttctaaatgggcatcctttgataggtcttttttccccctggtttagagtaaatgaggcaatggttagaaatgtatcccctatcatagggctttatagcagattgcactgtaaaggctatggttacacaatagactttaaattttttgctaaagttgtgctgaatcatataatttctttggattacttactgtataaacagaagtgtctgcagttgctaattcttgtagttgcacatggagaaatacattgggtattacagagatgcagttgtaggggattaatgaacaggctgtttggttaaaataagtagactatagctaattatttgatctatgtaatgttagttggtggttcatgaggaccctggttaaaaagcacgcttcaaactcttcgtattatcctcctggtagtcaaaatagtagtctccctgctgcattgtattctcaaaagttagaaatgttttcatgcaatcacctgtagaatataaaattgtctctcactaactggaatgacagaaactcaaagacatatgtaactatgatgaaaccataacctaggaatgacataagaacaaagaccctaaataatggaaacagtggtactaaggccctgagttttggttacactgtgcactgttgaaaattttttgaacaaaattattagaggccatcattctggactgagcttgtgcactaggtccaaacagacaaaatcaaactgaaaatttaaggaaataggtagattctgtaggttttgtttttcttctgtaaacagcagatcttaacacaaggggtttccctctactcaaacctttaaaaataataataaaataataacctgaatttcttgattccactttacaaaacccatagttctgctatttcacagtggaatctgagactaagtacatttttgatggtgacagtgttatcaatgtctaaagttttggtctatcaaaatttagaagatgaccaaaaaaggagaaattgtttaattataccctaaatctaccccctttcatgtttaagtttggtcaataagtttttttgttgttttgttttgtttacatagtaaactgaaacctaactgaatgtgtaaatagactgtactcatttttgtaccaacaactgtgttttggccaataaaaggatgtcaaatgttc

SEQ ID NO: 1260 - DNA, 2242 bp, Homo sapiens
aagaaaaaagaaaaaaaaaatccaaaagagagaagagtttttgcattcttgagatcagagaatagactatgaaggctggtattcagaactgctgcccactcaaaagtctcaacaagacacaagcaaaaatccagcaatgctcaaatccaaaagcactcggcaggacatttcttaaccatggggctgtgatgggaggagaggagaggctgggaaagccgggtctctggggacgtgcttcctatgggtttcagctggcccaagcccctcccgaatctctctgctagtggtgggtggaagagggtgaggtggggtataggagaagaatgacagcttcctgagaggtttcacccaagttccaagtgagaagcaggtgtagtccctggcattctgtctgtatccaaaccagagcccagccatccctccggtatcggggtgggtcagaaaaagtctcacctcaatttgccgacagtgtcacctgcttgccttaggaatggtcatccttaacctgcgtgccagatttagactcgtctttaggcaaaacctacagcgccccccccctcaccccagacctacagaatcagagtcttcaagggatggggccagggaatctgcatttctaacgcgctccctgggcaacgcttcagatgcgttgaagttggggaccacggtgcctgggccaggtcagcagagctgcctcgtaaatgctggggtatcgtcatgtggagatggggaggtgaatgcaacccccacagcaggccaaaaccttggcctccatcgccacagctgtctacatctagggccccaaaactccattcctgagccatgtgaactcatagacaccttcagggtgtggggtacagcctccttcccatcttatcccagaaggcctctcccttcttgtccagcccttcatgctacacctggctggcctctcacccctatttctagagcctcagaggacccatccaccattcattcattcattcattcattcattcattcattcattcattcatcaacataaatcataacttgcatgcatgtgccaggcacaggggataccctctagagacaatctcctcctagggctcatggcctagtggaggagacagattaaaacttaattagaaaaactggctgggattacaggcatgagccactgcgtctggccttctataattttctggtagtcacgatggaaacaaacaaaacaccttagaaccagagatcgaccccctcaagcaatacatcaattcccttcacaagaaacgtcggggctacatgagtatctgtgttgaatgcggtctgaaatgatcctatggattttcccggctggttgccactgctgtacaacattcagtgcccacatccacctgtgccattaagcttttttgagacatgagagatgcctcttccctgctgtatgacatgcatttgggaagttggaaagaaatgacaaaatcagggagaaaacatccaagcttcttacctgtagatagaatcagccctcacttggtgcttattaccagttattcaagaacaataacaacaacaaaattagtagacatccaagaagcacatattaggaccaaagatagcatcaactgtatttgaaggaactgtagtttgcgcattttatgacatttttataaagtactgtaattctttcattgaggggctatgtgatggagacagactaactcattttgttatttgcattaaaattattttgggtctctgttcaaatgagtttggagaatgcttgacttgttggtctgtgtgaatgtgtatatatatatacctgaatacaggaacatcggagacctattcactcccacacactctgctatagtttgcgtgcttttgtggacacccctcatgaacaggctggcgctctaggacgctctgtgttcactgatgatgaagaaacctagaactccaagcctgtttgtaaacacactaaacacagtggcctagatagaaactgtatcgtagtttaaaatctgcctcgcgggatgttactaaactcgctaatagtttaaaggttacttacaatagagcaagttggacaattttgtggtgttggggaaatgttagggcaaggcctagaggttcattttgaatcttggtttgtgactttagggtagttagaaactttctacttaatgtacctttaaaatagtccattttctatgttttgtataatctgaaactgtacatggaaaataaagtttaaaaccag

SEQ ID NO: 1261 - DNA, 2361 bp, Homo sapiens
caaattaattgtggctggacgcagtggcgcggcagtttaattctccggcggctgcagattgacgggacgagatggtcctggcagggctcatcaggaaactcggtcatcagctggccgagatcagggagcgcgctctcaagagtattctctgcaagattgagcacaacttaatctgctacgctgatctcattcaggagaggcaactttttcttcatttgctggaatggttcaatttcccgtccgttccgatgaaggaagaggttctgaacctgttaagcagattggttaagtatcccccagcagtccaacatttggttgacgttggtgcagtagagttcttatctaagcttcggtctaatgtggagccaaatctgcaggctgaaattgatggcattctggatggactttttcttcttccttcggaagttcctgcactatcttctgccgcataccaaaccaatcaaactgaattgtcaaaaaaccctgaaatcttaacaggatattttccccaagacaaaagtaatttccagcagatggaagtgccgccacgaccagtggtaaatcagactgtgaagtgcttgaagttttctacatttccttggctacccctgaccaccacagacagacatgtcctctcctctaatgaaagctctttaagaagtagtaaccacactttaatctggaacacctgtgaactattgaaggatgttatcatgcaagattttcctgctgagattttccttcaaaggccaaaaattgttcagagccttttatctctgttgaaactggcctttggaggagatggaaagcatcgcctggcattacagtcggtgtcctgcctgcagcagctgtgcatgtatttaagaaacagacttaactttcaccgagatccaggttttttctccaataaacacgacacagtttcccaaaattcttctttgtcttattgtcatgaagcaagaggtactcatcattcccagaatccttccccaggaagcagcagccctcggccttctgtggttgggcgcacaggccagcgacccagaggagatggccaggactgggatgcagcgtcctctagtggaagtagtagtcatgctcatgtaaactccaggatatccgttcattcacctttggatatgggacacatagatctgccagagctggaaactgaagacacattggaactacaattccagcagctcagtcttccccagttttgtgtctccattctggaatcagctgttcctctcttaagaacaggtagcagacaagtgataataagagttctggaattgcttacagaggatatgacacttattggtgaagcaatttcaacagatatctgggatgacagcagcctttttggtatagatatgaaggagaaactactcctggtgttgggagcccttggagaaaccatgtgctaccataaaagtagtatcagtttggagcagccagaggtgatgcttgtgcaccacagaatggcctttatcagcatttccctgtttgcagttcgactgctacaaacgcttctccctgttgaaaaggcaagcgagtttttatcagagcctatgtcaacagcattatttctcctttctttggacatgcctatttctttggaatatccaaatattcatgaagctgttgtggcctatttggaacagctgaattctgaaaactacagtatttataaacgaactgcagaggccgtttattcaattgaatgcacctgtaacttcctgtctgatattgggaaagagggagagaagaatctcttagaattagtggagctggcagaccaagccttgcgtagcttttcctatcatcagcatttcccgctaataaaggaaatcatcagcatttgttcaaagatgtaatattttctttcttaatgtgattacgttattattggacacttagggtgtgtgtaaacttagaaacagtgaaagtgaaactgactgtatatctttgttattattttttagtttaattgcttttatatgtgtctgatttttaaagggtatatgtacagctgcattaggatacttaactgttatattcaagattaaacttcaaaaatgtcatgcctacaatcaaaatgaataatccttggatttttatacatttgtttttggtatccatccagactattcacacacattgtttatttatctttaaagttttaattaataacttaaactgagagttttgtaacttttattactttgtacctttttcttatgtggatttttagaaaagactgtgtattggttaatttattttgaggacatcagcaaatttctatttagaacttagtgtctttattgcttttggaaagaataaattctgtgatgtgat

SEQ ID NO: 1262 - DNA, 2506 bp, Homo sapiens
aaatcgaaactaaacgtaagcttcagaaaccgaaacttaatagaagagctcaagagccgcggccagacgtttgcggagtccagggtctttcggagttgaatttgcagctgggctccttcactttggtctcggcttttatctgcctccctgataggtttttggtcttgctgacttcaagaatgaagctgcggactctcgctgtgagtgctacagttgttaaagatggcgtgtctggagtttgttcctttcgatgttcagatgtgtctggagtttttccttctggtcccaaaccagttgtcttcctgcaacatggctcgctggcagattctagtaactgggtcacaaaccttgccaacagcagcctgggcttcattcttgctgatgctggttttgacgtgtggatgggcaacagcagaggaaatacctggtctcggaaacataagacactctcagtttctcaggatgaattctgggctttcagttatgatgagatggcaaaatatgacctaccagcttccattaacttcattctgaataaaactggccaagaacaagtgtattatgtgggtcattctcaaggcaccactataggttttatagcattttcacagatccctgagctggctaaaaggattaaaatgttttttgccctgggtcctgtggcttccgtcgccttctgtactagccctatggccaaattaggacgattaccagatcatctcattaaggacttatttggagacaaagaatttcttccccagagtgcgtttttgaagtggctgggtacccacgtttgcactcatgtcatactgaaggagctctgtggaaatctctgttttcttctgtgtggatttaatgagagaaatttaaatatgtctagagtggatgtatatacaacacattctcctgctggaacttctgtgcaaaacatgttacactggagccaggctgttaaattccaaaagtttcaagcctttgactggggaagcagtgccaagaattattttcattacaaccagagttatcctcccacgtacaatgtgaaggacatgcttgtgccgactgcagtctggagcgggggtcacgactggcttgcagatgtctacgacgtcaatatcttactgactcagatcaccaacttggtgttccatgagagcattccggaatgggagcatcttgacttcatttggggcctggatgccccttggaggctttataataaaattattaatctaatgaggaaatatcagtgaaagctggacttgagctgtgtaccaccaagtcaatgattatgtcatgtgaaaatgtgtttgcttcatttctgtaaaacacttgtttttctttcccaggtcttttgtttttttatatccaagaaaatgataactttgaagatgcccagttcactctagtttcaattagaaacatactagctattttttctttaattagggctggaataggaagccagtgtctcaaccatagtattgtctctttaagtcttttaaatatcactgatgtgtaaaaaggtcattatatccattctgtttttaaaatttaaaatatattgactttttgcccttcataggacaaagtaatatatgtgttggaattttaaaattgtgttgtcattggtaaatctgtcactgacttaagcgaggtataaaagtacgcagttttcatgtccttgccttaaagagctctctagtctaacggtcttgtagttagagatctaaatgacattttatcatgttttcctgcagcaggtgcatagtcaaatccagaaatatcacagctgtgccagtaataaggatgctaacaattaattttatcaaacctaactgtgacagctgtgatttgacacgttttaattgctcaggttaaatgaaatagttttccggcgtcttcaaaaacaaattgcactgataaaacaaaaacaaaagtatgttttaaatgctttgaagactgatacactcaaccatctatattcatgagctctcaatttcatggcaggccatagttctacttatctgagaagcaaatccctgtggagactataccactattttttctgagattaatgtactcttggagcccgctactgtcgttattgatcacatctgtgtgaagccaaagccccgtggttgcccatgagaagtgtcctagttcattttcacccaaatgaagtgtgaacgtgatgttttcggatgcaaactcagctcagggattcattttgtgtcttagttttatatgcatccttatttttaatacacctgcttcacgtccctatgttgggaagtccatatttgtctgcttttcttgcagcatcatttccttacaatactgtccggtggacaaaatgacaattgatatgtttttctgatataattactttagctgcactaacagtacaatgcttgttaatggttaatataggcagggcgaatactactttgtaacttttaaagtcttaaacttttcaataaaattgagtgagacttataggccc

SEQ ID NO: 1263 - DNA, 2822 bp, Homo sapiens
agatgctgcatttgctgtctccgcgacaactgcctgttcttccggagctcgtggtctgagggcccgactttcatcttagtctgtttttgtggggaacatttttttttaagcttttcctttgaaagtcttttttcgttgagaactttagaggcctcggggaataggccactgggttgtgatgtcatcgagtattgctaatgatgtgcccttttcctccatccatgtcggtttaccttctgtgttgttatttctcacgaaacctcttcttggttctgtaagcgcacaactcatcaattattattttatttatttttttgagacgaagtctcgctctgtcgcccaggctggagtgcagtggcgcgatctcagctcactgcaacctccgcctctcaggcttaagccattctcgtgcctcagctttcccagtggttgggactacaggcgcccgccaccacacccggctactttctgtattttcagtggagacggggtttcgtcatgttggcctggctggtctcgaactcctggcctcagatgatccgcctcggcctcctaaagtgctgggattacagacgtgagccaccgcgcccacgttggcttgaacattagtgtatttagtaaggatcaacttgttttctttggaacttttaagtattttgggcttcaagactatctaagctgtacgtggtaggaatattggttgaatttaacctcagctagcctgtaaggaacctttgtttcctaaattattgattcattaagtgatgtgaccagaagcttggcttcgcagtgagcgatgtgcattttgttgggcagtggcctgtggaaattggattccccccttcagcagtatgttggtctgagaaccatattggttaagttgttattttaactgtgctttaacagacaactggaactgattgtttggtatgaatttctagcacctctaaaagtacttaggggcttttttttttctggatggttaagtgtattaaatatccctcattgtcttaattatcttgctctataagcatatagttggaaagagaggggacactaggaagaaaatagaaatggagaccaaaacttctattagcattcctaaacctggacaagacggggaaattgtaatcactggccagcatcgaaatggtgtaatttcagcccgaacacggattgatgttcttttggacacttttcgaagaaagcagcccttcactcacttccttgcctttttcctcaacgaagttgaggttcaggaaggattcctgagattccaggaggaagtactggcgaagtgctccatggatcatggggttgacagcagcattttccagaatcctaaaaagcttcatctaactattgggatgttggtgcttttgagtgaggaagagatccagcagacatgtgagatgctacagcagtgtaaagaggaattcattaatgatatttctgggggtaaacccctagaagtggagatggcagggatagaatacatgaatgatgatcctggcatggtggatgttctttacgccaaagtccatatgaaagatggctccaacaggctacaagaattagttgatcgagtgctggaacgttttcaggcatctggactaatagtgaaagagtggaatagtgtgaaactgcatgctacagttatgaatacactattcaggaaagaccccaatgctgaaggcaggtacaatctctacacagcggaaggcaaatatatcttcaaggaaagagaatcatttgatggccgaaatattttaaagagctttgccttgttgcccaggctggagtacaatgatgcaatctccgctcactgcaacctgtgcctcccgggttcaagtgattctcctgcctcagcctcccaagtagctgggattacagttgtttgagaacttctactttggctccctaaagctgaattcaattcacatctctcagaggttcaccgtagacagctttggaaactacgcttcctgtggacaaattgacttctcctgaggtggatcttggaaagcactagaaactaaacatcttcaccaggtgctgaagaaaagtgtcttcgttttaattgccaagcagggatgtggacatttggatggtgacttccctgggtggttccccatagattcaccattgcctctaatggtgtctacacccgtcatactaccagctgagatggtggtgggcataaggagaatttgtgcctataacccttagtgtgttctggttttttttcttttaatttttaaattgtcgtaaaatactcataaaacatactgtcttcaccatttttaagtgcacagttcagtaacgttaactgttaatacattcataatgctgtgtggccgtcaccgccgtccatctccataggcttctcagcttgtaaaatggaaactgtacccattaaacagtaattcccactcctcccagcccccgcagccaccattctgctttctgtctctctggttttgactattctcagtatctcatataagtggaatcatacagtgacttgtctttttgtgactggcttatttcacttagcataatgtcctcaaggttcatccatgttgtgtcaggtgacaggatttccttcctgtattatacatataatggaatgttccgttacatgtgcgtaccacactctgttcctccatcagtgaacacttggcttgcttcctcttgactattgggagtagtgctaatacagacacgggggtgcaaatatctctttgagactctgcctttaattcctttaccacccagagttttatctttagcaaaataaccattaaagttgtttgcctttt

SEQ ID NO: 1264 - DNA, 2538 bp, Homo sapiens
gcaactgtggctcccgaagctgcttcgggccccagcggtgagggagaagactctcaaccagggtgacttctaggcgtcctccctgagctaccggggacactggcgttattgcccggaacactgagatagggaatgctcgagaaacagaagcaggagtattttatacagaaatcttgtgaaaccactgcccaaccagagcaatgattgttcaaagagtggtattgaattctcgacctggaaaaaatggtaatccagtggcagagaatttccgaatggaagaagtctatttaccagataatattaatgaaggacaagtacaagttagaactctttatctttctgtggatccttacatgcgttgtagaatgaatgaagacactggcactgattatataacaccttggcagctatctcaagtcgttgatggtggaggtattggaattatagaagaaagcaaacacacaaatttgactaaaggcgattttgtgacttctttctattggccctggcaaaccaaggttattctggatggaaatagccttgaaaaggtagacccacaacttgtggatggacacctttcatattttcttggagctataggtatgcctggtttgacttccttgattgggatacaggaaaaaggtcatataactgctggatctaataagacaatggttgtcagtggggccgcaggtgcctgtggatctgtggctgggcagattggccatttcttaggttgttccagagtggtgggaatttgtggaacacatgagaaatgcatcctcttgacctcagaactgggctttgatgctgcaattaattataaaaaagacaatgtggcagaacagctccgtgaatcatgcccagctggagtggatgtttattttgacaatgttggtggtaacatcagtgatacagtgataagtcagatgaatgagaacagccacatcatcctgtgtggtcaaatttctcagtacaacaaagatgtgccttatcctcccccgctatcccctgctatagaggcaatccagaaagaaagaaacatcacaagggaaagatttctggtattaaattataaagacaaatttgagcctggcattctacagctgagtcagtggtttaaagaaggaaagctaaagattaaagagacggtaataaatgggttggaaaacatgggagctgcattccagtccatgatgacaggaggtaacattggaaagcagatagtttgcatttcagaagaaatctctttgtaattgctgtaaatgtcatcaaggcaatcatagatttcttttccattttgcatattttcaaagatatgttaaaaaatccttagactatacatagctcttgatttaaatgtgatcataggtgttatttttagttgcatagggtatttgatacaatcattaatggatcatacacaataggtttttaaaaattaataacttttagtaattacttttattaatttaaaatagaacacttgagaggcactttgtaaagatttgttaaactggaaacgttttacatgatctgatacaaccattaatgaatcatacacaataggttttttaaaattaatattaataacttttattaatttaaaatagaatgcttaaaataaaatagaatgcttgagaggcactgagtaaagatttgttgaactggaaatgttttacatgattcttaaactgaaacttggtgtaagaatagaattgagatggcctttttttcacattgtagactgaaaagagacttaatggtatgatgtgtacatagggactgggggcaggattgggggtttcggagcttgtgtaacagtttttgggataggagaccagcggttttgggttgggattactatgggaagataaataacttaggttggttaagttgacaagatttactccagaggatcatctctttgtatttgccaaataatttactgtatagcctaaaaactccatatatattgagaaaagcatatgtttattttaggttagcaggcacatactgtcaagttgtaaagattgagagggcaaacagatgtaaacatcacttgtaggtgattaaaaagattgacagccgggcctgatgtctcaagcctgtaatcctagcactttgggaggcagaggcgggcagatcacttgaggtcaggagttcgagaccagcctggccaacacggtgaaaccccatctctctaaaaatacaaaaattagctgggcgtggtggcacacgcctgtaatcccagctactcaggaggctgaggctggagaatcatttgaacctgggagggggaggttgccgtgagctgagcttgcaccattgcactccagcctgggcgacaagagtgaaattccatctcaaaaaacaaaaacagattgacaacaaagacagtttcagaaaatgacaggactgggcaaattaacaaatgtttgtaaacatgaatgttcaggaactactgatgtacctccaaagtttgttttattaattgtactcaaccctcgcagaacagtaaaactgaagattattgtt

SEQ ID NO: 1265 - DNA, 2171 bp, Homo sapiens
atacggtaagcacggcgaggtccagagaggaccccagtgcgcggagcggcacggcgcccactcctctcgccctcggcgcctagcacgctgccaagaaccgcgggtgcccagtaaatatttgtggattgagatggagcagagggcaggcggaaaccgtgtacagacgtccacacttaactgcgctggggccgcggtgattgacgagatgcctgaggctgccgtgaaatcaacagccaacaaataccaagtcttttttttcgggacccacgagacggcattcctgggccccaaagacctcttcccttacgaggaatccaaggagaagtttggcaagcccaacaagaggaaagggttcagcgaggggctgtgggagatcgagaacaaccctactgtcaaggcttccggctatcagtcctcccagaaaaagagctgtgtggaagagcctgaaccagagcccgaagctgcagagggtgacggtgataagaaggggaatgcagagggcagcagcgacgaggaagggaagctggtcattgatgagccagccaaggagaagaacgagaaaggagcgttgaagaggagagcaggggacttgctggaggactctcctaaacgtcccaaggaggcagaaaaccctgaaggagaggagaaggaggcagccaccttggaggttgagaggccccttcctatggaggtggaaaagaatagcaccctctctgagcccggccctggccgggggcctccccaagaggaagaagaagaggaggatgaagaggaagaggctaccaaggaagatgctgaggccccaggcatcagagatcatgagagcctgtagccaccaatgtttcaagaggagcccccaccctgttcctgctgctgtctgggtgctactggggaaactggccatggcctgcaaactgggaacccctttcccaccccaacctgctctcctcttctactcacttttcccactccaagcccagcccatggagattgacctggatggggcaggccacctggctctcacctctaggtccccatactcctatgatctgagtcagagccatgtcttctccctggaatgagttgaggccactgtgttccttccgcttggagctattttccaggcttctgctggggcctgggacaactgctcccacctcctgacacccttctcccattctcctaggcattctggacctctgggttgggatcaggggtaggaatggaaaggatggagcatcaacagcagggtgggcttgtggggcctgggaggggcaatcctcaaatgcggggtgggggcagcacaggagggcggcctccttctgagctcctgtcccctgctacacctattatcccagctgcctagattcagggaaagtgggacagcttgtaggggaggggctcctttccataaatccttgatgattgacaacacccatttttccttttgccgaccccaagagttttgggagttgtagttaatcatcaagagaatttggggcttccaagttgttcgggccaaggacctgagacctgaagggttgactttacccatttgggtgggagtgttgagcatctgtccccctttagatctctgaagccacaaataggatgcttgggaagactcctagctgtcctttttcctctccacacagtgctcaaggccagcttatagtcatatatatcacccagacataaaggaaaagacacattttttaggaaatgtttttaataaaagaaaattacaaaaaaaaattttaaagacccctaaccctttgtgtgctctccattctgctccttccccatcgttgcccccatttctgaggtgcactgggaggctccccttctatttggggcttgatgactttctttttgtagctggggctttgatgttccttccagtgtcatttctcatccacataccctgacctggccccctcagtgttgtcaccagatctgatttgtaacccactgagaggacagagagaaataagtgcccactcccaccctcttcctactggtctctctatgcctctctacagtctcgtctcttttaccctggcccctctcccttgggctctgatgaaaaattgctgactgtagctttggaagtttagctctgagaaccgtagatgatttcagttctaggaaaataaaacccgttgattact

SEQ ID NO: 1266 - DNA, 2479 bp, Homo sapiens
tggatgaggtcagaatgaccgcttttggcctagcggtttgtaggcggtgcgtccttcctgcgctgggatccgaccatgcaagaaggacattcacatttaacctgtatacaagttatagctatttgtgccttttatatatatatatatatataaaattggaagcaatataatgacagttctgtaactgcccagggagttcaccttgcccgctacctagacagagccgatttctcaagacaggggaatagcaatagagaaagagtaattcacgcagtgtcctctgtgcgggagaccggagtttttttattttattttatttttttgaaacagaatcttgctctgtctcccaggctggagtgcaggcttggagttttatgattattcaaatcagtctccctgagcatttggggtaagagtatttagaacgtttattttgccaaggttggggatgcatatgcatgacacagcctcaggatgtccttgatgacacgtgcccaaggtggtcagagcacagcttggttttgttggagagaaatgctcggtgccgcaaagtgaaaccagcactcaagcgaaagttttctcagcaacgcaatttacttctgcagaagcgtgctgctcgcatcaatcacgatcgcaagagcacactgaacagaggaaagcaggggtttttattcctaacgcagtccctacctctggcatgggctggggtcagaccgcacgatctaaactgacccggttggctatttgtgaatattttcccaaataaggaagggggaagggggatgtgagttacaatggtgggacttgcggtttccaagggagaaatgggtgcagagcaggtaaccaagggaacagatgtgagttattgattagaactgacggaaggttgtttacagtaactaagggcaaggaggcatggagaacaagaaagttgagttcgaaaacaaaaaaacaagaaagttaacatgccaaaccttggaagagaaactgactgtatctgacagctttatacattttagggaaacaggagacatcaatcaacatatgtaagatgaacactggtttgatccgggacaacctgaagcaaaagcgggtcaactcgaagccaggagggggcttccaggtcacagaaatggggtctccctcagttgcccaggctggtctctggtgcccaacgccgggctcccggtaatctctacaaataatccagtgaaggaatgccagagagtggaaagtggaggatgactgacaaaggacgcccgagtacgttttcacttcaagctctacaggagagaatcagcttcctgtctgggtacccacaagacatcttaagctgtgccatgagacagagtccaagaagaggaaaagacctcagaatgtctctgcgcccccagttcgtcagacggctcagatgaacatctctgttgagcagatggaaaccagtaaaactccccaagcaactccaccgacctgggggcagatgaagagactggctcacattgcagaagagaacctgaggtctcagaacaagccactgaccaccagtaatctaatggtagctatgatggcggtaatctccttggtggtgagtcttcctgtagcagaggcagatcaaaattacacctatttttgtaataggaggaaggaggaggaggaggaatgttaatgaatgtttctattggttatcgctttcctgccatctgcctggggccagcagcaggatttttaaattatgatacacaaagttggatggtttatgttcctgcacataacggatcaaaagcctttattcatgcaatcagtggaagaacatttcaatctttggacactattaaataccttgagcatggctatgttgtgacacatcgccagattaataaatttaaacctaataagaacctcctgttattaaatggtcagaaaagctagaggtgctaacctgggaagattatattgcaaacagtgctgctgtactacaaaataattcctatggaatcatcattgattgggcccctaggggacaatttgcagtaaattgtactggacagagtgaagattgtagagagactattttgcaaacgactacccagataatgcaccaaaattacatagaagaattgaaacaaattaccctattaagtgggaggagaacggtatggctcctccaagcccaaaaattattgatccaattataagcccagaacatccagaattgtggaaattaatgatggctcaaagcccaattcggatttggaaagcagaatgtaaaacagagacccatagtaaaaaacttcgatttgttgtagccatgacctctaatcagatggtcccattgcagagttgtgttaaacctccttttatgttggcagtgggaaaaattaatatcttacctgactctcaaaccatatcatgcctcaactgtcgtctttttacctgcattatttctgcctttaataaagataatagcattttactggtt

SEQ ID NO: 1267 - DNA, 2661 bp, Homo sapiens
agccactgtggcctctgcggctaggccggctcgagactcccgggcgcccaggcgctgccgcccgcctcgccgccccacgccgaaggaccacgcgcccgccgccgccagcctctcagcgctcccatgatcgcccggtgccttttggctgtgcgaagcctccgcagagttggtggttccaggattttactcagaatgacgttaggaagagaagtgatgtctcctcttcaggcaatgtcttcctatactgtggctggcagaaatgttttaagatgggatctttcaccagagcaaattaaaacaagaactgaggagctcattgtgcagaccaaacaggtgtacgatgctgttggaatgctcggtattgaggaagtaacttacgagaactgtctgcaggcactggcagatgtagaagtaaagtatatagtggaaaggaccatgctagactttccccagcatgtatcctctgacaaagaagtacgagcagcaagtacagaagcagacaaaagactttctcgttttgatattgagatgagcatgagaggagatatatttgagagaattgttcatttacaggaaacctgtgatctggggaagataaaacctgaggccagacgatacttggaaaagtcaattaaaatggggaaaagaaatgggctccatcttcctgaacaagtacagaatgaaatcaaatcaattaagaaaagaatgagtgagctatgtattgattttaacaaaaacctcaatgaggatgataccttccttgtattttccaaggctgaacttggtgctcttcctgatgatttcattgacagtttagaaaagacagatgatgacaagtataaaattaccttaaaatatccacactatttccctgtcatgaagaaatgttgtatccctgaaaccagaagaaggatggaaatggcttttaatacaaggtgcaaagaggaaaacaccataattttgcagcagctactcccactgcgaaccaaggtggccaaactactcggttatagcacacatgctgacttcgtccttgaaatgaacactgcaaagagcacaagccgcgtaacagcctttctagatgatttaagccagaagttaaaacccttgggtgaagcagaacgagagtttattttgaatttgaagaaaaaggaatgcaaagacaggggttttgaatatgatgggaaaatcaatgcctgggatctatattactacatgactcagacagaggaactcaagtattccatagaccaagagttcctcaaggaatacttcccaattgaggtggtcactgaaggcttgctgaacacctaccaggagttgttgggactttcatttgaacaaatgacagatgctcatgtttggaacaagagtgttacactttatactgtgaaggataaagctacaggagaagtattgggacagttctatttggacctctatccaagggaaggaaaatacaatcatgcggcctgctccggtctccagcctggctgccttctgcctgatggaagccggatgatggcagtggctgccctcgtggtgaacttctcacagccagtggcaggtcgtccctctctcctgagacacgacgaggtgaggacttactttcatgagtttggtcacgtgatgcatcagatttgtgcacagactgattttgcacgatttagcggaacaaatgtggaaactgactttgtagaggtgccatcgcaaatgcttgaaaattgggtgtgggacgtcgattccctccgaagattgtcaaaacattataaagatggaagccctattgcagacgatctgcttgaaaaacttgttgcttctaggctggtcaacacaggtcttctgaccctgcgccagattgttttgagcaaagttgatcagtctcttcataccaacacatcgctggatgctgcaagtgatatgccaaatactgctcagaaatattaggagttgcagctactccaggcacaaatatgccagctacctttggacatttggcagggggatacgatggccaatattatggatatctttggagtgaagtattttccatggatatgttttacagctgttttaaaaaagaagggataatgaatccagaggttggaatgaaatacagaaacctaatcctgaaacctgggggatctctggacggcatggacatgctccacaatttcttgaaacgtgagccaaaccaaaaagcgttcctaatgagtagaggcctgcatgctccgtgaactggggatctttggtagccgtccatgtctggaggacaagtcgacatcaccatgtgttactggcctggaaactgaagggagttttgcaagtgaaaatttagatttctattgacatccttttgttttctaattttaaaaattataaagatgtaaatggaattataaatactgtgacctaagaaaagacccactagaaagtaattgtactataaaatttcataaaactggatttgatttctttttatgaaagtttcatatgaatgtaacttgattttttactattataatctagataatatgatataagagggctaagaatttttaaattgaatcatatatatgatataatttgatccttcttgtatcttgaagttttgtacttgggatttctggactgataaatgaatcatcacattcttctggt

SEQ ID NO: 1268 - DNA, 2342 bp, Homo sapiens
tagagcaagactctgtctccagaaaaacaaaaacaaaaacaaaaaggtaattttatatggttttcccaaatgttgttattatccctattttatcgacgaggaaactggaggtttgtaacttaagagagggttgataatttgcccagggcacatggctcttgcctgcagactccatgtttactttttcccaacctggtaactttcttttaatggaaagctccagaagaggtgtcggtgctactcctccccctcttttccagcaagcattcttctccaaacccagaactgggccacagagcctaacagcttctgggctgcccctgggtgtgaggcgccgcccacatgttagaatttctgggacacgtcagtggttcaagaaggtaaagagatggaaggttatgaaaccaggagtgacctggaaaatcggagccatggggttggcggagctgaccagagggctgaccatgctgggtgctgcatatcagaaggtagtgatggccgggcatggtggctcatgcctgtaatcccagcactttgggaggccgaggcaggcagatcacttgaggtcaggagttcgagatcagcctggccaacgtggtgaaatcctgtctctattaaaaatacaaaaattagccaggcatggtggtgcatgcctataatcccagctactttggaggctgaggcaggagaatcactggaacccaggaggtggaggttgcagtaagctgagatagcaccactgcactccagcctgggtgacagagccaggcttagtctcattgtaatcccagcactttgggaggccgaagtgagcagatcacccgagggtgggagttcgagactaccctgaccaacatggagaaaccctgtctttactaaaaatacaaaattagccaggcgtggtggcacatgcctcagtctcccgagcacctgggattacaggtgcccgccaccacacccagctaattttttgtattgttagtagaaacagggttttaccatgttggccagactggtctcgaactcccgacacctgtctcagcctcccaaagtgctgggattacaggcatgagccactgcacctgccccacatctgtgcttgaaagccgggtctgggtctgggactgtgtcccagggcactcgggagccacggaagagttgggagccagtgaggagcagggtcagctggggtgtgggggatgagctggagggggatggagactggaggcaggaaggctgtggagcagccggctgctggggcatggatccaggaaggggaggatgaggcctaagcagttctaggctacagggacacagaggaggggatatggcaaggggaggcaggtggggagagacagggctcatgacggacaggttttgggggtgaggggtacccagagagggaggccaggctcctgggtggatggtggggccatcctgcaatgggggcctgggggaggagcaggtttgagatgtagaccagccaatgcctgtctctaacctgaaggagggtgattccaggtaaggtgatgcactgacctgtgcccccggatgtgacctctgccccccactgtgacctctgcccccggctgtgacctctgccgccggctgtgacctctgccccctgctgtgacctctgccccaagcccacctattccctcccacctagagaaccctccaaagacagaaactgcaaaaacccttagaggcgatatagcccaacccctcagtttggagttggggaaactgaggcaaagaggcagcgtccctcaggcagccccaggttaggacccagacatgcggatcccaggttccacgctccttccttggccgagtgccctccctccgctgacccctctcccctgcctgcaggacttacagggctccgtggagcgcatctgtgggttcctgggccgtccgctgggcaaggaggcactgggctccgtcgtggcacactcaaccttcagcgccatgaaggccaacaccatgtccaactacacgctgctgcctcccagcctgctggaccaccgtcgcggggccttcctccggaaaggggtctgtggcgactggaagaaccacttcacggtggcccagagcgaagccttcgatcgtgcctaccgcaagcagatgcgggggatgccgaccttcccctgggatgaagacccggaggaggacggcagcccagatcctgagcccagccctgagcctgagcccaagcccagccttgagcccaacaccagcctggagcgtgagcccagacccaactccagccccagccccagccccggccaggcctctgagaccccgcacccacgaccctcataataaacacgtcgattctg

SEQ ID NO: 1269 - DNA, 1979 bp, Homo sapiens
agaaactcacacaccttgacaatctgtctgtccgtctgcagctgcgtgactgtctgtctctgccatgtctctctccccatgccgggcccagaggggcttcagcgctcgctcagcctgttctgctcgctcaaggggccgcagcaggggaggcttcagcagcaggggcggcttcagcagcaggagccttaattcctttggggggtgcctggaaggctctcgtgggagtacctgggggtcagggggtaggctgggggtgcggtttggggagtggagtggtgggcctgggctctccctgtgccctccggggggcatccaagaagtgaccatcaaccagaatccgctgaccccactgaagattgagatcgatccccagttccaggtggtgcggacgcaggagacccaggagatcagaaccctcaacaaccagtttgcttccttcattgacaaggtgcggttcctggagcagcagaacaaggtcctggagacgaagtggcatctgctgcagcaacaggggttgagtggcagccagcagggcctggagcctgtctttgaggcctgcctggatcagctcaggaagcagctggagcagctccagggagaacgaggggctctggatgctgagttgaaggcctgccgggaccaggaggaggagtataagtccaagtatgaggaggaggcccacaggcgtgccacacttgagaacgactttgtggtcctcaagaaggatgtggatggggttttcctgagcaagatggagttggagggcaagctggaggctctgagagagtacctctacttcttgaagcatctgaatgaagaagagctgggccagctccaggcccaggccagcgacacgtctgtggtgctgtccatggacaacaaccgctacctggacttcagcagcatcatcactgaggtccgcgcccggtacgaggagatcgcccggagcagcaaggctgaggctgaggccttgtaccagaccaagtaccaggaacttcaggtgtctgcccagcttcatggggacaggatgcaggaaacgaaagtccagatctctcagctacaccaagagattcagaggctgcagagtcagactgagaacctcaagaagcagaacgccagcctgcaggccgccatcactgatgctgagcagcgtggggagctggccctcaaggacgctcaggccaaggtggacgagctggaggctgctctgaggatggccaagcagaacctggcccggctgctgtgcgagtaccaggagctgacgagcacgaagctttccctggatgtggagattgccacttaccgcaggctgctggagggcgaggagtgcaggatgtctggggagtgcaccagccaggtcactatctcctcggtgggaggcagcgctgtcatgtctggaggagttggtggaggcttggggagcacttgtggactcggtagtgggaaaggcagccctgggtcctgctgcaccagcattgtgactggaggctccaacatcattctgggctctgggaaggaccctgttttggattcctgctctgtgtctggctccagcgctggctccagctgccacaccatcctgaagaagacagttgagtcgagtctgaagacatccatcacctactgagcgacccagcagccacctccttcctgaacacatttggcccactccccccatcagccggctctgcaaggccaactccgtgtccgctgcccacagcccaagccagcccacagcggatgctgcaaaaatcaataaagtctcccctcctgctgttctgaatgctctaagtgcttgcacacctcacccagcaaaacaaaagctgtgtggctccccagcttcctctcctcggaaggcaattgtggcatatctgtgtccagacgtgttctattggtatctcactccacatcccagccactctatcaaggaaactaaattcatccaaggtagttcaattaaattgactttttgaaaaagt

SEQ ID NO: 1270 - DNA, 1860 bp, Homo sapiens
cagaaaatatgtatgagtttcaggcggtggtttggaatcttaactttatccccttctacctttctcttttggtgatctttgcagctcagtcagagggcagaccctgtgaatataactccagaatctaccaaaacggggaaagtttccagcccaactgtaaacatcagtgcacatgtattgatggcgccgtgggctgcattcctctgtgtccccaagaactatctctccccaacttgggctgtcccaaccctcggctggtcaaagttaccgggcagtgctgcgaggagtgggtctgtgacgaggatagtatcaaggaccccatggaggaccaggacggcctccttggcaaggagctgggattcgatgcctccgaggtggagttgacgagaaacaatgaattgattgcagttggaaaaggcagctcactgaagcggctccctggtaagtggagactgagcacttcagacactgtactgagatgcatttctggtctaaatctttgtagaaatgagtgcttgagcctgtttgtgtcggtatgcctctgagaagtcttccctcttatatgtctctagtttttggaatggagcctcgcatcctatacaaccctttacaaggccagaaatgtattgttcaaacaacttcatggtcccagtgctcaaagacctgtggaactggtatctccacacgagttaccaatgacaaccctgagtgccgccttgtgaaagaaacccggatttgtgaggtgcggccttgtggacagccagtgtacagcagcctgaaagtaagttccttcagggacgtgtagactgttgcctggcaggtgggtgggatgtgaacatctttttgaagaaagagaaatatcacccctaactttccttctctcctttctcttacagaagggcaagaaatgcagcaagaccaagaaatcccccgaaccagtcaggtttacttacgctggatgtttgagtgtgaagaaataccggcccaagtactgcggttcctgcgtggacggccgatgctgcacgccccagctgaccaggactgtgaagatgcggttccgctgcgaagatggggagacattttccaagaacgtcatgatgatccagtcctgcaaatgcaactacaactgcccgcatgccaatgaagcagcgtttcccttctacaggctgttcaatgacattcacaaatttagggactaaatgctacctgggtttccagggcacacctagacaaacaagggagaagagtgtcagaatcagaatcatggagaaaatgggcgggggtggtgtgggtgatgggactcattgtagaaaggaagccttgctcattcttgaggagcattaaggtatttcgaaactgccaagggtgctggtgcggatggacactaatgcagccacgattggagaatactttgcttcatagtattggagcacatgttactgcttcattttggagcttgtggagttgatgactttctgttttctgtttgtaaattatttgctaagcatattttctctaggcttttttccttttggggttctacagtcgtaaaagagataataagattagttggacagtttaaagcttttattcgtcctttgacaaaagtaaatgggagggcattccatcccttcctgaagggggacactccatgagtgtctgtgagaggcagctatctgcactctaaactgcaaacagaaatcaggtgttttaagactgaatgttttatttatcaaaatgtagcttttggggagggaggggaaatgtaatactggaataatttgtaaatgattttaattttatattcagtgaaaagattttatttatggaattaaccatttaataaagaaatatttacct

SEQ ID NO: 1271 - DNA, 2596 bp, Homo sapiens
acagagacctggagccagggcagcaagaaggtgtctgttggagccagcagaacagaaccaatttgaacaagaacctccagaggaacgacgaaccctgagaccacagctgctacagaccacaaacaccccatcagccaagagagacccttgctgctgtgacaggacctgactttccagctggagcccaccgtgctgaggactccatccagcaagcctctgagcccctgaaggacccccttcttcactcccacagcagccctgctggccagagaacccctggagggtcacagacaaagaccccaaaactggaccccaccatgcccccaaagaagaagccgcagctgccccctaaacctgcacacctaacccagagccaccctcctcagaggctgcccaagcccttgcctctatctcccagcttttcctcggaggtggggcaaagagaacaccaacgaggtgagagagatacagccatccctcagccagccaaggttcccactactgtagaccagggccacatacctctggccagatgtcccagtggacatagccagcccagcttacaacatggcctcagcaccacggcccccaggcccaccaagaatcaggctacaggcagcaatgcccagagctctgagccccccaagctcaatgccctcaaccatgatcccacctcaccacagtggggccccggcccctcaggagagcagcccatggaaggttcccaccaaggggcccctgagagccctgacagtctgcaaagaaaccagaaagagctccagggcctcctgaaccaggtgcaagccctggagaaggaggccgcaagcagtgtggacgtgcaggccctgcggaggctctttgaggccgtgccccagctgggaggggctgctcctcaggctcctgctgcccaccaaaagcccgaggcctcagtggagcaggcctttggggagctgacacgggtcagcacggaagttgctcaactgaaggaacagaccttggcaaggctgctggacattgaagaggctgtgcacagggcactcagctccatgtctagcctccagcctgaggccagtgccagaggccatttccagggacctccaaaagaccacagtgcccacaagatcagtgtcacagtcagcagtagcgccaggcccagtggctcaggccaggaggtcggaggtcaaactgcagtcaagaaccaagccaaggttgaatgccacactgaggcccagagtcaagtcaagatcagaaatcacacagaggccagaggtcacacagcctcaactgccccttccaccaggaggcaggagacatcaagagagtatttgtgccctcctcgggttttaccttccagccgagattctccctcctccccaacatttatctccatccagtcggccacaaggaagcctctagagactcccagctttaagggcaaccctgatgtctcagtgaaaagcacacaactggctcaggacataggccaggccctgctccaccagaaaggtgtccaagacaaaactgggaagaaggacatcacccagtgctctgtgcaacctgaacctgcccctccctcagccagtcccctgcccagagggtggcaaaagagtgttctggagctacagacggggccagggagctcacaacactatggagccatgagaaccgtgactgaacagtatgaggaggtggaccagtttgggaacacagtcctcatgtcttccaccacagtcaccgagcaggcagagccacccaggaacccaggctcccacctcgggctccacgcctcccccttgctgaggcagttcctgcacagcccagctgggttcagcagtgacctgacagaagctgagacggtgcaggtgtcctgcagctactcccagccagctgcccagtgaggcccaccgcctcccaccacacctgccacctgttcctggcctccactcccccaggactgaagtgggtacctgcctcctgtacactggagcaaggaccaagaggaaatggcatcttcagaggattactgtgggccatttccctttcgcagttctttcaataggcccagttcttccaaatggaaaaagaaaggtctggaagaggcccacagagttgcacaggcgtgggggtaggatgggggctcccagctgcttgtggaggatgtaatatatacagacacacacatgtttttcacacaggcctggcccacgcatcgacatgtgtgaatttgcacaccactgcctgaattggagccccccagagtgtccctctacccagagtttttatttctttaattagtctgagtgttcccagccatctgctccttaatccctggagaggaacagagccaactggacacagcgttggtctctgtttggaatcactgtgaggtctccagaaggacctggccgccagccccttcatcaccatctccatcattcagctggtcatctggtggcccaaaggtcacccaaagagtcagcaatcagcatgtccctagaagccaaatgcactgcctttctctgtccccatgactgtcccccactctgcaccccaaatgggaagcatacggtctgaataaatccaagttttattctct

SEQ ID NO: 1272 - DNA, 2821 bp, Homo sapiens
gagcgctgtcagttcctgatccggctggtgcccgctccagccgcggcaggttccagagctgagaggccacccccacgccgcgggcttccagcgcgtggagcaaggggagcggccccggcgccgcccatatccccggctgcgctagtcctggcgctgcaggtccgggaggcgcaggcggagagcggcggtgcccccgagcccctctgcggacggctcaggcgggaggaccccgcgcggctggatggcggcggccgcgcggcctcggggtcgggcactggggccagtactgccgccgactccgctgctcctgctggtactgcgggtgctgccagcctgcggggcgaccgctcgggatcccggggccgcggccgggctcagccttcacccgacttacttcaacctggccgaggcggcgaggatttgggccaccgccacctgcggggagaggggacccggcgaggggaggccccagcccgagctctactgcaagttggtcgggggccccaccgccccaggcagcggccacaccatccagggccagttctgtgactattgcaattctgaagaccccaggaaagcacatcctgtcaccaatgccatcgatggatctgaacgttggtggcaaagccctcccctgtcctcaggcacacagtacaacagagtcaacctcaccttggatctggggcagctcttccatgtggcctatattttaatcaaatttgcaaattctcctcgccctgatctttgggtcttggaaagatctgtagactttggaagcacctactcaccatggcaatattttgctcattctaaagtagactgtttaaaagaatttgggcgggaggcaaatatggctgtcacccgggatgatgatgtactttgtgttactgaatgttcccgtattgtacctttggaaaatggtgaggttgtggtgtccttgataaacggtcgtccaggtgcaaaaaattttactttctctcacaccctgagggagtttaccaaggcaacaaacatccgcttgcgttttcttagaaccaatacgcttcttggacacctcatctccaaagcccagcgagatccaactgtcactcggcggtattattacagcataaaggacatcagcattggtgggcagtgtgtttgcaatggccatgctgaagtgtgcaatataaacaatcctgaaaaactgtttcggtgtgaatgccagcaccacacctgtggggagacgtgtgatcgctgctgcacagggtacaatcagaggcgctggcggcccgccgcttgggagcagagccacgagtgtgaagcatgcaactgccacggccatgccagcaactgttactatggtccagatgttgagcggcagcaggcaagcttgaatacccagggcatctatgctggtggaggggtctgcattaactgtcagcacaacacagctggagtaaactgtgaacagtgtgctaagggctattaccgcccttatggggttccagtggatgcccctgatggctgcatcccctgcagctgtgaccctgagcatgcggatggctgtgaacagggttcaggccgctgtcactgcaagccaaatttccacggagacaactgtgagaagtgtgccagtgccgagagcatgtcgtgggaaaggtgtgccagcggcctgaaaacaactactatttcccagatttgcatcatatgaagtatgagattgaagacggcagcacacctaatgggagagaccttcgatttggatttgatccgctggcatttcctgagtttagctggagaggatatgcccaaatgacctcagtacagaatgatgtaagaataacattgaatgtagggaagtcaagtggctccttgtttcgtgttattctgagatacgttaaccctggaactgaagcagtatctggccatataactatttatccatcctggggtgctgctcaaagcaaagagatcatcttcctgccgagtaaggagccagcctttgtcactgtccctggaaatggttttgcagacccattttcaatcacaccaggaatatgggttgcttgtattaaggcagaaggagtccttctggattacctggtgctgctccccagggactactatgaagcctctgtactgcagctgccagtcacagaaccatgtgcctacgcaggacctccccaagaaaattgcttactctaccagcatttgccagtgaccagattcccctgtaccctggcttgtgaggccagacacttcctgcttgatggggagccaagacccgtggcagtgaggcagcccacacctgcacaccctgtcatggtggacctcagcgggagagaggtggaattgcatctgcggctgcgcatcccacaggttggccactacgtggttgtggtcgagtattccacggaggcagctcagctgtttgtggttgatgtgaatgtgaagagctccgggtctgttctggcaggccaggtgaacatttacagctgcaactacagtgttctctgccggagtgctgtgattgatcacatgagccgcatcgccatgtatgagctattggcagatgcagacattcagctcaagggacacatggcccgattccttctggtatgcttctgttttgcccattgaattttagaagcattttgctgatatctatattttttgaagcttattaaaattttggctggggttgtattactcctataatctgtgaagaattgccagtttaatgtttattcttcccatctagaacctgacttgcctcttcatttgtttgagcattttttgatatggcctaataaaatttagtcatatttaagcacctctc

SEQ ID NO: 1273 - DNA, 2264 bp, Homo sapiens
agcgatctgcaggtagcggtgcgcgcgaccgctccccggcgggagccagcgaaggtttccatgtcagaggccgatggagaactgaagattgccacctacgcacaaaggccattgagacacttcgtgtagctggaagacaccaacttcctgacaggagctttatttcatttgggatttcaagtttacagatggtatcttctcaaaagttggaaaaacctatagtttcagaaacaactctccaagttccatttccaaggaaagtcttaaccatttgtcccttctggcgtaccctctttcattgaaatccatgcagaatataccagagatgggcagtagcgaaccccttcccatcgcagatggtgacaggaggaggaagaagaagcggaggtgccgggctactgactccttgccaggaaagtttgaagatatgtacaagctgacctctgaattgcttggagagggagcctatgccaaagttcaaggtgccgtgagcctacagaatggcaaagagtatgccgtcaaaatcatcgagaaacaagcagggcacagtcggagtagggtgtttcgagaggtggagacgctgtatcagtgtcagggaaacaagaacattttggagctgattgagttctttgaagatgacacaaggttttacttggtctttgagaaattgcaaggaggttccatcttagcccacatccagaagcaaaagcacttcaatgagcgagaagccagccgagtggtgcgggacgttgctgctgcccttgacttcctgcataccaaaggcattgctcatcgtgatctgaaaccagaaaatatattgtgtgaatctccagaaaaggtgtctccagaaaagggactccccacgccgcaagtcctccagaggaacagcagcacaatggacctgacgctcttcgcagctgaggccatcgcccttaaccgccagctatctcagcacgaagagaacgaactagcagaggagccagaggcactagctgatggcctctgctccatgaagctttcccctccctgcaagtcacgcctggcccggagacgggccctggcccaggcaggccgtggtgaagacaggagcccgcccacagcactctgaaatgctccagtcacaccttataggccctaggcctggccaggcattgccccctggaaacctgtgtggctaaagtctgctgagcaggcagcagcctctgctctgtggctccattcaggctttttcatctacgaaggccctgaggttcccatcaacccccatttccctagggtcctggaggaaaaagctttttccaaaggggttgtctttgaaaaggaaagcaatcacttctcactttgcataattgcctgcagcaggaacatctcttcactgggctccacctgctcacccgcctgcagatctgggatccagcctgctctcaccgctgtagctgtggcggctggggctgcagcctgcagggagaagcaagaagcatcagttgacagaggctgccgacacgtgcctcttccctctcttctctgtcaccctcctctggcggtccttccaccttcctctgtcctccggatgtcctctttgcccgtcttctcccttggctgagcaaagccatcccctcaattcagggaagggcaaggagccttcctcattcaggaaatcaaatcagtcttccggtctgcagcacggaaaagcacataatctttctttgctgtgactgaaatgtatccctcgtttatcatcccctttgtttgtgattgctgctaaagtcagtagtatcgtttttttaaaaaaaaagtttggtgtttttaaccatgctgttccagcaaagatgataccttaaactcccactgcaagcccatgaacttcccagagagtggaacggcttgctcttctttctagaatgtccatgcacttgggttttaatcagcagttccctattattctgattttaagctgttcctgtgatgaacttagagacagcatcggtgtctgctgctgtgtccccaggtcttgtgtgggtggcacagatctgggcagttagatagtgctctgtgcctaaggtgaagccacactagggtgaagcctcacttccctgtttgagcaatgcagtgcctgctgcccgtgtgcatgaaggtacagccattcagataagtggaactattgagttacataaagaaaatagatttgcatttgtcaggcagacgtttatacaacaccacggtgcttttatacattgtgcttattttaataaaactgaaattct

SEQ ID NO: 1274 - DNA, 2308 bp, Homo sapiens
agtaaactgtgctgcgatgctagcctttcagtcactaccagaggtcccagcagcaaaaacaaaaattgtggatgatacattttaaccttctagaaactcagctaactcctttagttttcaagaaataatgaagaaaacatcaatatatcacctaccatcatttcattacttgatggattcagaagctcaagaagacaccagagaagcctatgatgacaagcaggtggtcacagagatcatggcaagatgttttattccaactctgataacaactacttcctgggaaagttttcattttattggtcatgagattcgaattactgaggccatggattgttatggtgctgttgtttggccatcggtataatttcatacagaatttgttacattccaattatttttccagccggttttattcattattatgttctatttggaagaagaaaacaggttccatattccttctttgtgacctcaaatagtactatgttttagaaatcatgtgactaggaaattatttctcccaattaattctgtaattctatttcttttcttttctttttttttgagacagagtcttgctctgtcacccgggctggagtgctgtggcttgatctcagctcactgcaacctctgcctcctgggtttaaatgattcccctgctgcagcctcctgagtagctgggactacaggcatgcaccaccacaccaagctaatttttgtaattttggtgggaatggggtttcaaccacgttggccaggctggttttgaactccttgcctcaagtaatccatccacctccacctcccaaggtgctgggattacaggcataagctaccacgctgggcctcaattaattctatttctgactttattgaaatttgtaggattaatacagggtgttgtttacttcttcagtttttaaaataagagtttagagcagtaaacatttttatttccccttttatcagctccatttgagttaaacaattacattgaaatctatatgagtctcacatgtagaatgtcctcaaagaccctcaatcctttaccaactgtcccatgaagagtaatggacccaccaccccacctgccccaatcccacacaccacttggaaatgactagtattatcagaagttgcttcctttaaaaatgatcaaacctaagcaattgaactccacatttttagttatttctcttttcctctcaataatccccaaggaatttttctagcagaaatgttgaacctctcagaggatgcacttttgttcatattttttggagtgatgtacaagtacacacatgagtactctcatgtactcatatgagcacgcatacatagcataacattagcagcatatttgtccaataaagtttaattttactttctgttattacttgccaagcgtcccttttttttttttctaactttcataggcccttgttctatgctatttcctggaaacaaatgcaaagcagtataatatggttgacaaaaacgtgattgaaattggagctggaacagggctagtctccattgtggcaagtttacttggtgctcacgtgacggccacagatttacccgaattacttggaaacctgcaatataatatttcccgaaacaccaaaatgaaaagcaagcatttgcctcaggttaaagaactctcctggggagtagctttagatacaaacttccccaggtcttctaataattttgactatattttggcagcggacgtggtctacgctcatcctttcttggaagagctcctcattacctttgaccatctgtgcaaagaaaccaccatcatcctgtgggccatgaaattcaggttggagaaggaaaataaatttgtagatagatttaaggagttgtttgacctggaggaaatttccagtttccctagcctgaatattaagttgtataaagctgtgaagaaaaaccggaggagcgtatgacatcctcgatgaggatgtggaaatgctaaggcaatttttagcaaataatcactttaaagaaaaccctgaataactttatgtgccactgagtttcccaaggggaaatacacacacagatgcgcgcgcgcacacacacacacacacacacacacacacacacacacaaaaccccctactacaagaatagaagatagtttcccaaatttgcctcaccccaggcagtaatttttccagatactgcatgtgagtctaggattggggtaacttgttcctagtttgtctctatcagcacccaggccctgggcctgccttctactcatgcggtaatagaagctcttggcaaagtc

SEQ ID NO: 1275 - DNA, 2027 bp, Homo sapiens
gtactgatgcatcatagttgacttccaccagtgttttaattgtttcatggttgcagatataaagggcaatgaacaaattgaaaaatattcttggagagaagcttgtgatactggcagctcaagaatggacagaaagcatggaaaatacatattgaacgttgagcactctgaaaaccagccgccaatcacacatccaaatgaccaagaggctcacagttccatatgctggtgtctaccttcaaatgatataaccagtgatgtctctcccaacttaactggggtctgcgtgaacccaggaatccttgcacattcaagatgtctacagtcagaatcctgtaacacacaggtaaaagaatattgccgcaatgactggtctatgtggaaagtcttcctggcttgtctcttagcctgtgtgataatgacagcaattggagtacttataatatgcttggtgaataacaaaggatcggccaattcctccattgttatccagctatccacaaatgatggagagtgtgtgactgtcaaacctggaacaccctctcctgcttgtccacctacaatgaccaccacttcaactgtacctgcaagtacagccactgaatctacaacttcaacagctacagctgccaccacttccacagaacctataactgttgcacctaccgatcatttataatttgaacagccatagccatcacttcaactgaaacttcaacctctaccacttcaactcagtttgcaactataatagctactcctatcacttcaagtggaatcatggctgcagtcactttaacagactctataaccgttacaacttcaacaaaatcaagtcctacttcaacttaaacttacttgacaactcaaataatcaccacttcgaccatctctttgactgaatcaacaactacattcccttcaactgaatctgcaaccacttccacttaacctataactactgtaacttctacttagcctacagtaacaatgctcatcactcttttccaacaatgtataatctccacctattcatctgaggactaagctctgatttttcatcttgcccaaattcctttctaaggggtatggggagtcatgccctacaaaccataaattctcatcagatgggttttatttaaccctgtatattgtgacttactttctaatctgactctggcataacaagggaaaaaaatcaaaatgttttaccccaaaatatatttccttgccataccttgaaattgtcctgcaaagtctcttgtggggaaactccacattctgtagagaatatcctttcccctttgttttccttcctttctttccagatccaggagataatcaactaagagccaggcacccttttaggtctaataagaaacactttacaacctgctctctctctgaagtctgctttctgagagattcctctgcacaataaaacttgatctccacaatcctttatcttaacctgaacattcctttccatggatctcaggtcttcagataaactaaaccaattgtcaaccagaacatgtttaaatttacctatagcctggaagccccaactttgagttgtcctgcctttctgaaccaagccaatgtatttcttaaatgtatttgattgatgtctcatgtctccctaaaaatatataaaaccaaactgtaccttagccactttggacacatgttctcaggacctcctgagggctatgtcatgagccatggtcactcatatttggctcagaattaatctcttaaaatattttacagagtttgactctttttgttaacacatccgaacctgcaactacaaatgccaccattaccacttaaaacttgatagaactagcatcagtcatcaaaataacctgttctatattaagttaacttttagttatcaccagtaatactagcctacaactactcgccacactggctcttccccaaaattgaaattgtacaatatgtgagtctaattcttgctaacataacattattgcctacattaaaagcttctgcaaagc

SEQ ID NO: 1276 - DNA, 1540 bp, Homo sapiens
actcctaacctccaggccccatggccacttcctccctcctgcgaggacagctggcaactggggtgcagtaccctccctgccccccgcccccttctttgggccacacgctgtgagaaggggtctagatcctcgagggggggatggctgccctgtgccggctctgcaggcacatgatagccgactgccactgctggggcgaggagggggggcctctttccacccgacagataccgacacccaatatagaaaccgagaagagccaggcaggaaaacacaagctctcacccgtctggaggctccgcggcttggcgcccagatatgccaggttcacgttggccttgcggccgtcgatgatggggttcgggtctttgcaagccctctcagctgccgcccggtcggccatggtcacctggtggagcagagacacatcaggggctgccgtggggggaaccaggggcgaaaggggcagacggctccgccctggcaccggatgctgccacccctctcttcccttcctctgagggtgcctgtgacccagggtccttgagccaaagctcctctgaaccctacctggggctctcccacaaagatgcctcctggattccagctcctcccgtcaaagttcaaggcctgggaaatgtggccttcaaggacaaaaataatcccctgcggggatagggcaaaaatgaaccccgaagggagcttggggggccgcctggacttgcccaccagtgagggccgagactttcctctgagaaggagtttgcgacgctatgcttggaaggcaaccgtcaggtgctaagcagaaccatgcttgggccttccacaccagtcaaggtactctcacagcaaagccccaccgaaggggcccacaggttggattcgaggtacgtgaagtcccaagagatgacatgaagccccaaatggatgccctggctccccagcaccagagggaaacgccccctcaccgaagacagtggcaagtgccatgcttcaagtaacacagggagcggcctccagtgcacctgttttagcagccagtcctggaggcagaaagatttacaagggagtggaaaggctggcaaacacaggacacatggagatgcccaaagtcagtgggggtcagggttcaacctggaaatgcagtcttctcagctgaggaaggcagtgagtcctggccaggaagccggtccaagcccctgcctcgtccccagttcacctcgtgaaagctgatgaatgaccaatgcttgcagaggggtctggagtaatggcggcaccgtattaaggggcgatcaggctgtatcttgacactgggattcataagaggaggaagaaacctatcatgctgacgggtagtgaagaagagaaatgaaagacaaaagacacaagagaaggccaggtgcagtggctcactcctgtaatcccagctacctgggaggctgagacaggagaatcgcctgaacccgggaggcagagggcgcactgagctgagatcacgccactgcagtgcagcctggacgacagggcgagactcagtctc

SEQ ID NO: 1277 - DNA, 2376 bp, Homo sapiens
ggctgcggcgacggcggtcgcgtcggcgtcagggtcggggtcggtaaggggtgcggcaatgctgcaactgcgggactcggtggactcggccggtacgagccccacggcggtgctggcggccggcgaggaggtgggggcaggcggcggcccgggcggggggcggccgggggcggggacgccgctgcgccagacactctggcctctcagcatccacgaccccacgcgccgcgcccgcgtcaaggagtacttcgtgttccggcccggcagcatcgagcaggcagtggaggagatccgcgtggtggtgcggcccgtggaggacggcgagatccagggagtgtggctgcttaccgaggtggatcactggaacaatgagaaggagcggctggtgctggtcacggagcagtccctgcttatctgtaaatacgacttcatcagtctccagtgccagcaggtggtgcggatagcgctcgacgcagtagacaccatttcctacggagaattccagtttccccctaaatcgctcaacaagcgagaaggttttgggattcgaattcagtgggacaagcaaagtcgtccttccttcataaacagatggaatccctggtctaccaacgtgccctatgccactttcacagaacacccgatggctggcgcagatgagaagacagcatctctgtgtcagttggaaagcttcaaggctctgttaatccaagctgtcaaaaaagcccaaaaagaaagccctttgccaggacaggcgaatggcgtgctgatcctggagcgccccctgctcatcgagacctacgtgggactcatgtccttcattaacaacgaggcgaaactgggctactccatgaccaggggcaaaataggcttttagccgctgcgttctgggagctcctccccctccccagaaggccaagggatgtgggggctgggggactgggaggcctggcagtcttcatgctgccctgctgctgctggaaggatggggatctttcacctttagggatctcagcacaattagaatcgtaaagtgaattctatctatttaattggatattggactctgctcatataagctacagacaaaagccaaaagactctcgctgtccctgtgctgctggtatttcattctctgtaacttcagttctggtgttttccttgagtatctacttggcttctcgtggtttttcccaccccagctgccccagcacgcgggacccatagcacaccccttagcgcttgcctaggttgctgaaaacagggaggcacctggtatctcgagtgcctgcagttgcaagtgtgtttacacctggtgtccaattttgtattttaaaatgtaatccatttttacttcagctcatccaaaagcagccagcagaccggttgactgagaccggtctgtggctgtgggccccttggtgacccgctgctcttttggaaatgggtgacctgaagtgacactttttccacaattaacccaagttgtgttaatacttcaggtctgtttcccagacccagaaagctttacagaaaatcattgtaagacaatttattaatttgagaaagtcaccttgacagttctttgcacacaagttttacacctctctggattcgaagtttgtattgtattcatagttaaagggaatcgggtactttgcttgttgaataatgcactttaaaacaaggaaccgtatcaggccagcatggtggctcatgcctgtaatcccagcattttgggaggctcaggcagacaaatcgctctagctcagaagttgcagagcagcctgggcaacatggtgaaacccgtctctaccagacaaaaagcagccaggcgtggtggcacatctgtggtcccagctacttgagaggctgagccaggaggatcgcttgagcccaggaggcggaggttgcagtgagctgagatggcaccacttattgcactccagcccgggcgacagagcgagactccatctaccagatccttatgacgcagctgatgcctgccttggttcctaccactctggtgtagacagaggactttgtccaagtctcacactaaacatgcccgggcttcgatgtgcctggaggatttccccacagggacccacgcacctccctgtatctgcgcagcttgctcgtgtggctggaagcgctgtcgataagcttcacgcactggcttgccagttcttcagctctaggacttgtagctttaagcaaacggtgtggcatgggttgagtgtggccacctgcaggatgtgcagggctgcctcagaagctggctggggactctagcctctgtgttcataaagacattaagaagtggatggatgttgttccttttttgaagttgtcattaaagtaggtgcaacaacc

SEQ ID NO: 1278 - DNA, 2468 bp, Homo sapiens
cactgccattggtccacgggacggcccttccaggagccagtggctgggagcagtgctggaggatcaaggaagcagagatggacggtgaggcagtccgcttctgcacagataaccagtgtgtctccccgcacccccaagaggtggactctgtggcaatggctcctgcagcccccaagataccgaggctcgttcaggctaccccggcatttatggctgtgaccttggtcttctctcttgtgactctctttgtagtggttcaacagcagacaagacctgttccgaagcctgtgcaagccgtaattctgggagacaacattactgggcatttaccttttgaacccaacaatcatcaccactttggcagggaggcagaaatgcgagagcttatccagacatttaaaggccacatggagaattccagtgcctgggtagtagaaatccagatgttgaagtgcagagtggacaatgtcaattcgcagctccaggtgctcggtgatcatctgggaaacaccaatgctgacatccagatggtaaaaggagttctaaaggatgccactacattgagtttgcagacacagatgttaaggagttccctggagggaaccaatgctgagatccagaggctcaaggaagaccttgaaaaggcagatgctttaactttccagacgctgaatttcttaaaaagcagtttagaaaacaccagcattgagctccacgtgctaagcagaggcttagaaaatgcaaactctgaaattcagatgttgaatgccagtttggaaacggcaaatacccaggctcagttagccaatagcagtttaaagaacgctaatgctgagatctatgttttgagaggccatctagatagtgtcaatgacttgaggacccagaaccaggttttaagaaatagtttggaaggagccaatgctgagatccagggactaaaggaaaatttgcagaacacaaatgctttaaactcccagacccaggcctttataaaaagcagttttgacaacactagtgctgagatccagttcttaagaggtcatttggaaagagctggtgatgaaattcacgtgttaaaaagggatttgaaaatggtcacagcccagacccaaaaagcaaatggccgtctggaccagacagatactcagattcaggtattcaagtcagagatggaaaatgtgaataccttaaatgcccagattcaggtcttaaatggtcatatgaaaaatgccagcagagagatacagaccctaaaacaaggaatgaagaatgcttcagccttaacttcccagacccagatgttagacagcaatctgcagaaggccagtgccgagatccagaggttaagaggggatctagagaacaccaaagctctaaccatggaaatccagcaggagcagagtcgcctgaagaccctccatgtggtcattacttcacaggaacagctacaaagaacccaaagtcagcttctccagatggtcctgcaaggctggaagttcaatggtggaagcttatattatttttctagtgtcaagaagtcttggcatgaggctgagcagttctgcgtgtcccagggagcccatctggcatctgtggcctccaaggaggagcaggcatttctggtagagttcacaagtaaagtgtactactggatcggtctcactgacaggggcacagagggctcctggcgctgaacagatgggacaccattcaacgccgcccagaacaaagcgcctggttccaagggatcctgcccactcagaaggtatattattgtgaattctgggatgggagcttgcagcttcatagacacccctccctgtccctggatcctcagtaactaagagcaacctgagcacagacaccctcagggtactccttctcccagccctgtcctcatcctagggccactaggggatgaaggacccatctcaagtcagctccctagactcatcccatgtcagctccctaggagccacagcaccaggaagggatgctgccttcatctaacagtataaagccctgttgtcttcgggttttgggaaaagaatcagtctgacaactggcggcacaagaatgggcagactgaagactgtgtccaaattcagcagaagtggaatgacatgacctgtgacaccccctatcagtgggtgtgcaagaagcctatgggccagggtgtggcctgagggcaggccagagctgaggggctgctcctgcttgccaatactgaccctcctcctcgatgccttcggagcctctgagctctgcttgttctctgggaccttccgttggccttgtggacttcctgccttgttctttgattcagccctttcaaacatgcttacctcgagtgacccagtgacatcagtggcttctcaagggaagagccttgctgtgcccctgtagcctcagcacccagcacaggcctggcagacagcaggtcctcaataaatactcgctggatc

SEQ ID NO: 1279 - DNA, 2351 bp, Homo sapiens
aaacagaaagtaaaactgaacaaactagagatattgttaaaggggatgtcaaaacctgtaaatggctttttgagacccagccaatggagtctctttatgaaaaagtttcgttaatgaccagcagtgaagaaattcataagggagatgtcaaaacttgtacttggctctttgaaactcagccacttgataccataaaagatgactctgaaacagcagtcaaattgcaaactgtaaaacaggaggagatccaaggtggggatgttcgtacagcatgttttctttttgagacagaaaatttggacagcatacaaggagaagaagtgaaggaaatcaagcctgttgaaatggatatacaagctggagatgtttccagcatgaggtataaatttgaaaatcagtccttagattctataagttctagttcagaggaagttttgaaaaagatcaaaaccttaaaaactgaagatattcagaaaggcaatgttttaaattgtaggtggctttttgaaaaccaaccaattgataagataaaagaaagccaagaaggtgatgaatgtgttaagacggtgacagacatacaaggtggggatgtaagaaaggggtgctttatttttgagactttttctttagatgagattaaagaagaatctgactatatcagcaccaagaaaacaattactgaagaagtaatacagggtgatgtaaaaagctacagaatgctctttgaaacccagccactctatgcaattcaagaccgagaagggtcctatcatgaagtgaccacagttaaaaaagaagaggtaattcatggagatgtgcgaggaacaaggtggctttttgaaacaaagccattagactctattaataaatcagaaactgtgtatgttattaaatctgtcacacaagaagacattcagaagggagatgttagttctgtcagatacagatttgaaactcagccactggatcagatttctgaagaatcacataatattatgcccagtattgaccatatacaaggtggcaatgtaaagacaagtagacaattctttgagtctgaaaattttgataagaataactatatacgaacagtaagtgtcaatgaaatacaaaagggcaatgttaaaacatctacttggctatttgaaacccacactatggatgaactgagaggagaagggttagaatatgaaaatatcaagacagtcactcaggaagatgtgcagaaaggtgatgttaagcaggctgtgtggctttttgaaaatcgaactttcgattctattatggaagcacataaaggtatcacaaaaatgaccaaggaagaaatccctccttctgatgtcaaaacaaccacatggctctttgaaacaacaccacttcatgaatttaatgaaactagagtagaaaagatagaaattattggcaagagcattaaagaaaccttagaagatctctactctcaaaaagttatccaggctcctggaatcatcattgaagctgatgaaataggggatgttcgaatggcaaaatacaagctaatgaaccaagcatctcctgagatacagaaagaagaaattatcagggctgatctcagaaatataatggtgaacctactttccaaaagggactgtactgaaagagagattttgattagtgaagaagagaagggaaatgttaatttgactaaaactcaattattaaacagatcaactgaatttcatgctgaaaaagaagagatagtgaaaggtgatgtacaacaagcaataaaaaacctgttctctgaggaaagatctgtaaagaaaggcatcttaattcaggaagatgaaaaaggagatattaacatgactatctattgtcttcttcatgaaaatgatggtgacacaattgagcgtgaagaagtaataggtggtgatgtcaaacgtaccattcataatttattgtcttccacatcaaacaataaaatatctgaaagggctaaaattgatgcctctgagagaggaaatgttcagtttttcacaacctgcatagaagctggagctttggattatctgaaacaactccacacagagtcaaatgaaacactgacagctaagaaacaagaaggagagaaagaaatcattggtggtgatgttgaaggtacaaaactgttactgaagaaaaggcagtctctggttgaacgtactgttagtgaaactgacatcatccctggagatgtgcataacacagttaaggtttttatgaccgagcctcagagtacatttggtaagatacccaaagaagagattataaaaggtgatttgacatcaaccctaaattccctcagccaggctgtaaatcagaaaacagtgacg

SEQ ID NO: 1280 - DNA, 2295 bp, Homo sapiens
aaggtcacatgggacagctccttctgtgccgtcaaccccaaattcctggccattattgtggaggctggaggcgggggtgccttcatcgtcctgcctctggccaagacagggcgagtggataagaactacccactggtcactgggcacactgcccctgtgctggatattgactggtgtccacacaatgacaacgttatcgccagtgcctcagacgacaccaccatcatggtgtggcagattccagactatacccccatgcgcaacattacggaacctatcatcacacttgagggccactccaagcgtgtgggcatcctctcctggcaccctactgccaggaatgtcctgctcagtgcaggtggtgacaatgtgatcatcatctggaatgtgggcaccggggaggtgctgctgagcctggatgatatgcacccagacgtcatccacagtgtgtgctggaacagcaacggtagcctgctagccaccacctgcaaggacaagaccttgcgcatcattgaccccagaaaaggccaagtggtggcggagaggtttgcggcccacgaggggatgaggcccatgcgggccgtcttcacgcgccagggccatatcttcaccacgggcttcacccgcatgagccagcgagagctgggcctgtgggacccgaacaacttcgaggagccagtggcactgcaggagatggacacaatcaacggggtcctattgcccttttacgatcccgactccagcatcgtctacctgtgtggcaagggcgacagcagcattcggtactttgagattaccgacgagccgcctttcgtgcactacctgaacacgttcagcagcaaagagccgcagcggggcatgggtttcatgcccaaaaggggactggatgtcagcaagtgtgagatcgcccggttctacaagctacacgaaagaaagtgtgaacctatcatcatgactgtgccccgcaagtcagacctcttccaggacgatctgtacccggatacgccaggcccggagccggccctagaagcggacgaatggctatccggccaggacgccgaacccgtgctcatttcgctgagggacggctatgtgccccccaagcaccgcgagctccgggtcacgaagcgcaacatcctggacgtgcgcccgccctccggcccccgccgcagccagtcggccagcgacgcccccttgtcgcagcagcacaccctggagacgctgctggaagagatcaaggccctccgcgagcgggtgcaggcccaggagcagcgcatcacggctctggagaacatgctgtgcgagctggtggacggcacggactagccccgcgcgccaggcaggcggagcggggcggggcgcacaagctcggccccgccccggcttttagtcccgaactccggaccccgccttcttgggctgggcccgggggcgggactggggagggaactccgcccctcgcgggagaccagaactcttggagcttaggggagacccacgtcgctccagcggaggctggactgcgagcctcgtctgggactcggctggagctggcctagggaggcctggggtaacctggggggctcagcaatggtgctgcacggcgaggtggtgtccccctttgtcctccgcccagggcagggaaagtgcttagtattagcgtgatgcttggggttattggagcctgagcttgacctcaaacgggtggcgatttgatgggtacccccaggctggggagaatgacagcgcttctcctaatcagctcactggattccatcaccctgagcggtaaaccagatgggcgtcaccccagttctgcagacacatacacaacccgtttgctgcagagccggacccagtggctacacccacagcggtctgtggtagagaactctcttccttctttccaccgacaggggcgagggctgcttcctcgcggcagcccccgcgaagaaatctcgagagaactggcatgaggagttaggttcatcacaaatacacacacactgcccccaaccctctgccgttgcctctctcagaaaaacaagacgtactgaatgaaatattttactaagcgttcagactgtgcctcctgcatgggtgggagtgaggggaacgagacccccagcctctgcaaatgctacccccaggctcctgggagacctggcgatgcactcctgggctcagggtccatcaggcagcctcttaccctagagctctctccactctgaggttcagaaggaccccaacccacaccgtaggcgttccccccaagtaaagttaggtagcaaaagc

SEQ ID NO: 1281 - DNA, 2017 bp, Homo sapiens
atcactggtgctgcaagtcgctgagctgacagttgtgccgaggactgtcaccattgggcaggcatggtggccagctcctcacttggctgaggtccagggatggacacaggtgtctggggttggggagctgcagcctgcaggtgggggccagcagagagggctgcaggttcgctgaacgcggccagcctgagggaggagcagctccacctgtccttgctggtgtccagcggctggagaacaatcagcttccacgtggtgcccgtggtgagaaggaagcttggggcgcctgccctggagggggtgcagcagatgcccggattccctgagggcagcttgagaaggatcctcagccaaggggtggacctggtgccggccagcgcccagctctggaggacctccactgactacctgctcacgaggctgctgggggagctgggctccctgcagggtcatcgcctggacagcctctccatcctcgaccgggtcaaccacgagagctggcgtgacagtggccagactgacggcctgacctttggccacctgaagatggtgctgctgtgggcctctgtgctcttcccggcgcccgaggactgggcagaactgcagggcgccgtgtaccgcctgctggtggtgctgctctgttgcctggccacgcggaagctgccccacttcctccacccgcagcgcaacctgctgcagggcagcggcctggaccttggtgccatctaccagcgcgtggagggcttcgccagccagcccgaggcggccctgcgcatccacgccacccacctgggccgcagccccccgccgcgcatcggctccgggctcaaggcgctcctgcagctgccagccagtgaccccacttactgggccactgcctacttcgacgtcctgctggacaagttccaggtcttcaacatccaggataaggaccggatctctgccatgcagagcatcttccagaagaccaggactctgggaggcgaggagagctgagctgggccacctggtctcagccacctgttcttggctccccaacagactctgcactgcaccatgggaggctcctgggatgtttggaagaagaaacgggcttctccttgagggggtagtggagggattttgtccccagcagtggcctctgagagtctttcagtgcctggtggggcagggcaggcctcttggagcacctcctccctgggtcagggcctggatgcaggtgccaagctctccatgtggtgcatgttgacccagccacgtggtgttgtcaagcaaacagcatcggcaggagacctggagctgaggacttggccctgcctgcactgtatgccattccttggtgacgaaatgctgtatatttggttttgaaaaaatgaatgtgctgggtatacacagcagaaagggtactgtccactttttgtatatcagtgtggaaaatatttcccctagaagtagaaaaggctcatgtgctgatggataattttgagtcttctccattctctgtgaatgacccccttccccaggcatccccacctcctacctcgttcttagagcaaactaaagccaactgagggtgcacacacagccatgagcccacctgcccagggctactcccatctgcttcttcccgtccccgtggaagtggcccctgatatggattgtatctgtatccccacccaaatctcaggtagaattggatctgtgtccccacccaagtctcaggtagacttgtaatccccagtgttggaggaggggcccagtgggaggtgattggatcatgggggtggatttctcccttactgttctcatgatagtgagtgagttctcatgagatctggttttttgagtgtgtggcccctccccctctccttttgctctcttcctctttctccggccatgtaagatatgcctccttctccttcaccttccaccatgattgtcagtttcctgaggcctcccagccatgcttcctgtatagcctgcgggactgtgagtcaattaaacctctttattcatt

SEQ ID NO: 1282 - DNA, 2361 bp, Homo sapiens
aaagcagtgcttctctctggggccaaggccagagctgtggacaccttatcccactcatcctcatcctcttcctctgataaagcccctaccagtgctgataaagtctttctcgtgagagcctagaggccttaaaaaaaaaagtgcttgaaagagaaggggacaaaggaacaccagtattaagaggattttccagtgtttctggcagttggtccagaaggatgcctccattcctgcttctcacctgcctcttcatcacaggcacctccgtgtcacccgtggccctagatccttgttctgcttacatcagcctgaatgagccctggaggaacactgaccaccagttggatgagtctcaaggtcctcctctatgtgacaaccatgtgaatggggagtggtaccacttcacgggcatggcgggagatgccatgcctaccttctgcataccagaaaaccactgtggaacccacgcacctgtctggctcaatggcagccaccccctagaaggcgacggcattgtgcaacgccaggcttgtgccagcttcaatgggaactgctgtctctggaacaccacggtggaagtcaaggcttgccctggaggctactatgtgtatcgtctgaccaagcccagcgtctgcttccacgtctactgtggtcatttttatgacatctgcgacgaggactgccatggcagctgctcagataccagcgagtgcacatgcgctccaggaactgtgctaggccctgacaggcagacatgctttgatgaaaatgaatgtgagcaaaacaacggtggctgcagtgagatctgtgtgaacctcaaaaactcctaccgctgtgagtgtggggttggccgtgtgctaagaagtgatggcaagacttgtgaagacgttgaaggatgccacaataacaatggtggctgcagccactcttgccttggatctgagaaaggctaccagtgtgaatgtccccggggcctggtgctgtctgaggataaccacacttgccaagtccctgtgttgtgcaaatcaaatgccattgaagtgaacatccccagggagctggttggtggcctggagctcttcctgaccaacacctcctgccgaggagtgtccaacggcacccatgtcaacatcctcttctctctcaagacatgtggtacagtggtcgatgtggtgaatgacaagattgtggccagcaacctcgtgacaggtctacccaagcagaccccggggagcagcggggacttcatcatccgaaccagcaagctgctgatcccggtgacctgcgagtttccacgcctgtacaccatttctgaaggatacgttcccaaccttcgaaactccccactggaaatcatgagccgaaatcatgggatcttcccattcactctggagatcttcaaggacaatgagtttgaagagccttaccgggaagctctgcccaccctcaagcttcgtgactccctctactttggcattgagcccgtggtgcacgtgagcggcttggaaagcttggtggagagctgctttgccacccccacctccaagatcgacgaggtcctgaaatactacctcatccgggatggctgtgtttcagatgactcggtaaagcagtacacgtcccgggatcacctagcaaagcacttccaggtccctgtcttcaagtttgtgggcaaagaccacaaggaagtgtttctgcactgccgggttcttgtctgtggagtgttggacgagcgttcccgctgtgcccagggttgccaccggcgaatgcgtcgtggggcaggaggagaggactcagccggtctacagggccagacgctaacaggcggcccgatccgcatcgactgggaggactagttcgtagccatacctcgagtccctgcattggacggctctgctctttggagcttctccccccaccgccctctaagaacatctgccaacagctgggttcagacttcacactgtgagttcagactcccagcaccaactcactctgatcctggtccattcagtgggcacaggtcacagcactgctgaacaatgtggcctgggtggggtttcatctttctagggttgaaaactaaactgtccacccagaaagacactcaccccatttccctcatttctttcctacacttaaatacctcgtgtatggtgcaatcagaccacaaaatcagaagctgggtataatatttcaagttacaaaccctagaaaaattaaacagttactgaaattatgacttaaatacccaatgactccttaaatatgtaaattatagttataccttgaaatttcaattcaaatgcagactaattatagggaatttggaagtgtatcaataaaacagtatataatttt

SEQ ID NO: 1283 - DNA, 2202 bp, Homo sapiens
ccatggtcaaatggacagaaaaggccagtgttatcattatgatcagacaaacagacaaggccagggttcccactacagtcaaccaaacagacaaggtcagagttcccactatggtcagccagacacacaagatcagagttctcactatggtcagacagacagacaagaccaaagttctcactatggtcagacagagagacaaggccagagttcccactacagtcagatggaccgacaaggccagggttctcactacggtcagacagacagacaaggccagagttcccactatggtcagccagacagacaaggccagaattcccactatggtcagacagacagacaaggccagagttcccactatggtcagacagacagacaaggccagagttcccactacagtcagccagacaaacaaggccagagttcccactatggtaagatagacagacaagaccagagttatcattatggtcagccagacggacaaggccaaagttcccactatggtcagacagacagacaaggccagagtttccactatggtcagccagacagacaaggccagagttcccactacagtcagatggacagacaaggccagagttcccactatggtcagacagacagacaaggccagagttcccactacggtcagacagacagacaaggccagagctatcattatggtcagacagacagacaaggccagagttcccactatattcaatcacagactggggaaatacaagggcaaaataagtacttccaagggactgaaggaacaagaaaagcctcttatgttgaacaatcaggaagatcagggaggctaagtcaacagactccaggacaggaagggtaccaaaaccagggacagggattccagtctagggactcacagcagaacggccaccaggtatgggagcctgaagaggatagccaacatcaccaacacaaactcttagcacaaatccaacaagaaagaccactttgtcacaaagggagagactggcaatcatgcagtagtgagcagggccacagacaggcccagaccaggcagagtcatggtgaggggctgagccactgggcagaggaagagcagggccatcaaacttgggatagacacagccatgagagtcaggaaggtccatgtgggacacaggacaggcgaacccataaagatgagcagaaccatcagagacgagacagacaaacccatgaacatgagcagagccatcagagacgagacaggcaaacccatgaagacaagcagaaccgtcagagacgagacaggcaaacccatgaagacgagcagaaccatcagagatgagacaggcaaactcatgaagaggatcaaaaccatcagcaacaacataatagacaaaactatgaggagaaagagaggtatcaaggatctcagaatcaaaaatcccaagtgacccacagaagctgtcctaacagagaaaaattccacatgaaagaggatgaccagagccaaggctcacagaaaagacacactgaaccatccttctatccaacccagagcagtgggaggccccaaaccagagaacagcgtggtcaccctgccaagggagctactgttcccaaccccccttatgactatgtgcaagagcagaaatcctacccatactaggctatgtgagcaccagaggtaaagcaacacaaagccaaaaaagaaacctatatgtcgagttcacctttaattcgatttaagagattgagaatgtatttcttccctctatcctctgctgtatctccctgcaaggatgtttttgagtactagcattcacgtaagggcttttggctcctgtggataaaacatcaggaatttcaagcctcatagtctagactagaatgaaactcagttcaaggctgctacaagagccgagaacatagagtgcatctctgatgtttactacatctcccatgccaggctcttattccacaccagagggactgtccattagtgcctatcactagagctgaatggacccattccaattcaatacctttctagtttctgattatataaaataaagagaaagtatatgtcatatgtttgcaaattccaggggatcaagactattgattcatagctcctaagacctgaaaactcttctcaagaaaatctatgtgcagattatgaattgtattaaaatatctaataaataattgatgagc

SEQ ID NO: 1284 - DNA, 2525 bp, Homo sapiens
ttccctcacggctcttctcccggtccctgaaactcggctgccaggggagctggagccacctgcgaaggtgtcctcccatactggacccctacaggtaacacgtgtcggtgccagggtcccctgccagggtccagagacgcaggcactgccacctggtatcctgagcaccctccagcaccttggggttgggggaggtgggcacatgtctggaactggaacagctggacagatggacagaccctcctcttgaccaatgggtctgtcccaccgtgtcaaaacagcagagaagaccaaactcctacctaactctggaagctccgtgtgcccagctggggcacagccccagctgatgccccagaggggccacccatcgcaagaggggctttgggctctgccctccctccccatggcgcatgggccaaagcctgagactgaaggactgttggacctcagcttcctgacagaggaggagcaggaggccattgctggcgtcctccaacgagatgcccgcctgcgccagctggaggaggggcgggtcagcaagctccgggcctcagtggcagaccctgggcagctgaagatcctgacaggggactggttccaggaagcacgctcccagcggcaccacaatgcccacttcggctctgaccttgtccgagcgtctatgcgcaggaagaagagcaccaggggagaccaggctccaggccacgacagggaggctgaggctgctgtgaaagagaaggaagaggggccagagcccaggctcaccattgatgaggcccctcaggagaggctcagggagactgagggacctgatttcccatcgccttctgtccccctaaaggcttcagatcctgaggaggcgtcccaggcccaggaagatcctggccaaggagaccaacaggtctgtgccgaggaggctgacccggagctggagcccgcgtcggggggagagcaggagccgcggccccagcaagcccaggtaggcgggagtggcccgtggctgctctcaacatccggagcggactccgggcggggagcgctcctgcccagggctgcgagccgcccgcgacccagggcgctcggggcaggggtggggaaagaaggggcgccccgtcacttgccccctctgcagaccaaggccgcgtcccagatcctggagaatggggaggaggccccggggcccgacccctctctcgaccgcatgctcagcagcagctcctcggtgtccagccttaactcctccacgctgagcggcagccagatgagcctgtcaggcgacgcggaggcggtgcaggtccgcggctccgtgcacttcgcgctgcactacgagccgggcgccgccgagctgcgcgtgcacgtgatccagtgccagggcctggccgccgcccggcgccgccgctcggacccgtgagtgccccgccggccaagcggggcgcggctgtcacagcccagcccaccattcacagggtctcggcctcctcgtcctcatcttcaaaatgggaacaacagcgttattgggaggcgtgcgattaagcgagacaatccctgtaaagcgcttagcacgaggcctggcacgtgttcgggatggtggctgggggagcccacaggcaggggagaaggctctgggagggcccctcctcacctcgggttctcacctccccagctacgtcaaaagctacctcctcccggataagcagagcaagcgcaagacggcggtgaagaaacggaatctgaatccggttttcaacgagactctccggtactccgtcccgcaggccgagcttcagggccgcgtgctgagcctgtctgtgtggcaccgcgaaagcctgggtcgcaacatctttctgggcgaagttgaagtgcccctggacacgtgggactggggctctgagcccacctggctccccctgcagccccgggtcccaccctctcccgacgaccttccgagccgcgggttactcgccctgtccctcaagtacgtccccgccggctccgagggcgcaggactgcccccgagcggggagctgcacttctgggtgaaggaggctcgggacctcctgccgctgcgggcaggatccctggacacttacgtacaatgcttcgtgctgcctgatgacagccgggccagccgccagcgtacaagggttgtgcgacgcagcctcagccctgtgttcaatcacaccatggtgtacgatggctttgggcctgctgacctgcgccaggcttgtgccgagctctccctctgggaccatggggccctggccaaccgccagctggggggcacacgcctcagcctgggcaccggcagcagctatgggctgcaggtgccctggatggattccacacctgaggagaagcagctgtggcaagccctcctggagcagccgtgcgagtgggtggatggccttctacccctcagaaccaacctggcccccaggacgtagccccaccaagcctctctctctggacccccatctcagggcctgcccttggctaaagtcaataaagtctattctaagagc

SEQ ID NO: 1285 - DNA, 2150 bp, Homo sapiens
atctccctcctccaccctcatggtcacaggcaaattgcaggagatgcgccctttcccatgaaatttgccccaggctgggctctctagaagcagatgccaagacagtttgggatggaagaggatgggtgtttattgggattaacacttgtgaaaagatggtggagagggcagtcaactgctatgtggcccaagaatgcctcagccaccaggtggtgctcccatcagccagaattgcccatcatggtgtccactgtgcttttgtagccccctggcagatgggagcttccccagaagggacgggacctcaggcaaggcagctctctgaagttgctgatagctggaggccacctgctgccgcactcgctacagccagggcagcaagccctgcctggaaagaggatgtgggtggtgcatctccgcctgccataaagctgcctaggtgcctgacccaggctgcaggacagctgaaggcagagatcggggggagctggtgaagccacgggcctggctgcttcccacacctgccagatgagccaggggttagtgactgtgtcttccctggatctggtcctaaggccatgtcctctcaaggcctggtcgctcttcctggaggggctgtctctgctttgcggacttgtcctatgtccccagtgggcttcagtgggctggcttgccattccctcctttccactgaggtgagtgagttcccatgcactcattgcccatttgggtttcttctatttttcttatcggcttagagaatttctttacatcctcttgaatcagagcatcttctagagtccagtcagtgctgtccaatagaaatacaatctgagccacatatacaatcataaattttctagtagccatacttctaaaagtgcagagaaacaagcaaaattaattttactgggatacatggacagatacttttccaaagaagacatacttgtggccagaaagcatatgaaaaaaagaaaaagctcggtgtcactaatcattagagaaatggaaatcaaaaccacaatgagataccatctaacaccaatcagaatggctatttttaaaaagtcaaaaaataacatgctggcaaggttgtggaaaaaaggggatgcttataccctgttggtgggagtgtttaaccattgtggaaaacagtatggtgattcctgaaagagctaaaaatagaaataccattcaacccagcaatctcattattgggtatacacccaaaggaatataaatcattctaccataaagacccatgcatgtgtatgttcattgcagcactattcacaatagaaaagacatggaaacaacctaaatgcccatcaatgacagattggataaagaaaatgtggtacatatacaccatgaaatagactatgcagccataagaaagaacaagaacatgtctgttgtgggaacatggatggagctagaggccattatccttagcaaacaaacacaggaacagaaaaccaaatatcacatgttctcacttatacgtgggagctggccaggcacagtggttcacgcctgtaatcccagcactttgggaggccaaggtaggcagatcacctgaggtcaggagttggagactagcctggccaacatagtgaaacttcatctctactgaaaatacaaaaattagcccggcctggtagtgggcgcctgtagtcccagctactcgggaggctgaggcagaattgcttgaacccaggaggcagaggttgcagtgagccaagatcttgccgttgcactccagcctgggcgacgagagtgaaactccatgtccaaaaaaaaaaaaaaaaaaaaagtgggagctaaatgatgagaacaaatggacacaaaaagagggacaacaccggccaggcgcggtggctcacgcctgtaatcccagcactttgggaggccgaggcgggcagatcacgaagtcaggagatcgagaccatcctggctaacatggtgaaaccccgtccctactaaaaaaatacaaaaaattagctgggcgtggtggcgggcacctgtagtcccagctactcgggaggctgaggcaggagaatggcatgaacctgggaggcagagcttgcagtgagatgagatccccactgcactccagcctgggcgacagagtgagactctgtctc

SEQ ID NO: 1286 - DNA, 2168 bp, Homo sapiens
atataaagcagcctgtcctggcaagggatggtcatcctctcaacctacagacccagtgagccctaggccctcaccccagacccagctgctggataggacccagccccgctcccagagacaatgaccatgtttgaaaatgtcacccgggccctggccagacagctaaaccctcgaggggacctgacaccacttgacagcctcatcgacttcaagcgcttccatcccttctgcctggtgctgaggaagaggaagagcacgctcttctggggggcccggtacgtccgcaccgactacacgctgctggatgtgcttgagcccggcagctcaccttcagacccaacagacactgggaattttggctttaagaatatgctggacacccgagtggagggagatgtggatgtaccaaagacggtgaaggtgaagggaacggcagggctctcgcagaacagcactctggaggtccagacactcagtgtggctcccaaggccctggagaccttgcaggagaggaagctggcagcagaccacccattcctgaaggagatgcaagatcaaggggagaacctgtatgtggtgatggaggtggtggagacggtgcaggaggtcacactggagcgagccggcaaggcagaggcctgcttctccctccccttcttcgccccattggggctacagggatccataaatcacaaggaggctgtaaccatccccaagggctgcgtcctggcctttcgagtgagacagctgatggtcaaaggcaaagatgagtgggatattccacatatctgcaatgataacatgcaaaccttccctcctggagaaaagtcaggagaggagaaggtcatccttatccaggcatctgatgttggggacgtacacgaaggcttcaggacactaaaagaagaagttcagagagagacccaacaagtggagaagctgagccgagtagggcaaagctccctgctcagctccctcagcaaacttctagggaagaaaaaggagctacaagaccttgagctcgcacttgaaggggctctagacaagggacatgaagtgaccctggaggcactcccaaaagatgtcctgctatcaaaggaggccgtgggcgccatcctctatttcgttggagccctaacagagctaagtgaagcccaacagaagctgctggtgaaatccatggagaaaaagatcctacccgtgcagctaaagctggtggagagcacgatggaacagaacttcctgctggataaagagggtgttttccccctgcaacctgagctgctctcctcccttggggacgaggagctgaccctcacggaggctctagtcgggctgagtggcctggaagtgcagagatcgggcccccaatatatgtgggacccagacaccctccctcgcctctgtgctctttatgcaggcctctctcaccttcagcagcttaccaaggcctcctaatttgccttttacgtctgcttcatgactccctaatgccttcccaacctcgtggtgctgtgtccttaccacctaagggcatttcagagccatcagctgaagacatctgaaatctcagctggtcacccatgataaccaacttccacctgcccaaccatatatcaccccctacccctccagctccgcaacccactaagcccatctgctgatgcttaaattttctttacttttcttttttttttttttttttttttttgagatggaggctcgctctgtcacccaggctggagtgcagtggcttgatcttggctcactgcaacctccgcctcccaggttcaagcagttctcctgcctcagcctctcgagcagctggaattacaggcacgtgccacgacacccagctaatttttgtatttttagtagagacggggtttcgccatgttgcccaggttggtctcgaactcctggcctcaagtgatctgcccgcctcggcctcccaaagtgctgggattacaggcgtgagccaccgtgcccggcctgtgcttaaatattctaggagtagaagcactcagacttttaaaactatgagccgtttcagcaaaactgagaaaaaaagaagattaattaatttcctatcctaatccctcctacttatacttccccaaaaaacaagctttactggaattaatggaaaatattatgtcaatcttagg

SEQ ID NO: 1287 - DNA, 2236 bp, Homo sapiens
taacagaaaaagatgttgctggtccatttgacgaagaagtccagagcggcttgtgacttcagtctggctttgcagagcccaggtactctctccaccttctgccaggttcccctacgaaggctttgctctcagactctccccttgtggagacaaaaatcccacagcaagtggaaacagaagtgccttggaaaaagttattctggcagctcctatacaagtcccccatcagatgctggtattggaccagctttggttataaagccctgctgtggcaccaaaaggaatgtcgtcctgatacagcagcctcgggtcacccaatccactccagatactatggctgcagcatcaatgtaagcagacaagttgtgctgcctctgaaataaagtagatgaaatattcagcagcagaaagaacaagtttccactccagtgaactaattcaaatgtatccagcatctagatatatgtataaatgtaattaaaacatattgagcatctagagcatctctcccaagataattaccacctgatagtaatggctataaaagctaaaagtggaatcagtctacatgtttcgcaataggaatcaattgaagcatacatcaaaatgcagacagtagtattgtgaataaccctataccttccaatttgaaatcagaagcaaaaaaggctgccaaaatattaagagaattcacagaaataacttccagaaatggacctgataagatcattcctgctcacgtaattgcgaaggctaaaggccttgcaattctgtctgtgatcaaagccgggttcctggtgactgccagaggaggcagcgggattgtagtggcgcgccttccagatggaaaatggtctgcaccctcagccattgggatatctggccttggtggaggatttgaaataggaattgagacacatttacagctacatattccctctgagcattgccctggctgccttccataagtgtggagtgccactccagctttcttaggttgccatctgcatgacacatctttctccatccttttactgtcaatctaatggtatcagacttggtgataattctgaattatgaccgtgctgtagaagcttttgcaaaaggcggaaatctgaccctcggagggaacttgactgtggcggttgggcccttgggaaggaacttggaaggaaacgtggccctgagaagctccgctgccgtcttcacgtactgcaagtcaaggggactctttgcaggcgtgtctttagaagggagctgtttgattgaaaggaaagaaactaatagaaaattttattgtcaagatatccgagcttatgacattttatttggagatacaccgcggcctgctcaagccgaagatctttatgaaattcttgattcctttactgaaaagtatgaaaatgaaggacaacgaatcaatgcaagaaaagcagcaagggagcagaggaagtcttctgtaccgtttggttttatgtttcactcagtattctcagaaaatctctttctgtagaacattctgtccctgatatcaggttcctaagaacctactaagcctccttcgtagttgcactgacttcacattcttgtgaaaaggtcatgctaccttgacatttcctctgtacagatttcagggaaaaacataatttgtcctctgtgattgcatttctccaaggatggaactttgttgtatcaataatacaaataatatgtgggaggctgaggcaggtggagcacttgagatcaggagtttcagaccagcctggccaacatggcaaaaccccctctctaccataaaaatagaaacattagctgggcatggtggcgtgtgcccataatctcagctactcaggaggctgaaacaggaggatcgcttgagcccatgaggttgcactgagccaagatcatgccattgcactcagcctaggcaacagagctaaagaattacctccaaagccattgtcaagaccacagtagtcatctgcaccagtccagctgaactctggctctcaaagcaatttgaatcaacccatagaagtgacagcgctgtattcatttgaaggacagcagcctggggatttgaattttcaagctggagacagaatcacagttatatcaaaaacagattcacattttgattggtgggaaggaaaacttcgaggtcaaactggcatttttccagccaactacgtaaccatgaattaaagcgtatactattttcttctttgagaattac

SEQ ID NO: 1288 - DNA, 2929 bp, Homo sapiens
agattcttctgcagcaatgtcggtgttagaagaaaatcggccgtttgctcaacaattatccaatgtctactttacaatactttcgctgttctgttttaagctttttgtgaaaatcagccttgccatcctcagtcatttctacatagtgaaaggcaaccgcaaggaagcggcaaggatagcagctgaattttatggagtaacccaaggacaaggttcttgggcagatcgatcaccactacatgaagcagcaagtcaaggtcgccttcttgctctgagaacattattatcacagggttataatgtaaatgcagtaaccttagaccatgtcaccccattgcacgaagcctgccttggagatcacgtggcatgtgccagaactctgctggaagcaggagctaatgtaaatgcaatcacgatagatggcgtgactccgttattcaacgcatgctcccaaggcagtccaagctgtgcagagctgcttctggagtatggtgccaaagcccagctggagtcatgtcttccatccccaacgcatgaggccgccagtaaaggtcaccatgaatgtcttgacatcctgatatcctggggcatagatgttgaccaagaaattcctcatttgggaactcctctctatgtagcttgtatgtcacagcaattccattgcatctggaagcttctttatgctggtgctgacgtacagaaaggcaaatattgggatactccattacatgctgctgctcaacaatccagcacagaaattgtaaacttactgctagaatttggagcagatatcaatgccaaaaatacagagcttctgcgacctatagatgtagctacgtctagcagtatggtggaaagaatattgcttcaacatgaagctaccccaagctctctttaccaactttgccgactctgtatccgaagctacataggaaaaccaagattgcaccttatcccacaactccagctgccaacgttactgaagaatttcttacagtatcgataaaacagtaaagtaattctaaataccttgaaaatcaaaatttctatttcttttgcttaaggaatagttcatataaaaatatgctaaagataggataaaagtgagtgtgagatcacccagggaagcagtaaaatatcaattttcattttaagtgtattagtactattgttttatcatttatgctgtctttggattatagcatatttataatatctattttttgttatttcaatataccctcttgtttattcaggaaaaagtaataaagtcactatcttatgttttcttttggattggaaagaaataaagctcctagtaaagttattcatattatatttaaaaaggtctatgttcttcaactaatgggttaactttttaattttggctattgtaattggctaacttgttactgatattgacataaaatatgaatatggcttagcaaagagcaactaatatgttttctgaaaccaggatgatgctcattcaggaaatccactatgttgaatgtccactggtcattagaatgaacacttcatgaagataaattgcccccctcccccccacttacccctggcaaaggactcacaagtcacttctcttctccatagtacatggacttgttacagaaaagtgataggatgaaaggtcaatactgccctctcaccctgagatatttagaacattacacaccttctaaggctatgttaagactgcctccttctcaggagtagcccctgatgatctcttatcaaggcggttatatgcatattactccagccttcttccatttcagaaattgtcaatagctagtgatacttggacttaagaaaatgaactatatatctaattaacaaacaggccctggatcatattccggggatcatcacatcagtccaaggatataaaaaaatggaagattaaaaactcaaattgtggagtttctaaagagtgggtgccacttaacacattggagaccttaaaaaatgtatatagagaacttaatcgcactgtttctaattctttttacacaaaacaagggcttagagtatactgtatttgcaagtaatagcaagagagtattgtataaaagaagatattactaagctagtcctctgcaagggtaaatactatgtttattctcttcagctttaactatacttgagtgcaataaaaaacttaataaaattttatgcctgttttgtaattcagggcctattatgattttagaaataagataatcaacgtacaactctttgtaaaacaaaagcaactttgggtgagttttatagatttattaaattttgataaagtaaatattttgaccactattttcaacaacccagggcttattttcttctgacttcttggctaacttccagactatgggaaaataaattatgattgtatgtgacccccagatcactaagcttgcattttggcagaaagaaaaaaaatcagttgtgatttaaaacgtttgttgagattttcaaacatagaaataaagctgtagcatattcactaaacaatgttttatatgaggatagggacctttaaatatgtgttttatagaatatctcacacatttgtaatggataacgtgcattaaaatggagttcttattatagaataacctggttaaacagatattaaagctgcttttgggtaaaacaggtttccaccagtattttccctgagctagaggagaagtcttagattttaagagtaatacaacccatctatcttattagtcttgtgccaataagagaagtaaatatcaaacattaaaatggtcactttacaatttcagtatgtctgtaccttgtatcttagcttgagtatgattgtcttatcaaagtagtgttctaactttaatgtattgtatgtttgttattatattaaagtgtgattattattcattggaat

SEQ ID NO: 1289 - DNA, 2241 bp, Homo sapiens
aaaaacccggaagcggatcgcgtggagtgaaggtcacgccgcggcgcgattgacttctaaagagtcatgctgtgtgatgaaaaagcccagaagagaaggaagaggaaagcaaaggagtcagggatggctcttcctcagggagcagctatgcattgggaagcaatgcagaagacaaaccaattaaaaaacaacttggagtatcctttcacttacatctgtctgaactggagctatttccagatgaaagggtaataaatggatgtaatcaagttgaaaactttatcaaccacagttcctctgtttcctgtcttcaagaaatgtcttccagtgtcaaaacccccatttttaataggaatgattttgatgattcttcatttctcccacaagaacagaaagtacaccttagagaaaaaccttatgaatgtaatgagcatagcaaagtctttagagtatcttccagccttactaaacatcaagtaatccatactgtagagaaaccttacaaatgtaattcatgcggcaaggtctttagtcgcaattcacaccttgcagaacattgtagaattcatactggagagaaaccttacaaatgtaatgtctgtggcaaggtttttagttacaattcaaactttgcacgacatcaaagaattcataccagagagaagccgtatgaatgtaatgaatgtggtaaagtcttcagtaataattcttaccttgcacgacatcaaagaattcatgctgaagagaaaccttacaaatgtaatgaatgtggtaaaggcttcagtcataagtcatctctagcaaatcattggagaatttatactggagagaagccttacaaatgtgatgaatgtggcaaggccttctataggattgcgctccttgtacgacatcagaaaattcatactggagagaaaccttacaaatgtaatgaatgtggaaaggtctttattcaaaattcgcacctagcacaacattggagaattcatacaggagagaaaccttacaaatgtaatgaatgtggaaaagtatttaatcaactttcaaatcttgcacgacatcgaagaattcatactggagagaagccttacaaatgtaatgaatgtggtaaagcatttagtgagtattcaggcctttcagcccatcttgtaatccacactggagagaagccttacaaatgtagtgaatgtggcaaggcattcagacacaagttatcactaaccaatcatcagagaatccatactggagaaagaccttacaaatgtaatgaatgtggcaaggtcttcaatcgaattgcacaccttgcacgacatcggaaaattcatactggagagaaaccttacaaatgtaatgagtgtggcaaggcctttagtcgcatttcatacctagcacaacattggacaattcatatgggatagaaactacaaatgcaacaaatgcgtcaaagaatttagtgtgcactcaagccttactacccatcttttattccatactgcaaagaaattttgcaaatgtaaagaatatgacaaggtcttcaaacacaagtttttctaataactcattagagaatttatactggagagacttcacaattataataaatgtgtggaaaagtcttcaaaaaaaatttcacaccttgcaaaaggagatctaaaaaacacaatcagaaatgacaaaggggacattaccaccaaccccacagaaatacgaaaaaccctcaaagattactataaacacctgtatgcacacaaactagaaaacctagaaaaaattaataaattccttgaaagatataaccccccaagattgaaccaagaagaaattgcatccctgaacagaccaataatgagttccaaaatttaatcactaattaaaaatctatcaaacaaaactctggaccagacagatttatagttgaagcctacgagatgtataaagaaaagctgttaccaatcttactgaaactgttcaaaaacatggatgcagagggactcctccctatctgattctatgaggccagcatcattctaataccaaaacctgacaggcacaatgaaaaaagaaaacttcaggctggtactcctgacgaatataggtgccaaaatcctcagcaaaatactagtaaaccaaatccatctgcacatcaaaaagctaatccaacattatcaagcaggctttagtgttgggctgcaaggttggttcagtatacacaaatcaataaatgtgatttatcacatacac

SEQ ID NO: 1290 - DNA, 2295 bp, Homo sapiens
atttttgctttctagttctctgctcaccagctagccccattgtgtacagggagccttatggctcacagtgaaaatttgtaggcagggactgggttctactgtgagctgagatccctggagctccatgaaaaggagaaaaagaatgccgtgtttcctggatctatggagggaatcccaggatttcctggaaaccgaggattaatgggccaaaagggagaaattgggcctccaggacagcaaggaaaaaaaggagccccagggatgcctggtttaatgggaagcaatggctcaccaggccagcctggaacaccgggatctaagggaagcaaaggtgaacctggaattcaagggatgcctggggcttctgggctcaagggagaaccaggagcaacgggttccccaggagaaccaggatacatgggtttacccgggattcaaggaaaaaagggggacaaaggaaatcaaggtgaaaaaggtattcagggtcaaaagggagaaaatggaagacagggaattccagggcaacagggaattcaaggccatcatggtgcaaaaggagagaggtgaaaagggagaacctggtgtccgaggtgccattggatcaaaaggagaatctggggtggatggcttgatggggcccgcaggtcctaaggggcaacctggggatccaggtcctcagggacccccaggtttggatgggaagcccggaagagagttttcagaacaatttattcgacaagtttgcacagatgtaataagagcccagctaccagtcttacttcagagtggaagaattagaaattgtgatcattgcctgtcccaacatggctccccgggtattcctgggccacctggtccgataggcccagagggtcccagaggattacctggtttgccaggaagagatggtgttcctggattagtgggtgtccctggacgtccaggtgtcagaggattaaaaggcctaccaggaagaaatggggaaaaagggagccaagggtttgggtatcctggagaacaaggtcctcctggtcccccaggtccagagggccctcctggaataagcaaagaaggtcctccaggagacccaggtctccctggcaaagatggagaccatggaaaacctggaatccaagggcaaccaggccccccaggcatctgcgacccatcactatgttttagtgtaattgccagaagagatccgttcagaaaaggaccaaactattagtgtctgatgcctcattcagcagcctaggcatggtgctttttctgtggtcttttgcatctcaggaagataaccaacagtaatcccttgaaaagaaacttaagtacctcggtgtttttattttttttttcttatggaaaaaaaatataaaagatcacatatactgattttaaaggctcctcagtcatttggagcccttggattagcagcattaattaaatctcaagggtttcttgtaaagtccatttatgttaatcaaagttgaatataaaaatccaccattgcctgttagccagtcagttttagtcactgtgaaatatttcacattcagcctccatgcagtagagatttgagtttaatttcatgtccatgtgactttcatgtttcctatctcatagctcatgctactacataagccaaaacatgtatctcatcgttggaagtaagatcagggctgatattcacctgggatagacagtattggtgaactactcatttactacagtgtctcagccttgataaggggcagtggattgcctgttgttcggtgttgtgaatagcacctctgaataagattagagtgtttcttaattcatttcaaactctaaaattagattaatggtggtgctaagaaagagtattaattactttgggaatggtcaaaattaacattaaaaacattttagacaaaaagtttcgttgtacattcaaagaaaatgtaagtttggaagtactaaaagactattttatacttgttgattaatcggaatgtttgttgtatgccttcattttccatttcacttatatgtgtatgtccatatatgttaattttcattatagcaaagctaatggaaataaagctaatgctctagttgaaagaaaaggaaaactcctgaaatcctagaatgtcttgttatttttagctgactgtaaaatattatgaacagtctttgtgtattgtgcttaatgcttttgtaagaaacagaatttgaaatatttcatccttgtcatgctcaaaattttgttacatgcttgttattcagagtataataaagttttgtacaggcctg

SEQ ID NO: 1291 - DNA, 2591 bp, Homo sapiens
aaaaaagaaaacagcccagacatggaggggggttttacctgacagctccgaaggaagaccctggagtccgttccagacaaaaacttccagaagaattagattttctgctttaactgccgcctcacctgtggagctctgggtacagacaaggagccccaaactgtctcacagtcctcaaccacccagtctgggtgacccggtcgagcatttatcagagacgtccgctgattctttggaagccatgtctgagggggatgctccaacccctttttccagaggcagccggactcgtgcgagccttcctgtggtgaggtcaaccaaccagacgaaagaaagatctctgggggttctctatctccggtatggagatgaaaccaagcagctcaggatgccgaatgaaatcacaagtgcagacacaatccgtgctctcttcgtaagtgcctttccacagcagctcaccatgaaaatgctggaatcgcccagtgtcgccatttacatcaaagatgaaagcagaaatgtctattatgaattaaatgatgtaaggaacattcaagacagatcactcctcaaagtgtacaacaaggatcctgcacatgcgtttaatcacacaccaaaaactatgaatggagacatgaggatgcagagagaacttgtttatgcaagaggagatggccctggggcccctcgccccggatctactgctcatccaccccatgcgattccaaattccccaccgtctactccagtgccccattccatgcccccctccccgtccagaattccttatgggggcacccgctccatggttgttcctggcaatgccaccatccccagggacagaatctccagcctgccagtctccagacccatctctccaagcccaagcgccattttagaaagaagagatgtcaagcctgatgaagacatgagtggcaaaaacattgcaatgtacagaaatgagggtttctatgctgatccttacctttatcacgagggacggatgagcatagcctcatcccatggtggacacccactggatgtccccgaccacatcattgcatatcaccgcaccgccatccggtcagcgagtgcttattgtaacccctcaatgcaagcggaaatgcatatggaacaatcactgtacagacagaaatcaaggaaatatccggatagccatttgcctacactgggctccaaaacaccccctgcctctcctcacagagtcagtgacctgaggatgatagacatgcacgctcactataatgcccacggcccccctcacaccatgcagccagaccgggcctctccgagccgccaggcctttaaaaaggagccaggcaccttggtgtatatagaaaagccacggagcgctgcaggattatccagccttgtagacctcggccctcctctaatggagaagcaagtttttgcctacagcacggcgacaatacccaaagacagagagaccagcgagaaaatgatgaaaaccacagccaacaggaaccacacagatagtgcaggaacgccccatgtgtctggtgggaagatgctcagtgctctggagtccacggtgcctcccagccagcctccacctgtgggcacctcagccatccacatgagcctgcttgagatgaggcggagcgtggcggaactcaggctccagctccagcagatgcggcagctccagctgcagaaccaggagttgctgagggcaatgatgaagaaggccgagctggaaatcagtggcaaagtgatggaaacaatgaagagactggaggatcccgtgcagcgacagcgcgtcctagtggagcaagagagacaaaaatatcttcatgaggaagagaagatcgtcaagaagttgtgcgagttggaagactttgttgaagacttgaagaaggactccacggcagccagccgattggttactctgaaagacgtggaagacggggctttcctcctgcgtcaagtgggagaggctgtagctaccctgaaaggagaatttccaaccttacaaaacaagatgcgagccatcctgcgcatagaagtggaggccgtgcggtttctgaaggaggagccacacaagctggacagtctcctgaagcgtgtgcgcagcatgacagacgtcctgaccatgctgcggagacatgtcactgatgggctcctgaaaggcacggacgcagcccaagccgcacagtacatggctatggaaaaggccacagccgcagaagtcctgaagagtcaggaggaggcagcccacacctccggccagcccttccacagcacaggtgcccctggcgatgcgaagtcggaagtggtgcctttgtccggcatgatggttcgccacgcgcagagctcccctgtggtcatccagccctcccagcactccgtggccctgctgaaccctgctcagaacttgcctcacgtggccagctccccagccgtcccccaggaagcaacctccactctgcagatgtcgcaggctccgcagtccccacagatacccatgaatgggtctgccatgcagagcttgttcattgaagaaatccacagtgtgagtgccaagaacagggcagtgtctatcgagaaagcag

SEQ ID NO: 1292 - DNA, 2252 bp, Homo sapiens
ttatgttacggttctgggagacattatgggcacagccctgcagaacctggatggtctggtgcagatgcccagtggctgtggcgagcagaacatggtcttgtttgctcccatcatctatgtcttgcagtacctggagaaggcagggctgctgacggaggagatcaggtctcgggcagtgggtttcctggaaatagggtaccagaaggagctgatgtacaaacacagcaatggctcatacagtgcctttggggagcgagatggaaatggaaacacatggctgacagcgtttgtcacaaaatgctttggccaagctcagaaattcatcttcattgatcccaagaacatccaggatgctctcaagtggatggcaggaaaccagctccccagtggctgctatgccaacgtgggaaatctccttcacacagctatgaagggtggtgttgatgatgaggtctccttgactgcgtatgtcacagctgcattgctggagatgggaaaggatgtagatgacccaatggtgagtcagggtctatggtgtctcaagaattcggccacctccacgaccaacctctacacacaggccctgttggcttacattttctccctggctggggaaatggacatcagaaacattctccttaaacagttagatcaacaggctatcatctcaggagaatccatttactggagccagaaacctactccatcatcgaacgccagcccttggtctgagcctgcggctgtagatgtggaactcacagcatatgcattgttggcccagcttaccaagcccagcctgactcaaaaggagatagcgaaggccactagcatagtggcttggttggccaagcaacgcaatgcatatgggggcttctcttctactcaggatactgtagttgctctccaagctcttgccaaatatgccactaccgcctacgtgccatctgaggagatcaacctggttgtaaaatccactgagaatttccagcgcacattcaacatacagtcagttaacagattggtatttcagcaggataccctgcccaatgtccctggaatgtacacgttggaggcctcaggccagggctgtgtctatgtgcagacggtgttgagatacaatattctccctcccacaaatatgaagacctttagtcttagtgtggaaataggaaaagctagatgtgagcaaccgacttcacctcgatccttgactctcactattcacaccagttatgtggggagccgtagctcttccaatatggctattgtggaagtgaagatgctatctgggttcagtcccatggagggcaccaatcagttacttctccagcaacccctggtgaagaaggttgaatttggaactgacacacttaacatttacttggatgagctcattaagaacactcagacttacaccttcaccatcagccaaagtgtgctggtcaccaacttgaaaccagcaaccatcaaggtctatgactactacctaccagatgaacaggcaacaattcagtattctgatccctgtgaatgaggataggagctggaaactcaattagtcctctgtgacatttactggagggtggaacattcttctgtcgcttgaagcagaactcattcaatcaaataatttaatttctctgactagtatatgggtaacaaatgaatatgtctgaacctcagctataatactttctactacctttgcaaggagatgggataggaacaatcactcagaggaggcgttgcatgggcagggtcatagggggaagaaaggtggtttagctgttttatttagccattcagggggctctccagagaggagacggtggtagagggtgaactagagaagataagaatgtcttcctaggccggatgcggtggctcacgcctgtaatcccagcactttgggattgcgaggtgggcggatcacttgaggtcaggagttcaagaccagcctggccaacatggtaaaacccgtctctactaacaatacaaagattagcctggtgtggtggcacgggcctgtaatcgcagccccttggaaggccaaggcaggagaatcgcctcaacactggaggtggaggttgcagtgagctgagattgtgccactgcactccagcctgggcaatgaggcaagaccctgtctcaaaaaataataaataataataataataatgtttttctagagtttcagtctaagggaaaatgtgatttagggctttggaaattggctaaaaaaataaaaatgg

SEQ ID NO: 1293 - DNA, 2508 bp, Homo sapiens
tacttgcttttagagccagagggaattatttattaagccttatgagacagcagttcccaatcctaggtatttaagtggacttgctgggtagacacagtttgcctaaataaaatggtacttgggttgattataacacttcagggatttcaaaacactttacaaacactgtcattaatcctagaatatcatggtatggggaaataaagaagaagtaaagttaaggaattttcaaagacaaggatgtattcagaatgtactgatagaacagtaataactaatatgtatagtgttcttactaagtacctgaaatatttttgtaaaacttcttatatcttatctcatctgaaatgggacccaggttttcttccaaccaatataattctgtgccttatcagtaatatgtttacattctcattcaaatggccatatagcaggctttgcaattggcctcttaaacttggtgttttcccccattaccccttagcagtaattactgtcactagttttacaaactcctactccccaaaccaagctactcaagtttatttcagtgatgaaggcatatgagcatagtcaaaacaaggagatcttggagtcaaattagaaatgagaaagaaacatcagtccagttaatagtcaagaatggacatttgaaccagacatcactgagccagagactggagatgcaaagatgagtcccatgtgactcctgccttccaggatctcaccatttagcagaggatccagacatacacacagctaactgcaatataaagtgatggggcaagagtacaggtgcagactcacttttaatgcttatctttcaaagttgtgtttctgacatgaagtgtgatttttcttttaagcatgaagttaaagagtgaaggggttatgtaaagtagagggatctcctgctcttgttagggtatttttaaggttttttctagatagtgtgtctttttggtatggtttcttggttagtattaatactttcccagactccttgagaaaaatattgcacactcaatggctccagtgcatgtgacaaggaagcataggaaaatgggggaaagaaagtgtgtgaggggacctagttgattacttcggtctttttatgtagcagactgacatttcatagcattgtagctaagagataaggagcactttgctagtgacagtgggctacgaaaagtaaatagagagactttttgaaaatggtaaaagtttgagaaacttgggaagattagtgtgttaatcaggcttgctagttagtggattgcagaaagaaaaatgtaggtgattaagctctgggccttgtggtttatgaggtcaattttgcttcactttttttttttgttcttgctaatcacttttagataagctcattgctcttagcatcattttttagaggttaaagcagaagtaaattgcaaacaaatctgtcagttgtgagcagatttcttttatgtgtgtggttctccatcatatttaactttggatgctggagtgttgaatagagatgatgtcagatattccaataggctatcatttaatgttaactggcaatcacctaactggttaatctcagttgagactgtgcttctgaactgggattgtcttactcccagggctgtgtaagaaaagtcataggtggatacaataatctcttttaagtatcagttttactcagatattttggtggagatattttgtactaaaacaagatctatatcatggaatagaatgctgaatttgtatgaattattcacataaagcttgatctttcaaaaaatagtttgcttgcagcaagtggtattagaacacatcctaaaacagaatgaaatgatgtcttttgcagcaacttggatggagctggaggccattattctaagtgaagtaactcaggaatggaaagtgaaataccatatgttctcacttataagtgggagctaagcaatgaggatgcaaagacatccagagtgatataatggactatggggacttgcaaggggaagcttgagagtggggtgagggataaaagactacatattgggtacagtgtacactgctccagtgatgggtgcactaaaatctcaaaattcaccactaaagaatgtatccatgtaaccaaaaaccacctgtacccccaaaactattgaaatcttaaaatagtaataattaacaaagtaaaacaagatcacaccctggaacaattggaggattgcttgctgccctgcatcttaaggcgtattctagcagcaaagcttgtgatgcactgacttggggcaagtaaaactgatgctgaggacaaagggagaagatgttcctcgcccagggaaatgaaaacttttcttattcaccttgcttgtgcttaaacacttatgttcatctagtgtagaatacatggctacttgtttgtaatttttttattggtggaattaaagtaatttttccttatctttgaacttttatttagagaacttaaataaagctcttctgtctcctttc

SEQ ID NO: 1294 - DNA, 2075 bp, Homo sapiens
aagcattaaatcagaacccgaaagatggaacattggcaagcaaaatgggcaaagcacttatcaaaactcataactactcaatggcaatcacttactatgaagctgctctgaaaactggacaaaagaattatctttgctatgacctggctgagctcttattaaaattgaaaattatgacaaagcagaaaaagttcttcagcatgctctggctcatgaacctgtaaatgaactgtcagctctcatggaggatggacgttgtcaagttcttctagcaaaagtttatagtaaaatggaaaaacttggtgatgcgatcactgcattacaacaggctcgagaattacaagctcgggtactaaaacgtgttcagatggaacagccagatgcagttcctgcacagaaacatttagcagctgaaatttgtgcagagattgcaaaacattctgttgctcagcgagactatgaaaaagcaattaagttttatagagaggctctggttcactgcgaaacagataataagattatgttggaactggcacgattatacctggcacaagatgaccctgattcctgcctgcggcagtgtgctctactgcttcagagtgaccaggataacgaagctgctaccatgatgatggctgatctcatgttcagaaaacaagactatgaacaagcagtgtttcatctacagcagcttttagaacgtaagccagataattatatgacattatctcgtttgattgatctcctaagaagatgtggaaaactcgaggatgtcccaagatttttctcaatggctgagaaacgtaactccagagcaaaattggaaccaggatttcagtattgtaaaggactgtatctttggtacactggagaaccaaatgatgcccttcgacattttaataaagctcggaaagatcgtgactggggccaaaatgccctttataatatgatagagatctgtttgaatccagataatgaaactgttggaggtgaagtatttgaaaacctggatggagacctgggtaattcaactgagaagcaagaatctgtgcaactggcagtaagaacagcagaaaaacttcttaaggaactaaaacctcagactgttcagggtcacgtacagcttcgcataatggaaaactattgcttaatggctaccaaacagaaatctaatgttgaacaagcattaaataccttcactgaaatagcagcatctgagaaggagcatatcccagcgctcttgggaatggcaacggcttatatgatcttgaaacagactccacgagccagaaaccagctgaagcgtattgcgaaaatgaattggaatgctattgatgctgaagagtttgagaagagttggctgctacttgctgatatttacattcaatcagcaaaatatgacatggcagaagacctgttaaaacggtgcctgcgtcataatagatcttgctgcaaagcttatgaatatatgggatacattatggaaaaagagcaagcatatacagatgctgccttgaactatgagatggcatggaaatatagcaatcggacaaatccggcagtaggatacaaactggcatttaattacttaaaagcaaaaagatatgtggattcaattgacatatgtcaccaggttcttgaagcacatccaacttatccaaaaatcagaaaggatatacttgataaggcccgtgcgtctttaagaccttgaaaataattttaacttaggtgttggtttaacaggaaatgaaagaaatctaactttcagttcttcctgttcaaaacaggtttgagctcagtgctttgttattagaagtatacccttttttctccagcagaggttgctgctgtacatcaagagaagtactatgtgaaattggtgtttcctaatggagttgaatgagagctggtctatttgactctgttttgattgggtacagatttggtgactctgtggtaaagactataattatttctataaagaatattttgttaaaatctaggtaattaaataccctgtatcttttctaaggaatattatttcaggaaatatatttaaaatgcattgttctctt

SEQ ID NO: 1295 - DNA, 2536 bp, Homo sapiens
catattcacctctaaaggaaacatctttatctggacctgaggttttatcagcagtgaaaatggagatgaaacatgattccaaagtaacaactacacctatagtgcttcattcagcttcctcaggagtggaaaagcaagttgaacatggtccacctgtactagcattttcagctttgtcagaagaaattaaaaaagaaattgaacccagttcctcaacaactacagcatctgtaactaagcttgattcaaacttaaccagagcagtaaaagaagaaatcccaacagattcatctcttatcactcctgtagatcgtccagtcttaacaaaagtaggaaagggtgaattaggaagtggtttgccaccactggtaacatctgcagatgaacattcagttcttgcagaagaagacaaggtggcaattaaaggtgcttctcccattgaaacttcatccaaacatttagcttggtcagaagcagagaaggaaattaaatttgattcacttccaagtgtctcctctatagcagagcattctgttttgtcaggagtagaagccaaagaagttaaagctgggttgccagtaatcaaaacatcatcttctcagcattcagataaatctgaggaagcaagggtagaagacaaacaagatcttttattttctacagtctgtgactctgaacgtttggtttcatcacagaagaagagcttgatgtctacctcagaggtgttagagcctgaacatgagcttccactcagcctatggggtgagataaagaagaaagaaactgaacttccttcatcacaaaatgtgtcacctgcatccaaacatataatcccaaaaggcaaagatgaggaaacagaaagttcatctcctgagttggaaaatttagcatcaggtttagccccaacattactgctcctcagtgatgataagaacaaaccggcagtggaggtagcttctacagctcagggagacttcccatcagaaaaacaagatgttgctttggcagagctgtctttggtacctgagaagaaagacaagccacaccaaccgttggaattaccaaatgctgggtcagaattttctagtgatttaggtagacaaagtggatccataggtacaaaacaagcaaagtctcccataactgaaacagaggattctgttttagaaaaaggcccagctgagcttaggagcagagaaggaaaagaagaaaatagagagctttgtgcatcttctacgatgcctgcaatttcagagctttcatcattgcttagggaggaatctcagaatgaagaaaataaacctttctctcccaagatcgtcagcctagagtcgaaagaaccacctgcctctgtagctgaaggaggcaacccagaagaatttcagccatttactttttctttaaaaggattatcagaggaggttagccatccagccgactttaaaaagggaggaaatcaagaaataggcccattaccaccaactggaaatttgaaggcacaagtcatgggagatattttagataagctaagtgaagaaacaggccacccaaattcatcccaggtactccagagtataacagaaccatcaaagattgctccttctgacctccttgtggaacaaaaaaagacagaaaaagcacttcattcagatcaaactgttaaattacctgatgtaagcacctcttctgaagataaacaagatctgggtattaagcagttttcacttatgagagagaatttgcctttggaacaatcaaaatcatttatgacaaccaagcctgtggatgtcaaagaaacaaaaatggaagaattctttatttctccaaaggatgaaaactggatgttgggaaagccagaaaatgtggctagtcaacacgaacagagaatagcaggatctgtgcagctgggttcctctggcagcaatgagctgaggccagggcagctcaaggctgctgtgtccagtaaggaccatacatgtgaagtgagaaagcaggtcctgccgcattctgctgaagaatctcatttgtcatcacaagaagcagtatctgctcttgatacttccagtggtaatacagagaccttatcaagtaaaagttactcttctgaagaagtaaagctggctgaagaaccaaagtctttagtcctagctggaaatgtagagagaaacatagcagaggggaaggagattcattctttgatggagagtgaaagtttgctattggagaaagcaaacacagagctttcctggccttccaaagaagatagccaggaaaaaattaaactacctcctgaaagattcttccagaaaccagtgtctggcctatcagtggaacaggtgaagtcagaaacaatctcctcttctgtcaaaacagcccatttcccggcagagggtgtggaacctgcattgggcaatgaaaaagaagcacacaggagcacacctccttttcctgaagagaagccattggaagaatcaaaaatggttcagtcaaaggttattgatgatgctgatgagggaaagaaaccatcacctgaagt

SEQ ID NO: 1296 - DNA, 2263 bp, Homo sapiens
attcacgcggccgccagggcttcattcacccctggccgggagggcagcgcccccgtgactcgcagctggggcttctccacgggtggcggctgcatcgctctgccagtgacgctgggctggtccctgggggccctcctgctgctgtgggggtgcaagggtggatgctggccccaggatgctgcacacggcctcagggcagcacccacacactggcagctccagcttcccctgaaagatgaccgaggaggtggggaggacgcggtgctggccagcagtgacggctgcagcatgtgtgggcaggggctggcgtcttcttcctgtcctcggccgagggggagcagatcagcttcctgttcgactgcatcgtccgaggcatctcccccaccaagggcccctttgggctgcggccggttctaccagacccaagtcccccgggaccctcgactgtggaggagcgtgtggcccaggaagccctggaaaccctacagctggagaagcggctgagcctcctctcacatgcgggcaggccgggcagtggaggggatgaccgcagcctgtccagctcatcctcagaggccagtcacttggacgtcagcgccagcagccggctcaccgcatggccagagcaatcctcgtcgtcagccagcacgtcacgggaggggcctagaccagcagctgcccaggccgccggggaagccatggtgggtgcctcaaggccaccccccaagccgctgcgtccgcggcagctgcaggaggttggccgccagagctcctcggacagcggcatcgccactggcagccactcctcttactccagcagcctctcgtcctacgcgggcagcagcctggacgtgtggcgggccacagatgaactgggctccctgctcagcctgccagcagcaggggcccccgagcccagcctgtgcacctgcctgcccgggacagtcgagtatcaggtgcccacctccctgcgggcccactatgacacaccacgcagcctttgcctggctcctagagaccacagccccccctcacagggcagccccggcaacagtgcggccagggactcaggcggccagacgtccgccgggtgtccctctggctggctgggcacgagacggcggggcctggtgatggaggccccccagggcagcgaggccacactgcctggccctgcccctggcgagccctgggaagcaggcggcccccacgcggggccacccccggctttcttttcggcatgtccagtctgtggaggactcaaggtaaacccccctccttgagagccgcagatcccgccccgcggctgcaaaggggctgaatttgcccccagatggcagaggaagtggcgccagcctccttgcagactggtgctctgtgttctgtgggagggaccgggggtctcccggagaggggagctggagggcgcgccctgtggctgccaccggaggaaggggctgacttggggaggtgagttctggaaggcaggggctctgggtctggcaggtcggggtcaccagagccccaatgcccagctgcttcactccgtgtcccccacccctgaggatcaggtgagtgctgcacctctgttggctcgtgccttgcactggggtgccaagggctggaggccctgccgctggccttgtcctccttgggcctcacgcccccttcgggggtggccggttctccccatcacctctctggggcagtcacaccacctgttaagcatcaagctaccacagaggctccggccacctgggctccaccagcccagcccccctgggctccgtgtgcgctgggcctcatccccatctatgggaggaaactgaagctcaggaggctgtgtggcttgcggggtctctgggttctgggccccactgttccccagtgaagcccttgtgggaaggttccgggagcaggtggtgtcctcagagcagcctcgcctgctgaccccactgggagaggcgccgtgcctcgggcccctggtgggagctccgctggctcctgtctgaacctcctcgcagggccaaaggctggcttggcctgtgtttcccctggcccaggcctcagcccctgcgtcggaggtggggctgtgttgggcccattgtcccccgccctgggtggcttcctcttgcacagcctggagcctgccctgaccacagcccagcagctccctgtgaacacctctttgtcccttcactgtcggctgtttctaaacccagacactgtttgtaatagactggaaataaaatgttcttttctt

SEQ ID NO: 1297 - DNA, 2877 bp, Homo sapiens
gtaggattcatgccttccgactgtgaggctgttgtaaggaagtagcgtttgtgggaatgccacccaggagtcaaatctctagcctttgggtgatcaggaggctgacaggaaaacagcgacagagctttgcctctggtggaactcctggtggcctgcagacctgttggcgtctgtacctgcagtccactcagctttccagatgactgaaatgccccaacagggtagagtggctcgcctctccaagaaagagcagttggtgaataatcatgcctgggaaaacaatccgcctggcaaagagatggatggtatccgttggtgaatgtgatggcagcaagcccagtgcaagattctgtggcgattccttgattgacctgctcggcagccgggattgcttaccacctgcagcgtgctttcggaggcggcggctggcacggaggccgggctacatgagaagctcgacagggcctgggatcgggttcctttccccaccactcgagaggcctcttggtccggagccctgtttccaagagtgcagcagcccctactgtgacctctgtgagaggaacctcggcgcactttgggattcagctcagaggtggcaccagattgcctgacaggcttagctggccgtgtggccctgggagtgctgggtggcagcaagagtttgcagccatggatagttctgagaccctggacgccagctgggaggcagcctgcagcgatggagcaaggcgtgtccgggcagcaggctctctgccatcagcagagttgagtagcaacagctgcagccctggctgtggccctgaggtccccccaacccctcctggctctcacagtgcctttacctcaagctttagctttattcggctctcgcttggctctgccggggaacgtggagaagcagaaggctgcccaccatccagagaggctgagtcccattgccagagcccccaggagatgggagccaaagctgccagcttggacgggcctcacgaggacccgcgatgtctctctcggcccttcagtctcttggctacacgggtctctgcagacttggcccaggccgcaaggaacagctccaggccagagcgtgacatgcattctttaccagacatggaccctggctcctccagttctctggatccctcactggctggctgtggtggtgatgggagcagcggctcaggggatgcccactcttgggacaccctgctcaggaaatgggagccagtgctgcgggactgcctgctgagaaaccggaggcagatggaggtaatatccttaagattaaaacttcagaaacttcaggaagatgcagttgagaatgatgattatgataaagctggaaccaattgctttggatccaccatggaagcctcgacatcctgaaccaaactcctattaatgaaacttcccaaatttaaacaaagcaagacaaatagatatccacacagcgtagatcatgacttctttagacatcatgaaaagaaaaagaggacccacgtggaagaatacgctcatttatgatcagggtagcatcatattcctctcccttttaacattatttcaggatagcagctgtctggatgctggccatgggcttgaaaaaaaccaggtgggcatttctgcccactgtaccgtttctcccatgcgtttcccagtcccctgtcatggcatgaaaaaaccgctattgttctgtgttgggacaattagatttttgtaggggggagaaaccacccaaaagcaaatggaaaaatatgctatgattaatgtcagttacgggaattaaacttcggaggcctttaggacaattatgaaggaatcattttccccttggtggcaatatgtactacagttgtcccttgatatccatgggggattaattccaggacgcctgtggatacagaaatccacgtgtactcaagtcttgttttcagtggatatgaaaagtcggccctccatatctgcaggttttacacttggcgaatgctgtatttttgattcatgttggattaaggatctggaacccctgatacagactgtatttattgaaaaaaagtctgcctatgagtagactcacatgttaaaacccgtgttgttcaagggtcaaccataactgcaggcagaacatctgggcaggaagctcctgcaggaagacctgtaaactcaggtctgtggaacggcgatgatcttcttcccttgcttccagaattattgctgtgagatcaggtgcactgactacgaccttactctttgtgcagaacttatttctggtctggtttaagtgaacgttattctttctgtgcagtcctgtggttacatcaaaggttaaatttcatatagcatgtctgttatatcagacttctctgatggcctgtccagagcaaacattttaaaatattggtcctattctgtcttataacagtctgctctggtgatttttgtctcatcaattggattatgacactgtcagccactgttagtgttattctcaaattcagtcttccattcatctctccttcccttccctggcagacagacttctgcagccactgggactgttggggtgaagaaaggcaagaaccgatgtttcattctctccctcccttcttcctccctcttttttgttggttgtggggtgggctacatcttcttacccaaacaaccaggagcatttgttggcaagtttattgtgcccagtgccgatgtctggacaattaattccctaggtcagtggctttcacagtttgtgatggtgactccaggaaggaaactcaccatgaccctgtatatacatagaacaaaaatgcagcccactctggtattgtatttgttctattctagttcattaaaagtgaatgttggtcttcatccttt

SEQ ID NO: 1298 - DNA, 2320 bp, Homo sapiens
aagaatactgacttcttcccgggcctttctgctttcctcagccaggaagagataaacaagagtcttgacctggcccggagagccatagccgactccgaaacagaagattttgactcggaaaaagagatctcgcagattttcagtacttctcctgcaagcctctgtgaacatccttcccataaggagaccaaattgggtgaacacgcctcgaggagacctcaggataacaggtcaacacctgtccagcctctggcagagaaacaaactaagagtatctcttcacctgtttcaaagaggaaacctgccatgtcacccctgctcaccaggcccagctacatccggagcctccgaaaggctgaaaagcgtggtgcaaaaactcccagcacaaacgtaaagcccaaaacgccacatcaaagaaagggtggcccccagagccagctgtgtgacaaggcagctaatttaattgaggagctaacatccatatttaaagccgcaaagccaagaaacagaagcccaaatggggagtcctcgtcaccagacagtgggtacctgtctcctaaaaatcagccgtcagccctgctgagtgcctcagccagccagagccctacagaagatcaaggggagatggaaagagaggtcaagtcccctggggccaggcattgctaccaggacaaccaggacttggcagtgccacacaaccgcaagtctcacccacagccccacagcgccctccacttcccagctgcacctcgattcatccaaaagccgaggagccaagaagtagcagaagggagccgagtttatctggagtgtagagtcactggaaaccccactcctcgagtcagatggttctgtgaagggaaagaactgcacaacactcctgatattcaaatccactgtgagggaggggacctccataccctgatcatagcagaggcctttgaggacgacacaggtcgctacacctgtttggctacgaatcccagcggctcagacacaacatctgctgaggtgttcattgaaggtgccagttcaacagattctgacagtgaaagtttagctttcaaatcaagagctggagctatgccacaagctcaaaagaaaacaacttctgtttccttgacaataggatcatcatctccaaagacaggggtgaccacagctgtgattcaaccactgtctgtccctgtgcaacaggttcacagtccaacttcatatctctgccgacctgatggaaccactactgcctactttcctcctgtttttacaaaggaactgcaaaacacagccgtggcggaaggccaggtggtggttctggagtgccgggtccgtggggcaccccctctgcaggaccagtggtttcggcaagggagtgaaatccaagactctccagatttccgaattctacagaaaaaacctagatctacagctgaacctgatgtcttatacgtctttgttcgagtgagatgccaccagatgaaaattcagtattacaacctggctcatctcatttcctcatggctttcttcatttttataatgtcagaaccatacaagctatgatgcttctttctctcaacaaaatgtgagcctcttgtcactgttggatgaacttttctttgagaagaaaagctgaggaacctgtgggacattgtattcaaattttatctagttaaaaaaaaattatctagcaaaaattgctgtgacatttcaatgcatgaggatcactaaaagaacatcctagtgtttattttttatttttctatttttgttctttaattctgtaatttttctaaatgttccacgtgaactatatacaggcatataccttatttatgcatggaagtattcctataaaatcatacacaatgaattctgctcaatcaactttgaaacacacaaaggaagcttgtaggaaaattggtcttactgagaattcctttagaaaatagtctttttacaaagcaagtgtttttttccttcatctaaatttcatgcatgcatttatttaaacataattatagggagcctaccatgtgtgagatgctaagaatatggccatgaacaaaaattgtttctgcactcagaggttatatttcagcgaaccagaaactaacaaactaattacacaataaattatttagcagggtgaggtggcacatagtcccagctacccaggaggctgaggcaggaggattgcttgagcccaggagttcaaggctgcagtgagctatgatcatgccacttcactccagcctgggcaacagtgaaacccctgtttctaaaaaaaagattttaaaaataaaataaaacaaaattgc

SEQ ID NO: 1299 - DNA, 2500 bp, Homo sapiens
ataaacaggcctctacaagtggaaaaacatttaacccctgttcttgtcacactctgggtcctctcagtggccagagaacagaaagaaaatctgactgtgcacgagcgaagggtgacaccgggcgtgcagcaccgacctgaaggcacctcttcgggggagcccgaaatttgaagattctctttcctgtcggagactacaaaccaaataaatagaaaaaaactatccaagatgactgtcacttactccagtaaagtagcaaatgcaactttttttggatttcataggttactcctcaagtggagaggcagcatctacaaactactgtacagggaatttattgtttttgctgttctttatacagcaataagtttggtgtacagattgttacttacaggagtccaaaaacgttactttgaaaaattatcaatttactgtgacagatatgctgaacaaattccagtaacctttgtgcttgggttttatgttactctggtagtgaaccgatggtggaaccagtttgtgaatttgccctggccagacaggctaatgttcctcatctctagcagtgttcacggaagcgacgagcacgggcgcctgcttagaaggacgctgatgcgctacgtcaatctcacctccctgctcatctttcgctcggtgagcactgctgtgtacaaaagatttcccacaatggaccacgtggttgaagcaggttttatgacaacagatgaaaggaaattattcaaccacctcaagtctcctcatctgaaatattgggttccattcatctggtttggaaatcttgcaactaaagcccggaatgaaggtagaatcagagacagtgttgatctgcaatcattgatgactgaaatgaatcgataccgctcttggtgcagcctcttattcggttatgactgggttgggattccgctggtttacacccaggttgtcactcttgctgtctataccttcttctttgcgtgcctgattggacgccagtttttggatcccaccaaaggctacgcagggcatgacttggatctttacattcccatcttcaccctcctacaattcttcttctatgcaggatggcttaaggtagcagagcagcttatcaacccttttggagaagatgatgatgattttgaaactaactggtgcattgacagaaatttgcaggtctctcttttagctgtggacgaaatgcacatgagcttacccaagatgaagaaggacatttactgggacgattctgctgctcgcccaccatacacattggcagctgctgactactgcataccctcatttctggggtcaacagtccagatggggctgtctgggtccgactttcctgacgaggagtggctgtgggattatgagaagcatggccatcggcattccatgataagaagagtcaagcggttcctgagtgcccacgaacacccctccagccccagaagaagaagctacaggaggcagacaagtgacagctccatgttcttaccccgagatgacctcagcccagccagggacctactggatgtgccctcaagaaacccccccagggcctcacccacctggaagaaatcctgcttcccagaaggaagccccacgctgcacttcagcatgggagagctgtccaccatcagggagaccagccagacaagcactttacagagcctgaccccacagtccagtgtgagaacttcccccatcaaaatgccactggtacctgaggtattgatcacagcagccgaagcaccagtgcccacatcagggggctaccaccatgattccgctacctccatcttgagctctgagtttacaggggttcagccaagcaagactgagcagcagcagggccccatgggatccatcctgtctccctcagagaaggagacacctcctggaggccccagtccccagacagtttcagccagcgctgaggaaaatatattcaactgtgaagaagaccctggtgatacctttctaaaaaggtggagtcttccgggattcctggggtccagccacacttccctgggaaacctaagtccagaccccatgagctctcagccagctcttttaattgacacagaaacatcctcagagatcagtgggatcaacattgtggctggctctcgagtctcttctgatatgctgtatttaatggaaaacctggacaccaaggaaacagatatcatagagctgaacaaggaaactgaggaatcacccaaatgagtgccaccaagttctaggacctggttctagcctagattcttacctccccaaaagcagcatattaggcccaggacatacctgaaggctggtcgactttttaaaaaacatgatcacactgtataagctacttagaactttgaagggcattatgatcctgactttttgagagctgcgaaaaatcaaacgcattcacgtcatccaacacaacatggctttcatcagaagttacacagaccacagtgatttagccaaataagtcttaacc

SEQ ID NO: 1300 - DNA, 3506 bp, Homo sapiens
gtccgcggtcgcgccagctgttccccgggcagggtcgcctctaggtgctcacctccgccacttcgccatggcgggtcctggcccgggcgcggtgctggagtccccccggcagctgctgggccgcgtgcgcttcttggcagaggcagcgcggagcctccgcgccgggcggccgctgccagcagcgctggctttcgtgccgcgagaggtgctctacaagctttacaaggacccagcgggaccgtcgcgcgtgcttctgccggtgtgggaggcagagggcctggggctgcgtgtgggcgccgcaggcccagcccccggtaccggctccgggcccctccgcgccgcccgcgacagcattgagctccggcgcggcgcctgcgtgcgcaccacgggcgaggagctgtgcaatggccacgggctctgggtgaagctgacaaaggagcagctggcagagcacctgggcgactgcgggctgcaggaaggctggctgctggtgtgccgcccggcggagggcggagcccgcctggtacccatcgacactcccaaccacctccagcggcagcagcagctctttggcgtggattatcggccggtgctcaggtgggaacaggtggtggacctgacatactcacatcgcctgggatcgagacctcagccggcagaggcatacgcagaagctgtacaaaggctactctatgtacccccgacatggacctacgagtgcgacgaggacctgatccacttcttgtatgaccacctgggcaaggaggatgagaacctgggtagcgtgaagcagctttctggtgaggaggtgagctggagcaaggacttcccagtgccaacactgggtacggcttactatgaagaagggcaccattgtcaagaagctgctactcacagtggataccacagatgacaactttatgccaaagcgggtggtggtctatgggggtgaaggggacaacctgaagaagctgagtgacgtgagcattgacgagaccctcatcggggatgtctgtgtcctggaggacatgaccgtccacctcccgatcatcgagatccgcatcgtggagtgccgagatgatgggattgatgttcgtctccgaggggtcaagatcaagtcatctagacagcgggaactagggttgaatgcagacctgttccagccaactagtctggtgcgatatccacgcctagaaggcaccgaccctgaagtactgtaccgcagagctgtcctcctgcagagattcatcaagatcctcgatagtgtcctgcaccacctggtacctgcctgggaccacacactgggcaccttcagtgagattaagcaagtgaagcagttcctactgctgtcccgccagcggccaggcctggtggctcagtgcctgcgtgactctgagagcagcaagcccagcttcatgccacgcctatacatcaaccgccgtcttgccatggaacaccgtgcctgcccctctcgagaccctgcctgcaagaatgcagtcttcacccaggtatatgaaggcctcaagccctctgacaaatatgaaaagcccctggactacaggtggcccatgcgctatgaccagtggtgggagtgtaaatttattgcagaaggcatcattgaccaagggggtggtttccgggacagcctggcagatatgtcagaagagctgtgccctagctcagcggatacccccgtgcccctgcccttctttgtacgcacagccaaccagggcaatggcactggtgaggctcgggacatgtatgtacccaacccctcctgccgagactttgccaagtatgaatggatcggacagctgatgggggctgcccttcggggtaaggagttcctggtcctggccctgcctggttttgtgtggaagcagctttctggtgaggaggtgagctggagctggtgaagctcctggaagtgatggaaggaatggacaaggagacgtttgagttcaagtttgggaaggaactaacattcaccactgtactgagtgaccaacaggtggtggagctgatccctgggggtgcaggcatcgtcgtgggatatggggaccgttctcgtttcatccaactggtccagaaggcacggctagaggagagcaaggagcaggtggcagctatgcaggcaggtctgctgaaggtggtaccacaggctgtgctggacttgctgacctggcaagagttggagaagaaagtgtgtggggatccagaggtcactgtggatgctctgcgcaagctcacccggtttgaggactccgagccatctgactcgcgggtgcagtatttctgggaggcactgaacaacttcaccaacgaggaccggagccgcttcctgcgctttgtcacgggccgcagtcgcctgccagcacggatctacatctacccagataagctgggctacgagaccacagacgcgctgcccgagtcttccacttgctccagcaccctcttcctgccacactatgccagtgccaaggtatgcgaggagaagctccgctatgcggcctacaactgcgtggccatcgacactgacatgagcccttgggaggagtgaggcgtgccgccggctgtgggaccagcaagactgcacgtgtccctcttggccttgcccagggcgaagacaccttccctgccctggtttggctgacgtgctcagcaaaaccccatgtgccctgctcctgtgtgcagttggggtaggggcagctggcatggtcaggtaacactagtggcccagccccgcagacccacaagccctacccgtgctggggcttgcttcccgaggtatttcacctcttaagagggaatcttccacaagcccagcacaagctgccaggcctgagctacttgaagggggccatctaggtccccaacccatggactttgcctccattttcagctccgcctttttttctcctattttctctctggctttcttcagccatgactcacaactaaaaacataaaacactggaggttagtggaggcccctccccaagcagggagcctgggatgggcagggagtgatagccaaactccttggtcacctgctccaagaaggaagcagtagctgagcacctgccctcacatactgctcttttccctctccctccacaccagagatgtggtgagctctgttcttctaccaacccagtctcaacacacaaagtgccaccaccttccctgactcagaacccacatccactcaatgtgaactctactaccacgacctccccatattcctcacttctccatcacctccagcctgactccctgtctgccctttcacccccaagattttgcacaggttaaggccagttatggcctttttgaaatctgtaatagctcccctttccccaactctaaagcctagaccttaaacctgttcctagagctatgcacacccctgccccagtttaccgttcctccctcagggcctccgtgacactccatgaaaagaagttcttgcataccggaaagttgaataaatggatgaattc

SEQ ID NO: 1301 - DNA, 2376 bp, Homo sapiens
attttcccaggcagtggttgcaacatcgccgcggaggtagcgagctgagctgacagcgcggagctggcgctgtggagcgcagggagccttgccggttcctccgaccggcgtctgcgagtacagcggcggctaacctgccccggcttcaggatttacacagacgtggggcgatgcttgtgaccctgcagctcctcaaaggcccctagaagcctgtttctccgtacagtccaggacctccagccccatggagcccccgatcccacagagcgcccccttgactcccaactcagtcatggtccagccccttcttgacagccggatgtcccacagccggctccagcacccactcaccatcctacccattgaccaggtgaagaccagccatgtggagaatgactacatagacaaccctagcctggccctgaccaccggcccaaagcggacccggggcggggccccagagctggccccgacgcccgcccgctgtgaccaggatgtcacccaccattggatctccttcagcgggcgccccagctctgtgagcagcagcagcagcacatcctctgaccaacggctcttagaccacatggcaccaccacccgtggctgaccaggcctcaccaagggctgtgcgcatccagcccaaggtggtccactgccagccgctggacctcaagggcccggcggtcccacccgagctggacaagcacttcttgctgtgcgaggcctgtgggaagtgtaaatgcaaggagtgtgcatccccccggacgttgccttcctgctgggtctgcaaccaggagtgcctgtgctcagcccagactctggtcaactatggcacgtgcatgtgtttggtgcagggcatcttctaccactgcacgaatgaggacgatgagggctcctgcgctgaccacccctgctcctgctcccgctccaactgctgcgcccgctggtccttcatgggtgctctctccgtggtgctgccctgcctgctctgctacctgcctgccaccggctgcgtgaagctggcccagcgtggctacgaccgtctgcgccgccctggttgccgctgcaagcacacgaacagcgtcatctgcaaagcagccagcggggatgccaagaccagcaggcccgacaagcctttctgacagtttgtgtcgaagccccagtgctctgcctggaaacctggttctcttctgacatctaagaagactgcagcaaggtcagaggttttagcctcctgaggctgaccttgctagtctgcccactccctacccccagcttcggaaaatacagagaccaccaccacgtaccctgtattccccaagatgatgaagaagcactttggggctttttttcagggtcctgaaactttgtgtcaaacagacaatgcaggggcagggtgtggtttggggggaaatttttctttttcagaagacagaacacagatgtggacacatatccggaaactgcacctgcttgaatgccctcccagcccctccttctccctccctccctccgccccccccttcctcttttccattgtctttggctctcacaggagctagctgcctgggaggaattgttaactgagtaccagggtacctttaaagaagacccttggagtcttctataccttcttctccttccccatctcactccaccccactttgtccctgatgtcttggggaaggtgtagaacaccctagcagttcctattgtatatacttgggagccactgagaacagaggacggccagtgagtccaagcctcgttcctccttctgcctccccggagccacaggatggatttaggagccactgctcagtgcacttctcccttccaactgcatcaactaactctcgggggtgttctgctcaccacaccgtccttcggttcttactgagtcacagactcgcctgcccactacgtgtcctgggttctctctactcagatcccttccagaaactttatatgggtagaggaagccagggcggcaaatgcgagaccaaatatcattttgccaatgagtctgaggctgtggtctctggatccagtcattatgtttttatagaataattaaaccggatgctaacggtgttttaaaaaataataataaaacaacttgtttccttttggccacccccaggaagggctgatttcaaaatctgggggcgagcaacctcaaggaacacaatttccctccctatcaacaagaggattttaacagcaaagaagagaggcagcacctcccattggcagaatgaccgctgagccaggctgggtttgggtttcttctcttctgattctgctgctcactgtcatagccttttgtgtatagtgatgtgtctgtatctttaatgtaaatagagagatgatg

SEQ ID NO: 1302 - DNA, 3255 bp, Homo sapiens
acgaagacgaccgggctctcaagatggcggccccatgcggaaacagctccagggagcagccatgttgcttcctgaacaaagcctctgaggatgcggaacgggcaaaaccgcccagtacggaacggcgcagcctcgggagcccggtgtggtgctcgcggacaggaagcaggagagtttgccaatagggatgtgacagcggttcccattaagcggtgatggtggttttgggacctgataatcgagctgggagtcagaggcgggatgtgtgcggtgaaggatgttttgatacccccatataaaataatctgtctgtcatgggagcccccacgtcctctgaaatagttcagctctgtctgcatgacttgtcctgggactgaggaaaatttaccagtcatctggccttttggaagagcaaaaaatgatgaagtcccaggggttagtatcattcaaggatgtggctgtggatttcacccaggaggagtggcagcaacttgacccttctcagaggaccctgtacagggatgtgatgctggagaactacagccacctggtctcaatggggtatccagtttccaaaccagatgtcatctccaagttggaacaaggagaagagccatggatcataaagggagacatatcaaattggatctatccagatgaatatcaggcagatgggagacaagacaggaagagtaaccttcacaactcccagtcatgtattttggggacagtttccttccatcataagatactgaaaggagtcacaagggatggttcattgtgctccattttaaaagtctgtcaaggtgatggtcagctgcagagatttctagagaatcaagacaaactcttcaggcaggtcacatttgttaacagcaaaacagtgactgaggcatcagggcataaatataatccactggggaaaatatttcaagagtgcatagaaacagatatatcaatacagagattccataaatatgatgcttttaaaaagaacttaaaaccaaatattgacctaccgagttgttataagagcaattcaagaaaaaaacctgatcagagttttggaggtggaaaatcatctagccagagtgagcccaattctaatcttgagaagattcacaatggagtaataccttttgatgataatcagtgtggaaacgtttttagaaatacacaatcccttattcaatatcagaatgtggaaactaaagagaaaagctgtgtatgtgttacatgtggaaaagcctttgctaagaagtcacaactcattgtacatcaaagaattcatactggaaagaaaccatatgattgtggtgcatgcggaaaagccttcagtgagaagtttcatcttgttgtacatcagagaactcatactggggagaaaccttatgattgttctgaatgtggaaaagccttctctcagaaatcgtcccttattatacatcagagagttcacactggggaaaaaccctatgaatgtagtgaatgcgggaaagccttctcccagaaatcacccctcattatacatcagagaatacatactggggaaaaaccctatgaatgtagagagtgtgggaaggccttttcccagaagtcacagctgattatacaccacagagctcatactggagagaagccgtatgagtgtaccgaatgtgggaaagccttctgtgagaagtcccacctcattatacataaaagaattcacactggtgagaaaccctacaaatgtgctcaatgtgaggaagccttcagcaggaagacagaactcattacacatcagttagttcatactggggaaaaaccttatgaatgtactgaatgtggaaagacattctcccgcaagtcacagctcatcatacatcagagaacacatactggagaaaaaccctataaatgtagtgaatgtggcaaagccttctgccagaagtcacatctcattggacatcagagaattcacacaggagaaaaaccttatatatgtactgaatgtgggaaagccttctctcagaagtcccaccttccgggacaccagcgaattcatacaggagagaaaccttacatatgtgctgaatgtggaaaggccttttctcagaagtcagaccttgttttacatcagaggattcatactggggaaagaccctatcaatgtgctatatgtgggaaggccttcatccagaagtcacaactaactgtacaccagagaattcacacagtggtaaaatcataatgaactggccacagaaaagccttagtattagctcaagccttaataattactagaaacccaattaatttgataagcttggggacaacatcccaatagataaaaatttttaagggaatttgtttctagtttggtgatgcctaacttttccagcaaagatgatggaaaatagttatataaatgaagaacatttttaatatggcatgtaaagcttttaaagttatgaactcagtgatcagcacagcaagttaagcatacagaatattgtcaagttgcatattccttatactacaaaatgataatcagccattgtgaaactgctaatattagcttgtcataattatggccataaactaatttttctataaaagacgtggaagaaagcttaagtaaacaataaaataaaacctatacactattttaagaaggggcttgagcatgacccctaaagctacatgtaaagttcttgtacaaaaaatggaatgataggttgatcagattcagtaaagttgatctgtatgcattttcccatctcaagcatataagttgacctgcatctctggaaggaccttgagattgatgcattttgagcaggtctcccttttactcttcccaactgggaacttggagctgaaaaacattggcactgaggccagatggccttgggtttaatcctggctcagtgcctcacagattgtgtgactttaggcaaacatacttctcctagctgagtattttttatcagtaagtacaaatacaatgcagagctcattttcagttaatattagtactttttaaatctttactctctatcttgaagcattagatgttaagactaatgtgtaaaaaccacgtctgagcttgcttttccctctggacactctgcttttgattgcctatccctataagtggctcattttactgtcttctgatcctggtggccttatttttgctatgttaaggttgtgttttttaatacttggatttattttcatatacttacataaaccgtggtgattgcacat

SEQ ID NO: 1303 - DNA, 2394 bp, Homo sapiens
acccacgcctggattatgtcagcccgagctccaaccagacagcaactccaacttcatggcaagtgccaaggatgctaacgagaattggcatgggatgccaggcagagtggaacctatcctgaggaggagctcctctgagtcaccctctgacaaccaagccttccaggcccctggatcccctgaggaaggggtgcgcagccccccagagggggcagagattcccggggctgagcctgagaagatgggtggtgctggcacagtctgctcccctctggaggacaacggctatgccagcagttccctgagcattgacagccgtagcagcagtcctgagcctgcctgtgggaccccgcgaggccccggccctcccgatccccttctgccctcagtggcccaggctgtgcagcacttacaagtccaggagcgctacaaagagcaggagaaggaaaagcaccacgtgcacttggtgatgtaccgtcgcctggcactgctccagtggatccggggcctgcagcatcagttgattgaccagcaggcccgactgcaggagagcttcgacaccatcctagacaaccggaaggagcttattcgctgtctccagcagagggcagcaccatccaggccccaggaccaggcctaaaggtgtgcctccacaagtgtgcaagggtatatgtatatatttgcaggcatgtgtgaggcgcactagtaagtacataatttgctggcatgattgcaggtaggcatgagtgtgtatgtgctaacatgtaggctggtgtgtgtaggcatgtgtgaataagcatgtataaatgagcttaagtgtgctgtgtgcacatgtgtacacacagctaatttatctgcagacctatatgtgagcatgtaagagtgaacatatgtgtgtgtatgtagtatgtaagaatgaggaactcggtatgtgcatgtgtagacaggtacccagcagtgtgtgtatatgcgcatgagtgaggatgtataggcagaagatgtgtgtgtctatgagtgagtttgagtgtgcaggcttgtattaggtgtatgtgaggaagcccttgtgtgtgcaggggtgcacatgtttggccacaggcatgggaggtgtatgttaggagcatgtgtgtttgtaggcagactcatgagcaggtgtgtgcaaatacatatccagctgcactgtgggtgtccacccacaccttgtgttcctcatggcctaccccagcctttcttctccactgggtcccactgttccctggagacagagggctagcatgctgtcatttatctgaaggttgtggctgacccattctcctgggatttcccaggccacctctcctttccctttccctcacttaacccagacttgctcagctgaggctattgtccctgatgttggctttacttgtaggaggtttagtggctgctctggcctgccatggaattttggctgcaattttggcagtgtgtggagaactggtatcaggaaagggaaccaggagtagtgatgaagatgatggtggggatggggacagaggacataggggactgtccctcttgaactctgcctttgggcacatgggagatggggacaggaaagatgataacagtggaaccctgtgaagaataggagaatgggaattctaaaataccagttcccaaacaaaccatctctccattggaaaaggagctgttgcaaaccgtgttcatttaagcttctgatgaaaagcaatgtatgtttataagcttgcaagtaacagacaagatgttccaaggccgatgaggaaaatatcgcttccctgtctctgcctctaccttgctgtgcctctctggctttagcagcattggatgttgaattggtttggttcatttctctgaagtcggactgtcaggaggagccagaggttggctttctgggatgtgaaggggacagtgtcagcctaagcctctggagatgcttaggatgctgaattttaaccccttctttcactgcatggcccttcaaacagggattggcaggctccgcgagttacagagtgggtgagtcttggagagaaccaacgactaaggtagcttagctctctgctttgttcttgggagccaagagaatgcaagatcctggtgggtgagcagtggtatgaagaggggacactggtgggtgaacagtggcatggaagtcactgatgcagcctctggccctcagtctccctatcggcaaagtggggggctcttcctatctctaaagagtttcatccctgacaggtggatgggtgaaagatccagagagtgggggtgaggggtgggccctgaagactttttgtctgtagctcttgcatattgagtgtataaacccggcttctggaccaacccaagatgaataaactggggcagaaaatt

SEQ ID NO: 1304 - DNA, 3668 bp, Homo sapiens
agagaaagctggcaagactgggaattccatgccacaccctgccactgggaagacggtggccaaccttctttctgggaagtctcccaggaagtcagcagagccctcagcaaatactacgttggtctcagaaactgaggaggagggcagcgtcccggcctttggagctgctgccaagcctgggatggtgtcagcgggccaggccgacagctccagcgaggacacctccagctccagtgatgagacagacgtggaggggaaaccctcagtaaaaccagcccaggtcaaagcctcatcagtttctactaaggagtctccagcaagaaaggcggccccagcccctgggaaggtgggggatgtgacaccccaggtcaaaggaggggccctgcccccagccaagagggccaagaagccagaagaggagtcagagagtagtgaggagggatctgaaagtgaggaggaggcccctgcagggacacgaagccaggtaaaggcctctgaaaaaattctccaggtcagagctgcctcagcccctgccaaggggacccctgggaaaggggctaccccagcaccccctgggaaggcaggggctgtagcctcccagaccaaggcagggaagccagaggaggactcagagagcagcagcgaggagtcatctgacagtgaggaggagacgccagctgccaaggccctgcttcaggcgaaggcctcaggaaaaacctctcaggtcggagctgcctcagcccctgccaaggagtcccccaggaaaggagctgccccagcgccccctgggaagacagggcctgcagttgccaaggcccaggcggggaagcgggaggaggactcgcagagcagcagcgaggaatcggacagtgaggaggaggcgcctgctcaggcgaagccttcagggaaggccccccaggtcagagccgcctcggcccctgccaaggagtcccccaggaaaggggctgccccagcacctcctaggaaaacagggcctgcagccgcccaggtccaggtggggaagcaggaggaggactcaagaagcagcagcgaggagtcagacagtgacagagaggcactggcagccatgaatgcagctcaggtgaagcccttggggaaaagcccccaggtgaaacctgcctctaccatgggcatggggcccttggggaaaggcgccggcccagtgccacccgggaaggtggggcctgcaaccccctcagcccaggtggggaagtgggaggaggactcagagagcagtagtgaggagtcatcagacagcagtgatggagaggtgcccacagctgtggccccggctcaggaaaagtccttggggaacatcctccaggccaaacccacctccagtcctgccaaggggccccctcagaaggcagggcctgtagccgtccaggtcaaggctgaaaagcccatggacaactcggagagcagcgaggagtcatcggacagtgcggacagtgaggaggcaccagcagccatgactgcagctcaggcaaaaccagctctgaaaattcctcagaccaaggcctgcccaaagaaaaccaataccactgcatctgccaaggtcgcccctgtgcgagtgggcacccaagccccccggaaagcaggaactgcgacttctccagcaggctcatccccagctgtggctgggggcacccagagaccagcagaggattcttcaagcagtgaggaatcagatagtgaggaagagaagacaggtcttgcagtaaccgtgggacaggcaaagtctgtggggaaaggcctccaggtgaaagcagcctcagtgcctgtcaaggggtccttggggcaagggactgctccagtactccctgggaagacggggcctacagtcacccaggtgaaagctgaaaagcaggaagactctgagagcagtgaggaggaatcagacagtgaggaagcagctgcatctccagcacaggtgaaaacctcagtaaagaaaacccaggccaaagccaacccagctgccgccagagcaccttcagcaaaagggacaatttcagcccctggaaaagttgtcactgcagctgctcaagccaagcagaggtctccatccaaggtgaagccaccagtgagaaacccccagacagtaccgtcttggcgaggggcccagcatctgtgccatctgtggggaaggccgtggctacagcagctcaggcccagacagggccagaggaggactcagggagcagtgaggaggagtcagacagtgaggaggaggcggagacgctggctcaggtgaagccttcagggaagacccaccagatcagagctgccttggctcctgccaaggagtcccccaggaaaggggctgccccaacacctcctgggaagacagggccttcggctgcccaggcagggaagcaggatgactcagggagcagcagcgaggaatcagacagtgatggggaggcaccggcagctgtgacctctgcccaggtgattaaaccccctctgatttttgtcgaccctaatcgtagtccagctggcccagctgctacacccgcacaagcccaggctgcaagcaccccgaggaaggcccgagcctcggagagcacagccaggagctcctcctccgagagcgaggatgaggacgtgatccccgctacacagtgcttgactcctggcatcagaaccaatgtggtgaccatgcccactgcccacccaagaatagcccccaaagccagcatggctggggccagcagcagcaaggagtccagtcggatatcagatggcaagaaacaggagggaccagccactcaggtgtcaaagaagaacccagcttccctcccactgacccaggcggccctgaaggtcctcgcccagaaagccagtgaggctcagcctcctgttgccaggacccagccttcaagtggggttgacagtgctgtgggaacactccctgcaacaagtccccagagcacctccgtccaggccaaagggaccaacaagctcagaaaacctaagcttcctgaggtccagcaggccaccaaagcccctgagagctcagatgacagtgaggacagcagcgacagttcttcagggagtgaggaagatggtgaagggccccagggggccaagtcagcccacacgctgggtcccaccccctccaggacagagaccctggtggaggagaccgcagcagagtccagcgaggatgatgtggtggcgccatcccagtctctcctctcaggttatatgacccctggactaaccccagccaattcccaggcctcaaaagccactcccaagctagactccagcccctcagtttcctctactctggccgccaaagatgacccagatggcaagcaggaggcaaagccccaacaggcagcaggcatgttgtcccctaaaacaggtggaaaagaggctgcttcaggcaccacacctcagaagtcccggaagcccaagaaaggggctgggaacccccaagcctcaaccctggcgctgcaaagcaacatcacccagtgcctcctgggccaaccctggcccctgaatgaggcccaggtgcaggcctcagtggtgaaggtcctgactgagctgctggatggggacggttgaaggtggagatcaaagcaacccaaagagcaagaaggagaagaagaaatccgacaagagaaaaaaagacaaag

SEQ ID NO: 1305 - DNA, 2457 bp, Homo sapiens
tttctagggacaaggggcaggggaaggaggagaagaaagagtccttgctgctcctcagagaagacacaggagaagaaagtcggagaggagtggggagccagggtggcaaagccccttcctgctgcccacgcaggtcctggctttctctccacccactgcaccatttccagggctgctctcatggtgggagccggagagacactgagaagaggaaggaaggaggatccaagaggagcccagcacacccggcttctctgctgcccaccctccactctgtcctcccagcccaggcccttcctaggcaaccctggcacgggtcctcactggccacactgaggccatcagcaaagcacctggcctcttcacgccttgggctctgggtctgtaaggcagtgaggctgaggttcctgggacagctgggcactgtggacttgcccagctgagcacaggcatcaggggctagaggggccctagtcccgatgacgaccgagtgccctctccacctggggagcttggaggactttgctctgcacttagggccacgcttcaagcccagtgcctcttatgaccaagtctctggggagaaatgagccctccagtgccaaatgacccaccactaaaaggccttttgaggcagggcctctcctgagcccacgcaggcacgtggtgggagatgagagggtgtgggctcacttcttgacattctgtgtgagtgaggtcattcatagggtgagaggagaatcaaggggacagagggccctctagtccccagcacttgggctcagctggcaagtccacagtgcccggctctcccgagaacctcagcctcaccgccctacagacaaagggcccaaagtgcagggaggtcagtgccacacaggttttattttttcacattattggtgtttaaaattgtaaagattttccacgttacctgtaaccatcaaaccacatgtattgcccccagttaatcaccatgaacagcttggtgtgtatacccctccatattcactgtgtttcttcttccaggaatgagctcattctctatacatcactccgtaacttgttgtttttacctagtaaggagtcatgggcgtcccaccaggtgaatacttgcatgtttgtcttcatcttcttaacaactacctgacactgcagtgtctcagtctgtctgaacttaaacagctagacattgagttctcagagtctggaggctgaaatccaagatgagggtgtgggcaggttctgttcctggggaggcctctcttcctggcttgcatacagctgccttctggctgtgccctcatgaggcagagcaagagacagctctggtgtctttggcccttgtaaggacaccaaccccatcccatgggccccaccctcaggaactcctccaaacccaatcacctcccaaggccctacctcctaatcttacccactggggatgagggcttcattatatgaatttggggtgggggtgcctcaacattcagaccccagccccatgggaccactaatgtggcatcctgcctgtggagagatgcacagactgacccatccagacagcacagtggagcacgctctttcaacccacctgcacctgaccacagtgggcactcaggaagaaatgggtagagcgagtgaatgaatgaatgagcaagtcaaagacatgaacacatgacatctgactgtctccctgtgtgcttgtgtttcattctgatacatccctccctaaattcatctgctgagacaaaggattttaactggtgtttctacactgctttccccaagatgtggcaacccacaccccaccagcaacacctgtgacgtctgccgccctgtgtccttgtagcacctctcttaccaggtttccaaatgttgctaaactgctgggtcaaggaatagcatctgcctggggttagcctcacttgtgtggattttttcttactcctcttggccactgactgctcctggtctatgcctgttccattggctgcactgtccttccctgcctcttggccagaggctgtcgtgtgtcagcgacagaaacgttttggctgtcgtctgcacagccagtattctctccccatcacgctgggcctcgtgatgatgggggggtgggggttgacatcacagagatcccagtgcattttcgacttcatcactgtcaccatcctctcttgttcatttgggggatacagccgccatcagctcaacagagcaaaagagagggaggccacctgcatccaccaggtgctgaaatgggtccaggcagctgccagagtctgacatttccaacttgatacagcacctgtgatcggcagtagtacccatgacaacatttatttaattgaccaaacacgaacattatagaggaaggtgatcatttaaatgatatacttgaaattcatctgagtaaggaagctgagaacagtcaaagaagctaatttaaaaaat

SEQ ID NO: 1306 - DNA, 3470 bp, Homo sapiens
caggggagatagccagcactacaccccccagcagagcctggacaccaacccaagagggtcctggagacatgggaaggccgtgggttgcagaggttgtgtcccagggcgcagggatcgggatccaggggaccatcacctcctccacagcttcaggagatgatgaggagaccaccactaccaccaccatcatcaccaccaccatcaccacagtccagacaccaggcccttgtagctggaatttctcaggcccagagggctctctggactcccctacagacctcagctcccccactgatgttggcctggactgcttcttctacatctctgtctaccctggctatggcgtggaaatcaaggtccagaatatcagcctccgggaaggggagacagtgactgtggaaggcctgggggggcctgacccactgcccctggccaaccagtctttcctgctgcggggccaagtcatccgcagccccacccaccaagcggccctgaggttccagagcctcccgccaccggctggccctggcaccttccatttccattaccaagcctatctcctgagctgccactttccccgtcgtccagcttatggagatgtgactgtcaccagcctccacccagggggtagtgcccgcttccattgtgccactggctaccagctgaagggcgccaggcatctcacctgtctcaatgccacccagcccttctgggattcaaaggagcccgtctgcatcgctgcttgcggcggagtgatccgcaatgccaccaccggccgcatcgtctctccaggcttcccgggcaactacagcaacaacctcacctgtcactggctgcttgaggctcctgagggccagcggctacacctgcactttgagaaggtttccctggcagaggatgatgacaggctcatcattcgcaatggggacaacgtggaggccccaccagtgtatgattcctatgaggtggaatacctgcccattgagggcctgctcagctctggcaaacacttctttgttgagctcagtactgacagcagcggggcagctgcaggcatggccctgcgctatgaggcagcacacccacctaccctgtgggtaccactgtggagttcagctgcgaccctggctacaccctggagcagggctccatcatcatcgagtgtgttgacccccacgacccccagtggaatgagacagagccagcctgccgagccgtgtgcagcggggagatcacagactcggctggcgtggtactctctcccaactggccagagccctacggtcgtgggcaggattgtatctggggtgtgcatgtggaagaggacaagcgcatcatgctggacatccgagtgctgcgcataggccctggtgatgtgcttaccttctatgatggggatgacctgacggcccgggttctgggccagtactcagggccccgtagccacttcaagctctttacctccatggctgatgtcaccattcagttccagtcggaccccgggacctcagtgctgggctaccagcagggcttcgtcatccacttctttgaggtgccccgcaatgacacatgtccggagctgcctgagatccccaatggctggaagagcccatcgcagcctgagctagtgcacggcaccgtggtcacttaccagtgctaccctggctaccaggtagtgggatccagtgtcctcatgtgccagtgggacctaacttggagtgaggacctgccctcatgccagagggtgacttcctgccacgatcctggagatgtggagcacagccgacgcctcatatccagccccaagtttcccgtgggggccaccgtgcaatatatctgtgaccagggttttgtgctgatgggcagctccatcctcacctgccatgatcgccaggctggcggccccaagtggagtgaccgggcccctaaatgtctcctggaacagctcaagccatgccatggtctcagtgcccctgagaatggtgcccgaagtcctgagaagcagctacacccagcaggggccaccatccacttctcgtgtgcccctggctatgtgctgaagggccaggccagcatcaagtgtgtgcctgggcacccctcgcattggagtgaccccccacccatctgtagggctgcctctctggatgggttctacaacagtcgcagcctggatgttgccaaggcacctgctgcctccagcaccctggatgctgcccacattgcagctgccatcttcttgccactggtggcgatggtgttgttggtaggaggtgtatacttctacttctccaggctccagggaaaaagctccctgcagctgccccgcccccgcccccgcccctacaaccgcattaccatagagtcagcgtttgacaatccaacttacgagactggagagacgagagaatatgaagtctccatctaggtgggggcagtctagggaagtcaactcagacttgcaccacagtccagcagcaaggctccttgcttcctgctgtccctccacctcctgtatataccacctaggaggagatgccaccaagccctcaagaagttgtgcccttccccgcctgcgatgcccaccatggcctattttcttggtgtcattgcccacttggggcccttcattgggcccatgtcagggggcatctacctgtgggaagaacatagctggagcacaagcatcaacagccagcatcctgagcctcctcatgccctggaccagcctggaacacactagcagagcaggagtacctttctccacatgaccaccatcccgccctggcatggcaacctgcagcaggattaacttgaccatggtgggaactgcaccagggtactcctcacagcgccatcaccaatggccaaaactcctctcaacggtgacctctgggtagtcctggcatgccaacatcagcctcttgggaggtctctagttctctaaagttctggacagttctgcctcctgccctgtcccagtggaggcagtaattctaggagatcctaaggggttcagggggaccctacccccacctcaggttgggcttccctgggcactcatgctccacaccaaagcaggacacgccattttccactgaccaccctataccctgaggaaagggagactttcctccgatgtttatttagctgttgcaaacatcttcaccctaatagtccctcctccaattccagccacttgtcaggctctcctcttgaccactgtgttatgggataaggggagggggtgggcatattctggagaggagcagaggtccaaggacccaggaatttggcatggaacaggtggtaggagagccccagggagacgcccaggagctggctgaaagccactttgtacatgtaatgtattatatggggtctgggctccagccagagaacaatcttttatttctgttgtttccttattaaaatggtgtttttggaaaaaaaaaaaaaaaaaaaaaaaaagc

SEQ ID NO: 1307 - DNA, 2824 bp, Homo sapiens
actcgattgtaatttcatccccgggccggtcgagcctccctccctcccgcggccagcccttccctcccagtcggcctccttcgtcgcccccgcccccgcgaaaagccctgcagcttgcagccggcttcactcgcgcacgccgacctcccggctgcagtcctacctcttggaactacccgtgtttccgggcccagccctcgcagccccccacctcctcgccccggcccggggatccgttggggccgcgtcccccacgcgcccccggagacgccctttccgtgtgcgcccgggacttggtgaaactttgcaggcgccggctgcgaaatggatttaatccgaggcgtcttgctccggctcctgctcctggcttccagcctcggacccggcgcggtgtcgctccgagcggccatccgaaaaccaggcaaggtagggcctcctcttgacatcaagctgggcgcattgaactgtacggctttcagcatccagtggaaaatgccaaggcatcctggaagtcccatccttgggtacactgtcttttactctgaggttggcgcagataaatccctgcaggagcagttgcacagcgtgcctctcagccgggacatcccgaccacggaggaagtgattggagatttgaaaccaggcactgaatatcatgtgagcatagcagcttacagccaggctggcaaagggcggctgagctctcctcggcatgtcaccactttgtcccaagattcctgcctgcctcctgcagctccccagcagccacatgtcattgtggtttcggattctgaggtggccctgtcttggaaacctggagcgagtgaaggaagcgcccctattcagtactattctgtggaattcatcaggccagatttcgacaagaagtggacctcaatccatgagcggatccagatggactccatggttatcaagggcctcgatccagataccaactaccagtttgccgtgagggcaatgaattcccatggccccagcccccgcagctggcccagtgacatcatccggaccctctgccctgaggaggcgggaagtggccgctatggaccccgttatatcaccgacatgggagctggtgaggatgatgaaggatttgaagacgacttagatttggatatttcctttgaggaggttaaaccacttcctgctaccaaaggagggaataagaaatttttggtggaaagcaagaagatgtctatatctaacccaaagaccatttctaggctcatcccccctacctcagcatctctccctgtgaccacggtggctccccagcccattcccatacagagaaaggggaagaatggtgtggccataatgtcaaggctctttgacatgccttgtgatgaaactctctgctctgctgacagcttctgtgtcaatgactacacctgggggggctcgcgatgccagtgcaccctgggcaaaggtggtgagagctgctcagaagatattgttatccagtatcctcagttccttgggccttcgggatggagccctcgtgttcagctataacctgggcagtggtgtggcatccatcatggtgaatggctccttcaacgatggtcggtggcaccgagttaaggccgttagggatggccagtcaggaaagataaccgtggatgactatggagccagaacaggcaaatccccaggcatgatgcggcagcttaacatcaatggagctctgtatgtgggtggaatgaaggaaattgctctgcacactaacaggcaatatatgagagggctcgtgggctgtatctctcacttcaccctgtccaccgattaccacatttccctcgtggaagatgccgtggatgggaaaaacatcaacacttgtggagccaagtaacaccagctggccttgtccaagggacagagccttctattctgagaatcccaggggccctcagaccctgcctgatgctatatgcagaggcccagggaccaggtgtgtttcctctcaccaagaagaaagtacacactgatgagaaactgagaaccaagacaggcatccctgggtggcctttcctgctgacactccacgagctgacccagcagaattctctgtgtaggaagcatcggactttgtccattgaatatgtagcggctgccagagatcacacatcaatgcaaattccagagcctgtctgctatagctcagtgactgtgttgtgattcatagtacattaaaaagagagagagagagaaagaatcccacagggcactattaaaatacttctctccttccctgactcatgacactcttcctgacagcagaatgactgtgtgaccttgaacttcacatttcccacattggcccttggattgttcggattaaccccttccactcctcactggctggttcactgtgttctgactagtccataaaaataaagatggaaggagatcaaacacagaatcataatcataatgcggcccccttccccagagcttacctcgaatgtgaaatccctacttcttataatgcagagttaaggagctgagcccccatgattttgtagctgtacttttgtatgtgtatatttttatagctgcagattgtccacacagtatacttttggaagtttgggtggatgactctgaattcttgcacacctttcctaaaaatttctcccaagagagacttgtttgggccttttgtggtgtcagtggaatggataggtaacttgggtgggcaacttggggagctgaccattctcttttggtaaatgttgacggctcaagaggatgaatatgaagctttccaagataagcagattaaaaggaacatgtgttaccg

SEQ ID NO: 1308 - DNA, 3256 bp, Homo sapiens
aacagaaaaaacaaagataacagtggtttaaactaaataggagtttttcttcttacataagtctagaagtaggtggtgtccaggttcctatctttctgctctgctatcctcagtgcatgatttttatcctcagattacctcactctcactgttcaagtttgctcctggaggcagtggggaaggcaagaaaactggactttctctgcttgagttagcttccctgaggccattttccagaaccagcagcacctgaacttatgtttcgaccagaactgggtcacactgatggccacacctagctgctagggaggctgagaagtcaatgtggcaatgtgaccagctaaaagttggattcttttactaaggaagaagggaagagggaatgtttggtaggcaactttggattttaaactcagccagccttgttggctacctaaattctgtgtaccttcttcttccgagagagaaaacactcacccctctctccctgaagagaaaccaccagaaatccagcccattattgcatactagatgaaagaccatgctatctggagacagtcccctccatcatgttagggtgtggctccttgtgttctggccacctacaaactgaaagacaagttttctgccctgagagcaccagatgcataatgcaaaggtgcaggaaaactgaccttttaaattttttagagacagggtcttactctgttgtccagtctagagtacagtggtgtgatcatagcttactgcagccttgaacttctgggctcaagtgatccttccacctcagtccccctagtagctaggactacaggcacatgccacgaacgcctggctaaacatttttttttgtagagatggagtattgctatgttgctcaggctggtcttaaactcctggtctcaagcaatcttctcacctcagcctcccaaagcactgggatcactggtgtgagccaccatgcccaagatccctaaaattgaccttttagaaaaagggagaaatagaaatatagtggccactgatccatagcaatttgaaagtaccacttggcaaaaataattaaatctctctgctatagttcatgaatatattccttggtttgcctatcaggcaacccctgattcacctttctgagaggaattcctttacctaatgtcctcagggggccttggttttactttcttgggggtttttattgtacattaattttcagacacaatctgaatgggcattggaaagtatacccttcttggaggctgggcagccttagcagtttacttcctataattgtgagtctgggggcaggcttgggaattagagtatagatccgtaacagctacagtctattgcaggccaggtttgggtttttgttgttgttttgttctgtttcttggccaagtggattcctaaaactttagtaagtttctggtctgttgtcttcagtcatttacatggacagtattaaccaaggtaaaatacattgtttttaacaaagaacctcatcatttacttgctggcctctgtgtgctctccatcccctttgttcttacaggaatggtacctccttgagatcctttgagactgtaggcttgcatggaatggcaacagtcttaatctgatctcttcccctaggatggctcctattatttggcagaaaattcttaagggaaggttcttaaaaaaggttgagaaagttttagtagctccctcagagcctttacttataaatgtttcagtttggagtacagttttcaattcttcagggctccagatttgggacttggtcaatttatatggtagacaaagagcaattctctcagcaaagctatttttcccttgcgtcactgcagacttgttaatcttagtccaagtcacatatctcttgtagggctttgctgaaaagaggcaagaagcagccaacacatgctagcactctgaagttctaccaccttcgtctctgtggcaggaagtctcaacctcaccttgacttctgttggcaagaagtctcactgcccaaagccctacctcctcaactaagccaaccccagatttagggccttcgacttgctgtgctttacttctagctgccaaattctgtataggtcaagattcttggctgtaagcaatgaaatcttctttagctattaaacagaagggaattgatgaatgagtatatataggtcacagaatcaatgggagggttgaagaaacagatctaggctgagcttctaggaattatgtcacaagagtaggctgctgaaagagctgctgcttttagaacaatcaagaagctgcctgctggattaggaagctgcctgctgaacagttgccagttccagagccacaccacctctgccatgctttatgccagcaaaaatagatacatctcttcctgcctctgtccccacgttacttggctctgagtaaaagtctcaaccatgaagtacaatcaagaagaaattgaaaaacagtcagagttagatgatgagcttcatcgtttgtcatgcaggatttttatcccctgaagaacctgctagagaagtccaccttcacccttaaccactggtgcctcaacttaatacttttaaaattcatttgtttctgttggaattgggatactaaggtccagaggtgtccttctaaagctggtagaggtttcacgagtcatcagggacccagaacccttctcttttgctgtccctttgtcctagtgcatggtttccacactgtggtgcaagatgtctcctcaagctctaggcattacatctgctatcctgctgtcagaaagaaggaaggggaaaagaagatcatttccttctctttaaggacatttcccagaagtcacacagaacatttccatttatattactttggccagaacttggtcatatggccacatttagttccagaatgattaggaaatgcagtcttttattgatccctgtgcccaggaaaatattggaggcctttttcaaggaaaaaggggaaaacagatattggttgacaaatagcagtctctgccatactgtccctggatacatgtctttgagtgaatgtcccttatttaccattctgattacttgttggatattttcaatatgtgttacaatatggttccaaaattgtatgtgatattccaacagcaagttggatgcaatgtgtcataaaaatgacctcagtgtcaaccagcatttgaataccgtgtctcaatgctgtgcaccaataaagaacacagaaagtcagagttttccat

SEQ ID NO: 1309 - DNA, 3236 bp, Homo sapiens
gtgaaaggtaagggggagcgagagcgccagagagagaagatcggggggctgaaatccatcttcatcctaccgctccgcccgtgttggtggaatgagcgttgcatgtgtcttgaagagaaaagcagtgctttggcaggactctttcagcccccacctgaaacatcaccctcaagaaccagctaatcccaacatgcctgttgttttgacatctggaacagggtcgcaagcgcagccacaaccagctgcaaatcaggctcttgcagctgggactcactccagccctgtcccaggatctatagaagttgcaggccgttcccaggacgacgctatggtggactacttctttcagaggcagcatggtgagcagcttgggggaggaggaagtggaggaggcggctataataatagcgaacatcgatggccaactgtgggactttttgactacaattctcaacaacagctgttccaaagacctaatgcgcttgctgtccagcagttgacagctgctcagcagcagcagtatgcactggcagctgctcatcagccgcacatcggtttagctcccgctgcgtttgtccccaatccatacatcatcagcgctgctcccccagggacggacccctacacagctggattggctgcagcagcgacactaggcccagctgtggtccctcaccagtattatggagttactccctggggagtctaccctgccagtcttttccagcagcaagctgccgctgccgctgcagcaactaattcagctaatcaacagaccaccccacaggctcagcaaggacagcagcaggttctccgtggaggagccagccaacgtcctttgaccccaaaccagaaccagcagggacagcaaacggatccccttgtggcagctgcagcagtgaattctgcccttgcatttggacaaggtctggcagcaggcatgccaggttatccggtgttggctcctgctgcttactatgaccaaactggtgcccttgtagtgaatgcaggcgcgagaaatggtcttggagctcctgttcgacttgtagctcctgccccagtcatcattagttcctcagctgcacaagcagctgttgcagcagccgcagcttcagcaaatggagcagctggtggtcttgctggaacaacaaatggaccatttcgccctttaggaacacagcagcctcagccccagccccagcagcagcccaataacaacctggcatccagttctttctacggcaacaactctctgaacagcaattcacagagcagctccctcttctcccagggctctgcccagcctgccaacacatccttgggattcggaagtatcagttctctcggcgccaccctgggatccgcccttggagggtttggaacagcagttgcaaactccaacactggcagtggctcccgccgtgactccctgactggcagcggtgacctttataagaggacatcgagcagcttgacccccattggacacagtttttataacggccttagcttttcctcctctcctggacccgtgggcatgcctctccctagtcagggaccaggacattcacagacaccacctccttccctctcttcacatggatcctcttcaagcttaaacctgggaggactcacgaatggcagtggaaggtacatctctgctgctccaggcgctgaagccaagtaccgcagtgcaagcagcgcctccagcctcttcagcccgagcagcactcttttctcttcctctcgtttgcgatatggaatgtctgatgtcatgccttctggcaggagcaggcttttggaagattttcgaaacaaccggtaccccaatttacaactgcgggagattgctggacatataatggaattttcccaagaccagcatgggtccagattcattcagctgaaactggagcgtgccacaccagctgagcgccagcttgtcttcaatgaaatcctccaggctgcctaccaactcatggtggatgtgtttggtaattacgtcattcagaagttctttgaatttggcagtcttgaacagaagctggctttggcagaacggattcgaggccacgtcctgtcattggcactacagatgtatggctgccgtgttatccagaaagctcttgagtttattccttcagaccagcaggtaattaatgagatggttcgggaactagatggccatgtcttgaagtgtgtgaaagatcagaatggcaatcacgtggttcagaaatgcgttgaatgtgtacagccccagtctttgcaatttatcatcgatgcgtttaagggacaggtatttgccttatccacacatccttatggctgccgagtgattcagagaatcctggagcactgtctccctgaccagacactccctattttagaggagcttcaccagcacacagagcagcttgtacaggatcaatatggaaattatgtaatccaacatgtactggagcacggtcgtcctgaggataaaagcaaaattgtagcagaaatccgaggcaatgtacttgtattgagtcagcacaaatttgcaagcaatgttgtggagaagtgtgttactcacgcctcacgtacggagcgcgctgtgctcatcgatgaggtgtgcaccatgaacgacggtccccacagtgccttatacaccatgatgaaggaccagtatgccaactacgtggtccagaagatgattgacgtggcggagccaggccagcggaagatcgtcatgcataagatccggccccacatcgcaactcttcgtaagtacacctatggcaagcacattctggccaagctggagaagtactacatgaagaacggtgttgacttagggcccatctgtggcccccctaatggtatcatctgaggcagtgtcacccgctgttccctcattcccgctgacctcactggcccactggcaaatccaaccagcaaccagaaatgttctagtgtagagtctgagacgggcaagtggttgctccaggattactccctcctccaaaaaaggaatcaaatccacgagtggaaaagcctttgtaaatttaattttattacacataacatgtactattttttttaattgactaattgccctgctgttttactggtgtataggatacttgtacataggtaaccaatgtacatgggaggccacatattttgttcactgttgtatctatatttcacatgtggaaactttcagggtggttggtttaacaaaaaaaaaaagcctt

SEQ ID NO: 1310 - DNA, 2363 bp, Homo sapiens
acattgcgctctgtgattctgaggaatacagtgtgccagcatccgatccagtctcctttcacctgcaggtgttccagaaacttcaaaatgcgtctggaagaactgaaaagattgcagaatcctctagaacaagttaatgatggaaaatattcatttgaaaatcaccagctggccatggatgcagagaataatattgaaaagtatcccctcaatctacagcccttggaatcaaaggtgaaaatcattcagcgagcatggcgagagtacctgcagcggcaggagcccctggggaagaggagcccgtccccaccctctgtctcctcagagaagctgagcagctctgtcagcatgaacaccttctccgacagcagcacacccgattaccgagaggatgggatggatctaggcagtgacgccggcagcagcagcagcagcagccgcgccagttcacagtccaactccaccaaagtgaccccttgctccgagtgcaaatcttcatcgtcgccggggggcagcctggacttggtgtctgccctggaggactatgaggagcccttcccggtctaccagaagaaggtgattgatgagtgggcgccggaggaggacggggaggaggaggaagaggaggacgagcgcgaccagcgagggtaccgggatgaccgctctccggcccgggaaccgggggacgtaagcgccaggacccgcagcggcggcggcgggggcaggagcgccaccaccgccatgccgcccccggtgcccaacggcaacctccaccggcacgacccccaggacctcaggcacaatggcaacgtggtggtggctggccggccgagctgttcccggggcccccgccgggcgatccaaaagccccagccggctgggggccggcgcagtggccgcggcccggcggctggggggctctgccttcagcccccagacggcgggacgtgcgtccccgaagagcccccggtgccacctatggattgggaggcgctggagaagcatctggccgggctgcagttccgggagcaggaggtacggaaccagggccaggcgaggaccaactccacctccgcacagaaaaatgagagagagtctatcagacagaagttggcacttggaagcttctttgatgatggcccaggaatttataccagctgtagcaaaagtgggaagccaagcctttcctcccgactgcagagtgggatgaacttgcagatatgctttgtcaacgacagtggcagtgataaggacagtgatgctgatgacagtaagactgaaaccagcttggacacccccttgtctcccatgagcaaacagagttcttcctattctgatagagacactactgaagaggagtctgaatccttggatgacatggacttccttacaaggcaaaagaaattgcaagctgaagccaaaatggcccttgccatggccaaaccaatggccaaaatgcaagtagaagtggagaaacagaacaggaaaaagtctcccgtcgctgatcttctgccacacatgcctcatataagtgaatgcttgatgaaaagaagtttaaaacccaccgacctgagagacatgactattgggcagctacaagtgatagtcaatgatctccattcccagatagaaagcttgaatgaagagttggtccagctgcttctcatccgagatgagctgcacacagagcaggctgccatgctggtggacattgaagacttgaccagacatgctgaaagtcagcagaagcacatggcagagaaaatgcctgcaaagtgaaaagaagccattcaaccagagaacaagctagaatttattttgcttctgtggttgtaaaaatgctgttgctaaaggtggcgcagaaacaaatatcagtgttagtcattgataatgtctgaagcttaatgtccagtgattggcctttgcttcttaatttattttaattttttacttgtgccacttaatatcaggcattttaataaaatattgttacaaaaaatgtacagtactgacaccaccacaaatcatggttaataaaagagagtagttttaactttatttttatttgtttagagattttaagttggaacagtattttcccattgactacttttcattcttcactgtagttttaaagaagaactgtaaatgacggtgctatacaagtcaaaaaatacatgcctgcctcgtagtgaagttgtagctctccgtaatatgtatattttactcagttttcaacattttgtgaatgttgactacctgaagttcctttttagatgtgctattaacattctgttggattcagagggttccttgaaagttttatgtataaatatgtaaaataaaaattaaaactttgtttc

SEQ ID NO: 1311 - DNA, 2964 bp, Homo sapiens
agtcggcgcgggccctgggaggggcgcccggagccagccgcgcagcatgcactggggggttggctttgcttcgtccaggccgtgcgtggtggatctgagctggaaccagagcatctccttcttcggctggtgggccgggtccgaggagcccttctccttttatggggacatcatcgctttccctttgcaggattacggtgggatcatggcagggctgggctccgatccctggtggaagaaaaccctttacttgaccgggggagctttgctggccgcagctgcgtatctgctccacgaactcctggtcattaggaaacagcaagagattgactctaaagatgctattattttgcatcagtttgcaagacctaacaatggtgttccaagtttatctcctttctgtttaaagatggaaacttatttaaggatggctgacttaccgtatcagaactattttggtggaaaactctctgctcaagggaaaatgccttggattgaatataatcatgaaaaagtttctggcacagaattcataattgactttctggaagagaagcttggagtgaatttaaacaaaaaccttggccctcatgaaagagccatctccagagcggtgaccaagatggtggaggagcacttctactggacgttagcttattgccagtgggtggacaatctcaatgagacccggaagatgctctctcttagtggtggtggtcccttcagcaacctgctgaggtgggttgtgtgccacataacgaaaggaattgtgaaacgcgagatgcacggccacggcattggccgcttctccgaggaagagatttacatgctgatggagaaggacatgcggtctttagcagggcttttgggtgataagaagtacatcatggggcccaagctttccactcttgacgccactgtctttggacacttggcacaggcaatgtggaccttaccagggacaagacccgaacggctgatcaaaggtgagctgatcaaccttgccatgtactgtgagaggataaggaggaaattttggccagagtggcaccacgatgatgacaataccatctatgagtctgaggagagcagcgaaggcagcaaaacccacaccccgctgctggattttagcttttactcaaggacagagacctttgaagatgagggagcagaaaacagtttttccagaaccccagacacagattttactggacactcactctttgattcggatgtggacatggatgactatacagaccacgaacagtgcaagtgacgtccagcctcactgaccctcttccttgggacctgccactccctgggtcggtccattttcccaggtagcaatccatccgagctgggaggagatcttcgtgcttggcagagttttcacatgctaactggactatagcagccttatttcttttttgtacaaacaaaacacagaaccattcagatgactccattgaaaacaaacaggcaaaaaataatgtcagcatggttcctgaaatccatttttgtttccattagaaaactattaataatattgtgtggtagagcaggtgtaagagctggttgtcagctgatagtttttatgatgatcctcttcaaccctgaggtcttaattgtgagatggattcttgaacctccttcctccaccaggatttgaagtaatgagagatatcatcataaaaatgttttacggtggctgcttgtactttatgtgtgtatattgtatgttgagacataagtcaaataaaatccacagatattaaacgaacacctactatgtgcaaagcactgtgctaggtgctaatcagtatacattttattctaagccctgccagtgactagctgtgtgattttgagcaaatctcttattaactattgggtgcctcatttctcccacctgtaaagtggggatgacaatactctccacctacctacctcacaggggtgttgtggggattcatgtggtaacattcgtacggcgctttaaacctcttagaagtggtgcgacataaacacagcattttattctttattgcacttcatgcatgtgaagatttgagggcaaaggaattccatatccaggcaaccaccaccacagtcacctgcaaaagctgagcagatgaaatacacacaaaggtacacttaggactttgtcatgattcctttctgtaatcttggctgaatcaaaatcttttgttcaaagaacattggaaatgtttttacaaattatcgacagctacaaacagtcttcaattctaccatgtatttgcagaaaagtggttctttcattgcctgaactcaccctggcatgttctgtgttgactccagagtgttacgttgcctatgtttgatttatttgagaagaataaatctcaggtatatggcaggtttcatagagttgaagggaaagtatttcattgatttttataagcagaagcctgccaacttgtaatgtctttttgaaaacaaaccttgcaaagatgtattgaaaagatgaagtagcaagaggatacttgtatcaaagcactctgtgcagtgttagactatatgcagttttattaatgcaacttttctggtgttttcagccactgcccagtgagaggagagcagtgctgagaacaagtcttaatgtttttgctgtctcatccccgttctctctctctttccctatagtattcgatgaactgttggcttacccatatttgtgaaggcaccctatttctaaagatgaagttgttgttgttgttgttgttttgacttaggacattttccagggaaatatggggcagagatcctgggtgatggctgtgagatttgggctaggagagccaagatttacaattgcaaacaaaactgctttgcttctgaccaacataaggattgctcattatggggttaaagaggcacttcttaaaatacagcaacttctgagaaatccatgcactttacttg

SEQ ID NO: 1312 - DNA, 2850 bp, Homo sapiens
ttttccggccggtccccatggaggcgctggggaagctgaagcagttcgatgcctaccccaagactttggaggacttccgggtcaagacctgcgggggcgccaccgtgaccattgtcagtggccttctcatgctgctactgttcctgtccgagctgcagtattacctcaccacggaggtgcatcctgagctctacgtggacaagtcgcggggagataaactgaagatcaacatcgatgtactttttccgcacatgccttgtgcctatctgagtattgatgccatggatgtggccggagaacagcagctggatgtggaacacaacctgttcaagcaacgactagataaagatggcatccccgtgagctcagaggctgagcggcatggtaaccaggggagggggccgggtctcagatcccaaagctggatgtacccaagcctatctgctagcaagtgaactgtggcaggcatagtgatacattaaacaactaagagctagagaagtcaagtgacttgcctagggtcccccagctagtaagagtcagagtgagctaaaatcctctatacatatcgagtcaggtaatctacctggctattattctcagaggtcctcaatacctgcagatggtagtttgaataccagaggtttgaagataggtcttatgtgctcttgccttggtagaactgtctagatggacccaggcttctttgagtgtttgctttcccagcccattggcttaattcagcccttaatgctcttcccctttggaatgcaggtggtttaatgagaatttaggttctcaagtcagattgcctgggttcacatctagctttgtctcctgcagtctgtgagcttcagctagaaagtggtaataaaacagtagtaccaaccacatggaattgtaagatcaaatgaagtcatatgtgtaaaatgcctggtacagagtgggtacccacttttaccttcctttcctttatcttggtggcttcccaattcccttcgttaactcagtttcccaccacagcaaactgtcctcaaagctgggatttctaacaccttagagattactctggtggggagttttatcatttgttgtttcagcagattaatgcaggacaccagtggaaccaacataatttgctataggactggatgtggagtggaggagagcaaagtcatggttgttgattccaacgctttcagcctgagcaaatgaatgacttgagatggagatgactggaggagaaggttttttttggtgggagggaggagtggctattggatatccactgctgtgtaacaaagtactccaaaagttagtagtttgatacaataaaaatgtgttttttcagtttccctgggtcaggaatttaggagtggcttgtttgggtgattcgggattagggtatctcacgaggttgcagtcatctaaggattgatggggcactgaagaatctactatctatctatctatctatctatctatctatctatctatctatctgtctatcttgagacagagtctcgctttgtcgcccaggctggagtgcagtggcgcgatcttggctcactgcagcctccgcctcccaggttcaagtgattctcctgcctcaacctcccgagtagctgggattgcaggcctgtgccaccacgcccggctaattttttgtatttttagtagagacggggttgcaccttgttgggccagatggtcttgatctcttgaccttgtgatccacccgcctcagccttccaaagtgctgggattacaggcatgagccactgcgcctggcctacttatttgttgtttaaatttattttttttctgtcaaggtgttctttatttcagagagagggcaggacagggggctcagtctttcttggcatcagctttcctcatgatggctgggacattgctcagctcctcctgcctcctcttagtgcggatgtgtgtccccactcttttcttgatgaacttgagggcccgtttgtccttggagaccttgagtaacaccatggcgtgccgctcatacggggcgaaaccacacacctctcggatcatgtcccacatgaatttggtgtttggtcaggcgcccgcggcggcagctgtgcctgggcttgctcatgttcttggtcatcttgtggcccttgtcaaggcacacggccatagtgggtagcacagagccatggctgctgctctccaatggcagctgtggcagaagggctggtgccacgcggggatctactttttttttttttttttttttttttttgagtcacgctctgtcacccaggctggagtgcaatggtgcgatttcagctcactgcaacctctgcctcccggcttcaagtgattcacctgcctcagccttctgagtagctggggttacaggcgcctgcccccacacccggctactttttgtatttttggtagagacagggtttcaccatcgtggccaggctggtctcaaactcctgacctcaggtgatccacccgccttggcctcccaaagtgttgggattacaggcatgggccaccacgcccagcaggggatctgcttttaaagggctcactcatagggctgttggcaggatgcctcagtgcctcaccacatgggcctctcagtagggttgcttgtgtgtccttgtatcacggcaactggcttcccccacttggatcttgcaagtgagctgagagaacaaagtagaaaccataacctttggctgggcatggtggctcacgcctgtagtcccagcacttttggaggctgaggcagttggatcacctgaagtcaggagttcaagaccagcctggccagcatggtggaaccccatctctactaaaaaatac

SEQ ID NO: 1313 - DNA, 3204 bp, Homo sapiens
agatgcgaggcggcggtcagcaggtgccgaacccacggccaggcttccgtggccagcagccctagaggaatggccatcctgtccctgcgagcccctgggccctggcaggcgatgcaggtgggatgctatggaatatgatgagccaaacatccgagtgctccttgagcaccgcttttacaaggagaagagcaagagcgtcaagcagacctgtgacaagtgtaacaccatcatctgggggctcattcagacctggtacacctgcacagggtgttattaccgctgtcacagtaagtgcttgaacctcatctccaagccctgtgtgagctccaaagtcagccaccaagctgaatacgaactgaacatctgccctgagacagggctggacagccaggattaccgctgtgccgagtgccgggcgcccatctctctgcggggtgtgcccagtgaggccaggcagtgcgactacaccggccagtactactgcagccactgccactggaacgacctggccgtgatccctgcacgcgttgtacacaactgggactttgagcctcgaaaggtttctcgctgcagcatgcgctacctggcgctgatggtgtctcggcccgtactcaggctccgggagatcaaccctctgctgttcagctacgtggaggagctggtggagattcgcaagctgcgccaggacatcctgctcatgaagccgtacttcatcacctgcagggaggccatggaggctcgtctgctgctgcagctccaggatcggcagcattttgtggagaacgacgagatgtactctgtccaggacctcctggacgtgcatgccggccgcctgggctgctcgctcaccgagatccacacgctcttcgccaagcacatcaagctggactgcgagcggtgccaggccaagggcttcgtgtgtgagctctgcagagagggcgacgtgctgttcccgttcgacagccacacgtctgtgtgcgccgactgctccgcggtcttccacagggactgctactacgacaactccaccacttgtcccaagtgtgcccggctcagcctgaggaagcagtcgctcttccaggagccaggtcccgatgtggaggcctagcgccgaggaacagtgctgggcaccccgcctggcccgccaggacccaccctgccaacatcaagttgttccttctgctccggagacccctggggtgcggccctggccccctccacccctgctgggccagagcgggtgggcagtgtcaaggcccgctgtctcccaggtgcttgctgggactcggggcggctgcacctggctgtcacctgggtgtgctgctgtgaggggtccttgcgtggcccccatccttcccccaatgcagaactccatgggcagggagctggggggacatctcacctcccccatggcacagagccctccacacccctggaccagggcatccgggccctagaaattccacagctcccgtcctggccaccctggaagctcatcaggccaagacccggacagagcttcagaggagtgttgagtgacacctgaggatgcggctgcacacactcagccaagggccgagtctcacctgcggtggggtttcggctctgcctgggggctccatccctttcagccactcgtggccttggggatttctggttgtccccagctgggactgttcacagttgtcacctgcagacctgcctctccctggcctgaggttcaaaggcctcatcggatggtcagtacagtggggtcacctgttgtttctatacaacagcagggaaggggccatggagcttttccctgctgggtgctcctgctttggcccagcccacctttcctggtgctccaagctaggaggctgtggccccagcctgaggagggtgtcctggcctccaggtgtgcagcaggggctgtgtgctgggggaggttccagttaggcgatgggatcctgcagtggtctggtggcatttcttggaaccagatttacctgaggagctctgtcctgctccctgtggagggctccagatagctcagaaatgaccagccaatggccttttgtttgggggcctgaggtcaagagagctgagagtattcgctcgactgagcacattcaggaagatcagggcaggcgtgtgggaggtccctcactccacgggacagaggcccctggacagcagaggaaacctacagctctgggtgaggggacacttggctttggtgtttgcactttacagatcctgcggtccacgaggggcctcaggagaggacgtgtcaggacgtggcttcccagccttctgccttgggcagtgggggtgctcctgtctgtccttttcccccacaccctggactgtgcttggctgttggtgcacatggttggcacacggtgggcagagggcagagaatgccactgcttggttattggtcccctttgaccaggaaacccaagaggagacacctcagtcagcagaaaggccacctggctcactggctcattccaggagtgggagagacggcagggtctcctctttgtcctccggcatcaggaaggggatggtgtccactccccactgtggtggctttaggcaaggttcttattgtctgctctgcctcggtttccccatctggaaaatgggggcaggggtcctgacctacctcaggtggaacggtgagcagggaacatgtcggagtccttcagagaatgtgatgtgaggttggatcaacagtgtgggttcctgtcctgtttccccttcctctttggggctgaggaggaggttaaaggccaaatgctgtttcccaacaccccaaagtctgcacacgtctcatgaatgcatcacatttctgtcatatggatattagccattccgaaatctgtgtaatcaacttcacattattcaagttacaaatcactgtgtccatagaaaaactgtgctggtatttgctggacgaagggttgggccccttttatttttacctgccacccagcatctcccccacctgccccttctgggtgacacagccggtaaacggaatcacgtatggttctttctgtgggtctgtggcacagcaggaagagcccggtgccgccagcaccttgtggaagaccacacatgggtggtcccacagcatgggaccaggctggcctgagggatgcccagttgtaacaatgctgctgtcactgtctcattaaatatacatccttt

SEQ ID NO: 1314 - DNA, 3242 bp, Homo sapiens
gctcctcgcctggccgtgatatcaatggcgcaggcttcacttctgctgtggcggtgactgaggcctttctggtgacctcagcccaacgcaggccgtctccggagcttcccggtagtggccccggattcccacggtctttgtcattggctgtcagctagcaggcctggccgctcccgtgcggagagaccatctcttcagggcaatgtccaggccgagcagcgtctccccgcggcagccggctcctggcggtggcggaggcggcggcccctcgccttgtggccctgggggcggcggccgggccaaggggctgaaggacattcgcattgatgaggaggtgaagatcgcagtcaatatcgcgctggagcgcttccgatacggggaccagagagaaatggaatttccttcttctttgaccagtactgaaagagcctttattcatcgactcagtcagtctcttggtttggtctctaaaagtaaaggattcctcagttccttttagatgattgctttaaaaatggtatcccctgccgtatattttgtactcaaccaagacgattggcagctatcgctgtggctgaaagagttgccgcagagagaagggaaaggattggtcaaacaattggttatcagatccgattagaaagcagggtttctccaaagacacttctgacattttgtactaatggggtattgcttcgtacattgatggcaggagatagtacgttgtcgactgtgacacatgttatcgtggatgaagtgcatgaaagggatcgatttagtgattttttacttacaaagttaagagatttgttgcaaaagcacccaactttgaaactaattctttctagtgctgccttggatgtaaatctctttataagatattttggaagttgtccagtgatatatatacagggaagaccatttgaagtaaaagaaatgtttctggaagatattttaagaacaactggatatacaaacaaagaaatgttaaaatataaaaaggaaaaacagcaagaagagaaacaacaaaccacacttacagaatggtactcagctcaagaaaatagtttcaagcctgaatctcagaggcagagaactgttctaaatgtgactgatgagtatgacttactggatgatggtggtgatgctgtcttcagtcagctgactgaaaaagatgtgaattgccttgaaccatggttaataaaggaaatggatgcttgcctttctgatatatggctacataaagatattgatgcctttgctcaggtctttcatctcattttaactgaaaatgttagtgttgattacagacatagtgaaaccagtgcaacagctctgatggttgctgcaggacgtggctttgcaagtcaagtagaacagttaatcagtatgggagccaatgtccatagtaaagcatcaaatggctggatggcattggattgggctaaacactttgggcagactgaaattgtggatcttctagaatcttacagtgcttcactggaatttggaaatctagatgaaagttctctggttcaaacaaatggaagtgacctcagtgctgaagacagagagctcctgaaagcttatcatcatagtttcgatgatgaaaaagtagacttggatttgatcatgcatcttctatacaatatctgccatagttgtgatgctggtgcagtactaatttttctgcctggatatgacgaaattgttggactgagagatcgcatcctgtttgatgacaagcggtttgctgacaatacacatagataccaagtctttatgcttcattcaaatatgcaaacatccgatcaaaagaaagtattaaaaaacccacctgcaggtgttcgaaaaataattctttccaccaatattgctgaaaccagcatcacagtcaatgatgttgtctttgttattgattctggtaaggtgaaagagaaatcctttgatgctctgaattttgttacaatgttaaaaatggtatggatttccaaagctagtgccatacagcggaaaggcagggcagggcgatgtagacctggaatttgttttcgtctgttcagtagactccgattccagtcaatcagtgtcttccagaaagaaatccaggtcttccagtcagtcagtgtcttccagaaaaatctacgtcttccaccaaatccaggtcttccagtcaatccacatcttccggaaaaaatccaggtcttccagccaatatatgtcttcctgaagatccacgtcttccagaaaatccatgtcttccagaaaatccatgtcttccagtaacctcccagtcttccagaaaatccacgtcttcccaacaatccaagtcttccggataatttgggtcttcctgaaaatctacgtcttccaacatctccacgtcttccagcatctctgtgtcttccattttttttcagtatgttttcactggcttatgttttcagatatgattttcctttttcacatatatggtttaataaatgggggataattttttttttgtaaatccgtgcttgtgccaagtctcatatttctttgccatctcagaattatctttttaccaccactgtttataaaatttccttagagactttttgaagggaaaatagagcaacagggaaaaatgaaagaaatgtcttggttactgagctctaaatagacaggtttgatggcacttctcatgatacattttagttattcttataaaagcaaacaggcaaacatgagtgtaaattaaagacaaaaagaaaactctggttttatatttgagaacacgtgaaaaatcatgggtcaacataaaatcttgagaaccttctactttctccgggaaagcattatatagtggtgcattagtttagaaagtcagctatgattttgcctatagttctagttattagctttggggttttcttgtactttaagacatacctgtaaattgaacctatttgaattatattccactgtatgtgtattatggctcttttcctattagagcaacttgtgtttccctgataatgtgtacattttttaggcatgtacttaatagttcacaatgttctaaatttggaaggacttaaaaaaaaaacttgtttaaatttccatcagttttgtaatatctagctctatatgtaaatgatgggtttgttggtatttaaaatgaatacaacttgaatgtaattaaagtgctgttttttggaagcgataaactttagatatacttattaaaatgaaattctatt

SEQ ID NO: 1315 - DNA, 2538 bp, Homo sapiens
gaatgtggttcgctgtggcccagaggcgcgagggccggcggagtttcttcagaggaactaccgccctgggaggaagcgtctgtttagtttcaacacagacgactgggcttgggagcctacgaggttgcagtctggagggcgccaacagcagctaccagggctgcttttcctgaacacgctgcaagcacgtcaaggtagtcggagtcccctaacaatggataaattcgtcattcgaacgcctagaatccagaatagccctcagaagaaagattctggaggaaaggtttacaagcaggccacgattgaatctctgaaggtcacactgtgaacaagatgcgtaaacactcagattcagaagtggcttctcttgccagagaagtttacactgagtggaaaactttcactgaaaaacattcaaatagaccttctattgaagttagaagtgatcccaaaaccgagtcgttgaggaaaaatgctcagaaattactctcagaagccttggaattaaagatggatcacctactggttgaaaatattgaacgggaaacgtttcgtctctgctcccgcctcattaatgggccgtaccggcggacggtgagagccctggtcttcacattaaagcaccgagctgaaatccgggctcaggtgaagagcggctcgctgccagtcggcacgtttgtacagacccacaaaaagtgacctgaggacggttccagccctgggccaggcagagaggaaaatgggcctgtctctgccgttcaaagacgcttttgagtttgggtgatggctgatgctggctgtgctagattttcccatggtgccgttcctttgcagacagaggattcggagagccctaggagacaggcctgcaggaatgtgcttcattagctgcagtgcgctggtgctgcctaacagaacgcacactggctgtcactaggaagcgccatacggttgctatcacccaacatggtgaaagggtgatggatttcactgtgaatatgccaaggacacctctaaacttcccccatgtcagtcagatgaagttactactatatttcaccaccctgcagagctcttcctgggagcagcgaccttgtccgtctctccttcactggacctccagtccttggcatagggcttggccccatgcagggctccatgcatatgtgctcatgaatggatggcaccgcccccgtgcctccaggctggcctctgatagtccacgcagccgagcagacagtctgggctccatgggaagagctaatcccaagcgtgtggaccgacagatggtgtggaacccagagcggaggcgcagcttttattagtttgagttgcttttgcttggaataggattagcataagtaccatcccaggcaagtggataaggtaaagctgtgttagttacattcagattttgtttctcggccacaatcctgggccaaacttctgctgggtcagtccaattcatgcctaagggtactactcaggaaggtcaactggagtggccagtcccctctccacattgacctctagagtggcctgtccaactcctaagtccaaccttcccacaccgggcagaaagctttttactggccccgttgctcccgggtgaggcctaaacacttgatgatgatgaagatgaagatgtgatgatggtagccatcacacagctctcccatgtaaccctcacgacaaccctgcaaggcagatagtatcaccatcctcatttggcaaatgaaaagctgatggctcagagaagttaaatgacttgcccaaggtgactgagccagtaggccacagacaggctccaaatcccagtctggaccgattggatgggcattcctgggtgggccggcctccctctctggcaaggctgtcatgctcccccagtgccctggcttcagctttggctggatcagtaaagagccaagtcaaagatcaagtcagggaaactcatgttttgtggctaagaagtattgctacccttaatctcttcactttctcttcagctccatgaaggagcatttaacttttggaaggagtcattttccacaaagaaacagttcttaaaaatcactgtgggttgggctcactggctcacacctgtattcccagcacttcaggaggccaagatgcagatcactcgagcttaagagttcaagaccagcccgggtaacgtggcaaaaccccaattctacaaaacaacaacaacaacaacaacaacaacaacaacaaatagccaggcatggtggcgtgcacctgtagtcccagccactagggaggctgaggcgggaggatcacttgagccgggaggttgaggctgcagtgagctaggatggtgccactacactccagcctgggcgacagagaccctgtctcaaacaacaacaaaatcactgtgtaataatgtgtataataacaataaaagctaacatttatggagtatttattaactgccaagactatgctcagtgcttttcatgcattatctcattgtttgaaatttcaataatttacgtgaataaaggaattctgcat

SEQ ID NO: 1316 - DNA, 2932 bp, Homo sapiens
ctggcgttagttccggtcgcagaggagacaccgccgcagttgccggtacatcggggatttctggctctttcctcttcgccttaaattcgggtgtcttttatgaataatcaaaagcagcaaaagccaacgctatcaggccagcgttttaaaactagaaaaagagatgaaaaagagaggtttgaccctactcagtttcaagactgtattattcaaggcttaactgaaaccggtactgatttggaagcagtagctaagtttcttgatgcttctggagcaaaacttgattaccgtcgatatgcagaaacactctttgacattctggtggctggtggaatgctggcctcaggtttttaacaagttaatcaggcgctacaaatacctggagaaaggttttgaagatgaagtaaaaaagctgctgctgttcttgaagggtttttcagagtcggagaggaacaagctggctatgttgactggtgttcttctggctaatggaacacttaatgcatccattcttaatagcctttataatgaaaatttggttaaagaaggagtttcagcagcttttgctgtgaagctctttaaatcatggataaatgaaaaagatatcaatgcagtagctgcaagtcttcggaaagtcagcatggataacagactgatggaactctttcctgccaataagcaaagtgttgaacacttcacaaaatattttactgaggcaggcttgaaagagctttcagaatatgttcggaatcagcaaaccatcggagctcgtaaggagctccagaaagaacttcaagaacagatgtcccgtggtgatccatttaaggatataattttatatgtcaaggaggagatgaaaaaaaaaacaacatcccagagccagttgtcatcggaatagtctggtcaagtgtaatgagcactgtggaatggaacaaaaaagaggagcttgtagcagagcaagccatcaagcacttgaagcaatacagccctctacttgctgcctttactactcaaggtcagtctgagctgactctgttactgaagattcaggagtattgctatgacaacattcatttcatgaaagccttccagaaaatagtggtgcttttttataaagctgaagtcctgagcgaggagcccattttgaagtggtataaagatgcacatgttgcaaaggggaagagtgttttccttgagcaaatgaaaaagtttgtagaatggctcaaaaatgctgaagaagaatctgaatctgaagctgaagaaggtgactgaattttgaaactacaccctcagtaaagcaaacaggagttgtagataaaatgtcatgtctcatgtgtcctggttcttacatcttcctacctccctgtatcaagcatgatataagggctttcatggcaaattttattttaactgtttctatggttgctggaaatgttgggtttagtttctaaaaccatgttttaagtagctacaggagctatagatttgaatctaatgttgcattagtcttttcagttatcttctacctcctgtattttctactgtaataatgtaatttaaggccttccacaatgaacagttcactttattccctgggttttctataaacagttttaaggatatgatttggttaaaaaataatttgttataaaaattctgtttgcaaattaaactggaaaagtatccagagtctcaaaaggcaatgatttgtgagataatatggcatgcccggagccctgctcatcaatgaaaaacccatatgtaataatcgaattcatttaacatgaatcttgagtacgtggaccattgcttgcatgttaactttttgttttgttttgttttgttttgttttgcatttttaactccagatatcctaaagctcaattgtttggtctctggttttcatccttagagaagccatggagaacagacttgaaaagtttaggaaatcataatgtggcagaggtggtgggaagaagaaagttgagctttttccccttgagaaacttctgcatttagtttctatctttccaggcaaaacaaatgggtattcttttcatacaaccattttcaaatgaaccttagaaaagtcttaacatttaaggtattttatgcacagaatacacttagattgataggaaagaactcgtaatggagtttgagtaaagaaaatgactgatgtactaaacccagtaaaaattgttgaaaatgttaaaggtcagcatgttctaattgggaatctagatatagcttagatttcctattggcttagagtatttgctataacaaatgaagtgcaatgacaattatatattcctactcggtcatactggactggcttcgttctcttaatatactcagtaatgactcaagcctctggctattaacataccctagttgccgttttttaattgccatgagccaaatacttcttggtatacaattgatccatttattttaatggctgccttttcattttcatcttttcttgctgctaccatctatgtatgtagtcattggggggaaaatgtagccacattttttatgggaagactttgtgttaaaagtgaacattttgaaggtttttaactggtgaaactagcctggaataatgccaccagagactgagtggaaatcgccccttttgaaggtgccattcttatgagccaaaagtttgtcatttaaaagttcattttgagggaataacatgtaatataatttgaaataaaggtatagtaaccttaaaaagaacattataactgattgttgtgaatggggtgaatttgttaaaatgagtaactttgataaagtttttcatgcacaggcaaaatgtattcactagatttctacgtagtgatctgcttttactttgtaatttgtagttctcaaaagacttttttttaaaaaaataaagtccatacttacacttagg

SEQ ID NO: 1317 - DNA, 2291 bp, Homo sapiens
ctttaaaattggaatctgaaaattgttattccgttcagtctctgtgcttataagatcaatgtttgtaaaggcctaagctttcttagagattccactgtccaggtgttttcatatatattaagtattttctgtaaacctaaaattgaggttagaaatagaaacccacattattttgtcccttccttgttctttctactgtccctcactttggccctcacaatttcaagtttcccttttcttttgtctgtgcattcattctgtcttgatgtgttgtcttgttttaatccattagttggcatagatggtcttaattgtttttcatccagatatatctaaaaccagaactccttttaaacatacaaaaggttgatttaaaaaattaatggagctgtttaatagtacttactggatatctttgcagttaaacttaggaacagttgggttttatcggacccagtacagctctgccatgctggaaagtttattaccaggcattcgtgacctttctctgccccctgtggatcgacttggattacagaatgacctcttctccttggctcgagctggaatcattagcactgtagaggttctaaaagtcatggaggcttttgtgaatgagcccaattatactgtatggagcgacctgagctgtaacctggggattctctcaactctcttgtcccacacagacttctatgaggaaatccaggagtttgtgaaagatgtcttttcacctataggggagagactgggctgggaccccaaacctggagaaggtcatctcgatgcactcctgaggggcttggttctgggaaaactaggaaaagcaggacataaggcaacgttagaagaagcccgtcgtcggtttaaggaccacgtggagggaaaacagattctctccgctgatctgaggagtcctgtctatctgactgttttgaagcatggtgatggcactactttagatattatgttaaaacttcataaacaagcagatatgcaagaagagaaaaaccgaatcgaaagagtccttggcgctactcttttgcctgacctgattcaaaaagtcctcacgtttgcactttcagaagaggtacgtccacaggacactgtatcggtaattggtggagtagctggaggcagcaagcatggtaggaaagctgcttggaaattcataaaggacaactgggaagaactttataaccgataccagggaggattcttaatatccagactaataaaggtatgtgaaaaactttgagtagcttgctaatcatggatattatttagtgacatccatgattcactacacccatacattgtggtctttgctctttaaatgtttcctgtggccaggtgcagtggctcacgcctgtaataccagcactttgggacgccgaggtgggcagatcacctgaggtcgggagttcgagactatcctggccaacatggtgaaatcctgtccctactaaaaatacaaaaattagctgagcgtggtggtgtgtgcctgtaatcccagctacttgggaggctgaggcaggagaatcgcttgaacctgggaggcagaggttgtggtgagccgagatgaggtcattgcactccagcctgggcaacaagtgtgaaactccgtctcaaaaaaaaaaaaagtttccttaaatagttactggctttatttaaggacttctccatctcccatcacacatcctttataacagactgaagttggcagagaacagaatgatttatttttagggtaaatggaagtttgttctcagcctcttggtttcacttactgtttaaaaccattgttttgcagctatcagttgagggatttgcagttgataaaatggctggagaggttaaggtaaggaaaatactgtttactcttcacttttcagtctagtaagtaaaaacaataacctggttgtaattatagtgttgggataatgtactgtagcatctctgtgtttttgtttagagaaagacatcatgcagggctgtataggccatattaagaatttcctaaaaatggccaggcatggtagctcacatctgtaatctcagcactttgggaggccgaggtgggtggatcacctgaggtcaggacttcaagaccagcccgggcaacatggtgaaaccccaaattagctggacatggtggtgcacgcctctaatcccagctactcgggaggctgaggcaggagaattgcttgagcccgggaggtggaggttgcagtgagctgagatcgtgccattgcactcgagcctgggtgacagagcgagactcctgtctc

SEQ ID NO: 1318 - DNA, 2775 bp, Homo sapiens
gctttatagaatgggtacactgtgatttatttatcctttctctacttttgaatatttgagtactgcttctagtttggggccattacagccagtattcctgttttttggttaacacatgtatgcatttcagtcagaaacatcgaaataacccctgcagcatatgagacttccaattgctccacatcctcaccaacacttattttccatcttttttgaaaaacaattgtaacatcacattctccttacaactcctcccactgaccttggaatcagaactaaatttctttacataacctacacaactctgtgatctggcccttacctccccaattccatctgcatctacatgcgtcctcttatttcccacctattatatgttgaccttcttcctaaacagtacttgccgttctcctgctacccctgggccttgcacacaacaaactctttgctctctttcctaggattagctcctaatccttcaaatatcaactcagtggtctgttccccaggacaaatcctgctatcacatgctctcaaagcacctcagcttcagtttaaaagattagcattatttgattttatagactctccagtctgggctctgccagtgcagagaagtatacttttactcatcattgcacacgtgggggctgggacagagttagaactcatttatttgaaggaacaaatgaacaaatgggaattgatacagtacttttgcctctctagtttttatggtggggtgaatcttacatttgatatgcactgggggaaactgtcaggtctgaaactgtttttgatatagagaacttaagagaattacataaatgtcatttggctatataatattcatctgaatttatcttttgcaaccattactgtttacccaagagaagtcagtaatgtcagatcacactgttcaaggtctatttgattataaccttcaaagatgctcagtatatctctgggtctcagctatttgtgcaattttctaaatgaacaaggacattagatgcattgatttcactggcatcccctcaaatggagaactggccaataaaactgctctcaagggggtaaactgaaatctcccctgaagattttatttccatctttacacaattagaagagagaagccactcccagtgtagcaaacccataaccaaagggccccaaggctttgtgtttggtcctcactgcctgattaaatgtctcagtctgttttgtgctgctactacagactggataatttgtaatgaacagaaacttctcatagttctgaaggctgggaagtccaggggctggcatctgctgagggcattcttgctgtgtcatcccattgcagaagggcaaaaaggctagcttccagcttttttttaggacttgagccttggaataagggtcctgcaaacatttactcatgtcttcctgttccagagcctgtcccactgtgaactcatcacagatgatgggatcctgcacctgagcaacagtacctgtggccatgagaggctgcgggtactggagttggacaactgcctcctcatcactgatgtggccctggaacacctagagaactgccgaggcctggagcgcctcgagctgtacgactgccagcaggttacccgtgcaggcatcaagcggatgcgggctcagctccctcatgtcaaagtccacgcctactttgctcccgtcaccccaccgacagcagtggcaggaagtggacagcgactgtgcaggtgctgtgtcattctctgacagcagctgcctgggcccaaggggtgatgaggcatcctttcctctagaagacctgagtcttcctgaccgactccaccatcacccaatctgttgattctccattgggaaaggcatttacaggtaaaagacttctgtatggattgcagttactctggtgatagttttcacctttattctgctgtgaaacaatcaaatcaaagccttgtgtcagttaacacatgacaagtggtctcaatgcagctaggaccatgccagaaacctggatctcttaagagattggtacctacctaggtacgaaagttctacccttggcatactcagcattcctcaaaaagaccatcagtgttagcacaaactgagcagaaaaaataagctgttgattttctacctgatacttaagccagtggcctactttaattcacaattccattttgattagcaggacttttccactttgaagataaatagcaactttatcaaagtgactgtactgcaaattaattcataatgcctgatagttttatatatagagacttatgtggaaggcatgttaataggtttccatgagacaccaaagaaaagaggactctatactgggtggagcagggtcttcacctttttgtttctgtcaacttgtcatatacacctccagggaccaaaaacaaaagcagctcggagtctgtgttgcctgattggaaagtagaagctctggtgtatgctacagcacataacacatttttactaaaggaaaaaagctaattatgtccatgcctctcgtaaaactggggggaaccttaaagagaaagaactaaggcttaagttatctgtagtataatcaattagaagtaatgaatggatgcatgtaaaatggatgtgattttttttcaagcttattttgaaatcttaaaaatcaggttacaccatagctactcaaaagttttacacacttaaaactcagatcagtaagtgttggtaccttttagactcataaaattgaataaaccattgcaatgcttt

SEQ ID NO: 1319 - DNA, 2818 bp, Homo sapiens
gggttaaggcgcctgggcgcacagcgagccggctgagggggctgtggcggccgcggcgggcgacatggacaacgcggggaaggagcgtgaggcagtacagctgatggcggaggccgagaagcgagtcaaggcctcccactccttcccccgagggctgtttggaggaaacacaagaatagaagaggcttgtgaaatgtataccagagctgcaaatatgttcaagatggctaaaaattggagtgctgcaggaaacgcattttgtcaggcagccaagctccacatgcagcttcagagcaaacatgactctgctaccagctttgtggatgctggaaatgcttacaaaaaggcagatccccaagaggctatcaactgcttaaatgcagccatcgacatttacacagacatgggaaggtttacaattgcagccaagcaccacattactattgcagagatctatgagactgaacttgtagacattgagaaggctattgcacattatgaacaatctgctgattattacaaaggagaagaatccaacagctcagcaaacaagtgtctgctgaaggtggcagcatatgctgcccagcttgagcagtaccagaaagccattgagatctatgagcaggttggggcaaacacaatggataatcctttgttgaaatacagtgcaaaggattacttcttcaaagctgccctctgccacttcatagtagacgagttgaatgccaagcttgctcttgagaaatatgaggaaatgtttccagcatttactgattcaagagaatgtaaattattgaaaaaactcctagaagctcatgaagaacagaacagtgaagaacagtctccttccacaaaaccatggcgtcgctcaaatgtagcaccgtcgtctgcgtgatctgcttggagaagcccaaataccgctgtccagcctgccgcgtgccctaaacagtgcaaccctgaaactcgtcctgttgagaaaaaaataagatcagctcttcctaccaaaaccgtaaagcctgtggaaaacaaagatgatgatgactctatagctgattttctcaatagtgatgaggaagaagacagagtttctttgcagaatttaaagaatttagatggactctcgtcctgtcacccaggctggagtgcagcggcgcaatctcggctcactgcaacctctccctcccagattcaagcaattctcatgcctcagcctcccgagcagctgggactacaggcgcctgccactacgcccaaccaatttttgtatttttagtagagatggggtttcgccatgttggccaggctggtcttgaactcctgacctcaggtgatacacccgcctcgacttcccaaagtactgggattataggcgtgagccaccgctccaggccctaagctaaactttcatcacctcctgctcctgactcatctaaagccttggttctcacagtgtggttcatggagcatcagaatcagctgggagcttgctagaaacgcagcattgcatttggaaatgggactagaagatttagagatgctgaaataattagaagcagtttttaaaaagataaagggctctggaagattcccagttataacaaaataaataatccaaacctgcagctgattgggacatgcagccctctggtttacccagtagggttagggatggatcttgtcccagcctcagtctcattcccgctgtgaacttgtaggctttgctcctgctgttctcaggaacaaagctgtcatggccatcacacacaacgtacctgaggcagcgctcggatggacgtgacaccagcctggtcttgtgctgtctggacagtgtagctactggggctgcccctggggagctggaggcaagcccagaccactaatttcctctgaaagctgcctacacccatagccgtattggccaggaccagtcccaggggccagaggcggattattgcctccaggagcctggtctgcagcggcgaggtgctcagggaacagggagcttgagagaagtgtttttcttccacaccatccagctctttagcagcaaggcaggccattctgatcttaaaaagcaaatatccctttatagctttagatttatctagccctcttagcagaaaatgaaaatcaaaactatctttaacaaatcatcttaacaaggtgaactgaaggcacctggttgcaaacagctggctgccctgaaccaaactggttccatatgccacaagtctatacaccccaggcaactgtgcttaggccttacatatgctacttgaaaacaagataagagtccatcaagatataactgatatgccataaaacccagtcttctaaagtgtacatcccagagtttggtatattcccagagttgcttataccactcttcacctacataaccaccctgcagggtaggtgttactgtgcccactgcatacatgaggaatatgaggctcagagaggctaaacaacctgcccaaggccacctgcattgcagtggcagagccagcattcccactcgggtccatctggtccccaaaattgatccactgcccaccccgacttcttgggtcttacttactctccacttctgccatgcacgcttgatgactgtggcagctgcatgcagcctctggatgtgtttccgagttaaccaggaacgaatggctaagaggtttgcccagaaacaggaaagagataataaaggggccattagagctgtcagtgacctcgctgcagcagcaccacagttgctgtcaaagtttcaaatacgtttttttttttttcaataaattgctacaaataaggttctaaaatc

SEQ ID NO: 1320 - DNA, 3364 bp, Homo sapiens
tgacgcccccttctcggccgccagccctccacacctcatctgccttgctccacctccctagtgcacccgctccagccccgtctgcccaggagggcgcttggatttccttctccgcggcgcgtatctaacccttcctgcatgtatttcactgcaggctgaagaaagctcagtctcaattgtgtttcctgcctgtcagcctcttgcctcctaaacgtgtaccatttccacttgatgtcatcacgcagaaggggtgaaagagactcggtgacagatacagaaatgaacacacctgtgagtactggatgcctgtgagcttgccattacctgcactgcaaagacacagggcggtggcctctgagaagcagctccttccccttcaccttggccttgcccttcctgctcacggtccaccatggagacgctgtcccaggactctctgctggaatgtcagatctgtttcaattactacagcccccggcgcaggcccaagttgctggactgcaagcacacctgctgttcagtgtgcctgcagcagatgaggaccagccagaaggatgtgcggtgcccctggtgccgcggtgtcaccaagctgcctcccggcttctccgtgtcgcagctcccggacgacccggaggtcctggctgtcatcgccattccacacacttccgaacacaccccggtcttcatcaaacttcccagcaatgggtgctacatgctgcccctgcccatctccaaggagcgtgcgctgctgcccggagacatgggctgccgcctgctgcccgggagccagcagaagtccgtcaccgtggtgaccatccctgctgaacagcagcctctgcaaggtggggctccccaggaggcggtggaggaggagcaggacaggcggggcgtggtgaaaagctccacctggtcgggggtgtgcactgtcatcttggtggcttgcgtcttggtcttcctcctcggcatcgtgcttcacaacatgtcttgcatttctaagcgcttcactgtgatatcctgtggctgaagagggctgcagggaagtctcttgtgggtgccaacttaggggttgagcaggttgatgatgagatcccagtgagaagatggggggcaacactgaccatttggtgctgagcgctggcctctgggttgcctcttgattaccccaagacagacacaaagggcagaaggtgcggtctcaacaagataccaggtgaattgttctgagtgttgatggcaacagcttggaagatgattgcatgcatcctcataatcatgtattcaatggactgtaatttatgatttttcaaaatcatgttacaagatagacatattctacttagacgttaaactgtacaagtgcgtacaatgtgaccttctctaaatgcggtagattcaaacaaagatgctctgtagacaagtagaattaaacctgcgaatccgtgtaaaaattcagtgaagacatgcactgctggcttctttattttttttttctttttattgaaacccagtcttcatttagttgctaaggcttttaatacattttgaatggcaccaaaacaaaataagtcaaaatggacagtcattttatttggaggaaatatttgaacaagtgtctccaatgtgttgtgttttgtcatgaaccttcattttcttcacttgtaattagagcttgctacgtgtttatggaactgaaagctcaacaggggagcaataaaccgagaaatcatgagaaatgtctaatcccatgggaaaacctgtatgccgattttcctcaagccatctcacaaaataagaatttcaaatgtaaatattgtgtatttgtgtgtgtatgtgtgtgtgtctaatttgatttacctcaggtgtttgagtctttgctgaagaatcctgggatgaagacttcattgggcatgaatgagtcaagtctctgaagcggtggccacttcttggacatcttgacccagcgagtggtctcctacacgtcacctgcaacactcgctcctcttctgtgtatttaagtcctgcattttgtaagaggcaaatggagagtaacagaagagtgtcttttctcctggttttggagtcttgcactggccatgagtgttgtgactgatggtcaacccaggcgggcattttaataaatggcctgtgattcttttttgaaagatgctcttccacaagagttaagccagttagaattcctgtttcctcttgttgatatgagagaagatctcctgtattttaacacgtttttaccaagaaaggtggcaaggtaaactaacagctcaaattcccaatataagtggaccagttcctcataaactgtcaaatgttcttaaatgtgtaatgatctatagatgctcatgaagaaagatctgctacaagtacgtgataaattcctatccctgggtgcatgtgcattcagaaatagctgtgagctttacagctctcatctaacttcttttatggaattcatgaagcaagtggtatgtgacaaggactccacttataaatataactgtttttatgttccactgaatccctgaaaatggtgaggagggttggggggaagtgaaggaaagacaagcagggctaattccaaaaagcaaggctagaaaatagccctgtgaggtcaagacaatttaatttatttacatgctgtctgttatcttcaagcagcacaaaatatgcatataaaagtgatggaattaatgtgaaataaaacaaaaatataatggctagaatacaaagctaatactgctaattggcatgagaattcaacataaaattgtgagctctgatttttcaaattgatcataaaacctttaggaaatgtatttgaaagctcaaaatagaaattaggttaaaatgccattttattgtgtaagctcttgggcattatacaacaaataatctaggatttatttggtattaataatttaggtgtcatattagctgaatactatcctctattacatttcgaatagactttgcccttgcaattttaagctatgccatattcagattaattttgtgagtgatatctgcatatgtttctgtacagtgtgaaatgactgaccctgtagtatagtacgtgatagagttctacttgttaaagtaggttagatatagacactaatgtgtgtgatgatagtgtcctgtgtttcttagtgcaaatctgtagagtaaaaatgtccatagaacttttacttaaaaacaatcccatgctagagttgccattaagcagtgcaaaattaatcggctgtatggtagattcttgaccttaaatttaacaacaacaaccaaaatcagattttttttgtgagtcttactgacctaagaaacattgtttaaattgtttaaatgg

SEQ ID NO: 1321 - DNA, 2306 bp, Homo sapiens
atgaagactgtgaaagaagaagaatggaatgtttggatgaaatgtccaatcttgaaaaacagtttaccgatctcaaagatcaactttataaagaacgattaagtcaggtggatgcaaaactacaagaagtcatagctggaaaagcaccagaatacttggaaccgctggcaactttacaggaaaatatgcaaattcgtacaaaggtagcaggaatctatagagagctctgcttagaatctgtaaagaacaaatatgaatgtgaaattcaagcttctcgccagcattgtgagagcgaaaagctgttgctatatgatacagtccagagtgaactagaggagaagataagaaggcttgaagaggataggcacagcattgatattacctcagagctgtggaatgatgagcttcagtcaagaaaaaagaggaaggatcctttcagtcctgacaaaaagaagccagttgttgtttcaggtccatatatagtttatatgctacaagatcttgatattcttgaagactggacaacaattaggaaggcaatggctacattggggccacacagagtgaaaacggaaccacctgtgaaactggaaaaacatctgcacagtgctagatctgaagagggaagactatattatgatggtgaatggtatatacgtggacaaacaatatgtattgataaaaaagatgaatgtcctacaagtgctgtaattacaacaattaaccatgatgaagtttggtttaagaggcctgatggaagcaaatctaagctttacatttcacagctacagaaaggaaaatattcaattaaacattcataatcatgatttaagtgttatctaaatttaccttattagtgttaccaaatgtaagtgccatgagagtaaaaaaatgtattcaataacttaatattctcactgaatcatgagagaatgtgtatttgtaggtagtactctaaatagatctcattgatatgttattaaaagaaacagtaataaaaattttatcacgatccttacgttgatttgcctcttaggtccgatgaccaataggtattctgtatatggtaggggtttctttctaaacatttttctttggttttaaaaaaagttatgcaaatttgtcttatctttagtaaactatgactacatttatctgcaatttttaaaattttccatatctttgtcattcattgtgtgtttgtaaataaggccgatagaatgtttcctataaatggtttgtactagtacattagtgttaaaccagaactgaaatttaaacatatatatatatgaggatgtatatatggcatcatcagcttatttagaactgatggccataccttacaatcttgttttacccaaaattaagctattggggttgaaagctaaaaggagcacttttgtagaatagcaacttttcttttcctctttcttgattgtatggtggggtggtgacctatttttacaaattatacctaatgagtaaaattagtgtaaagtgataacatgcttctacctgtatttctagtgaccctttagcggcaggtatttatacctggtacttatgatgcagtatataagtggtgaacaataactgacagtattgtgcttgctgtacatgtctggtcttttgaaacagattttagtaagcattttccagaggtaaaactgtgtccttattctaattttattcctagggcaaagtagacagggattatttccttgaatctatttccaaattaatatttttttctttggtatttctacactttaaggccatttggtgcaatttagaaagtgttggcctcccttccgctagccacattcaaaattaacttccaaaacctcaggaacagtacaaagaattgaaaccctcaatatggcagcacagccggctgtagtgtatatttagggtacaccaaatcaggtattcctggtggtcttgtgcactttaatttctgttacaatgagttaagaggatgaggaagaaatctacttattaacacttactgcagaaatgtctgcattattccgtttgttttcttattattttacctctccaaacatcttcctgtgcagatcactacttcatagttgccaaattttaaaacacttaactgctgaaattcagtgtcagcaaagtgatattacgttgttctgtttctaattaaccttagcaaatgtacataatgtcaaaacccaatagtatttgacagtacttatgtatacaatgtttgataagcatttttaataagatttgtatttttaaatttagtatataataaaaagatgtgtttcagtgtg

SEQ ID NO: 1322 - DNA, 2523 bp, Homo sapiens
aatgcaagcagatgaagaggaaagaactgagcagcagtatttcaggattctcaataaggcatcaatgaaaaaaggtcaaaactgtgatccctgctacttgggaggctgagacacaagaattgcttgaatccaggaggcggaggttgcagtgaaccaagatcatgccactgaactccagcctgggtgacagagcaagagtctgtctcaaaaaaaaaaagaaaagaaaaagatattgcttagaaaagtaacttgagtcctgttgagcctaagtaaaggacaataatggaagtttctagtctgcaaaatatgaagatgcccctcagagacacagctgtgggtgcctctcacaagacatgttcaggaaaactgggctgttgctctggaattttcaatgagttattttacttgtttttgcctcagtttacagaaaataaactggcaacaatatctccttgttattgtgaggataaaataaaaggtgtgacatttctattttaaatgtataaaatgccgaaaaattggaggcaactggaaggtacagtagtggatgtgaggtagtaagggggaaaaaaggatatgtaaatcacctaagatgaaatagacattcagaaggccgtaacgtgaagtgtgagtgacactgattcgctaaaaatcctatatagtgtcttaaaacagcagcagtaacaacaacaaagtttatttgagaggaggaattctggaaaaaagcttctttcaaagaaaaaaaaagagtcttctagtgctcagacagttcgttcctctgcaaaggcgggttactctgttggggtccattatagttctgaggatgaataggacaggacaaggagatggttcctggcccctgttctcctgccacagatctgtcccacctcccaggctccatgcatacagtgacagagatggaaagcccagaaccagtccctttaatgcacttatttgcaaaacaagatgtcactatgcagcagagtgacagtcctttcccctggaactgtcccagagttctccaagctgaagccagggctacattcaccatctcagactcctgctgagctaagtaaccaccctctcctaccttctcttcaggagccctggcacccttgctctggggagagtttgaagagcaacctgaaagttcccacagtttttcctcaaatctgggtttccatgagcatgggccaccagtcgggagagccacatgcctgcccttgcctggctcaagactgtcactctgtcagattcatatcgctctctgacccttagccttccagtctggatcttgaccttgaactggactctgtaggaagttcttaacattaaaggaagttatttatctcttttcaactaacccaagcactttctagcaccttttagcagtttaagctctatgactccattggataaaatgctggggagcaggacattgacacagtcacagaatatcacacacggaatcctcattcattcccccagggaaacagcacctgtagaagacaaatctggtagacactactgtgacaggtgattttatatgtcagcttgactaggccacaggatgtgtagacatttgtcaaatttttttttatatgtctgtgaggatgtttctggatgagattaacattgaatcagtagactgagtaaagaagaccgccctccccagtgggggtgtccctcatccaacctgtggaagccctacatagaacaaaaaggctgaacctcccccaaaatacggtgatctcaagctgcctgacttctggtgctggaacattgttctttttctgccttccgactcaaactgaaaatcagctcatcttgtatcctgagtctgctggcttccagactgaactatacattgactctcccaggtttccagcttgcaactgctggtcttgggacttctcagcctccataatcatgcattagccaatttctatatagatctagaaattcatatatatatatgtgtgtgtgtgtgtgtatgtgtgtgtgtgtgtgtacgcatatatatacagtcatgaatcactgagcagtgggcataccttctgagaaatgtgtcattaggcactgttatcattgtgtgaacatcatagtgtacttacacacacctagacggtatagcctacaacacacctaggctatatagtataacttgttgctggtagattacaaacctgtacaacctgttactgtactgaatactgtaggcaattgtaaaacaatggtaagtatttgtgtatctaaacatagctaaccatagaaaaggtacagtaaaaatactgtataagagataaaacatggtgtgcctgtataggttgcttaccataaataaagcttgcaggttggaagttactctgggtgagtcagtgagtaaatgatgagtgaatgtgaggcccttggacatcactgtaccctactgtagactttataaacactgtacacttaggttaccctaaatctattttaaaattattttctttcttcaataataaattacccttagcttactgt

SEQ ID NO: 1323 - DNA, 2501 bp, Homo sapiens
gaaaagcaccttcttctgggcctgcgaaacatcagaaagggattgcaggggcctggagggggctgcctgcagggctctccagatacgcgtggacaagccctgtctggaggatggggatgctggctccgggaccgctgcagggtcgccgacccaggaagggtcacaaaggacaagaggacgccgtggcgcccgggtgcaaggccagcgggcgcggcagccgcgtcacccacctcctggggtacccgacgcagaacgtcagccgctccctgcgccgcaagtacgcgcctcccccctgcggcggccccgaggacgtggccctggcgccctgcaccgccgccgccgcctgcgaagcgggcccctccccggtctacgtcaaggtcaagagcgcggagccggctgactgcgccgaggggccggtgcagtgctagaacggcctcttggtctccagcccacactgtgaagagccttgtgcccacagctgtgcacatcctgggcttcctccacaccttgtccataaactgcccctcagctaccttcagacccaggatacagacgcagcctccagaagaataaatgctccattagcagctggctggagctggctgaggctctggctggtgactctggcctctggtgtagacttccctcaggtgagtgcatggatgagagctctaccttctcctgactgcccaggcctcaggacaacaggagaacagatgcaaaaactattgctcaaggaaaataaagtgaaaacgaggaaaagcaaaagaagatctggagagggctctcacctgaccacaagcatcctggagcaatgagtttcaggcaggaagactcatcctgagctgagctgcttttcttgaagttgtgcaagaacgtcctgttggctggggcaaattcagtatttcttttcctggccactgtgctggagcgtgaggaaagactctccaccctcactcccagatcctgcaggaggcgtgagagcggatggagatggtgaggatgtctattaatatggtgtttcctgcaaaacggtgcccatctcaaccatgggttgtcaaccatcctcggtgtctacaactgcaatttacctttgagggcccatgaactctgattacctgaaagtccttatgccagaaagagaaacccctgtcccccacctctcactttcacctatttctagaccttttcttacagcaatgccttggccctcaggaagcatcagatctcaaactgcagggtctggggctgaagctgatgctggcatgggtgactcagagttcctctattagttcaaatatgtaatatcttttagagcctagggctcaggctggaggcaattccttggtgccagttggttaatactttatgaatagtggtgggggagggaatgccttggactattaatgtccccatggatctggatcctggagaacttccagtgtcctggatggaatgttctgcttggctcatcttgcccagagaagagccaggatatgagaagatgggagagggaagggggaggtgtgaaacgtgctggtgcttcctgtcctcgtggtgtgatggctgcccaggctgctccttcgaggcaggacaggattcccatgggagatatgaggaccatggtgatttccaggcaccagttatgtcccagagcatcgtgtgcctgtgcagtggggttactgatagtccaggcatcagttcatattgtcctttatggcagatcctgcacaagggggttctctgtctctggacccactctgtcagcatggacatcctttttctttttccctggtaaggacatcagaaagaaagttacccctccagtgtttggagtcttggaatccttggcctgcctgcaggcctctgaatcctcagtgtgttagcccaaggtcaccttaggtaaaggaacatttctcctggtcttccaacaccctggaaagggaggctcttcaagaataggaaattcttcctagtatctaaccttggcctgcaactatgccatacatttaattgtagaaggtatggaaagttaggactgtggtggacccagttaaatcactggacagaagccatgaggcagagccagaaccagcttctggactccctgcatggagctttctactatcccaggttgttgggtcccttctcagtggccaaagatgctattttatgagccttgaggacgtgacactaagtgaaaaaagcctggccaaagggccacatagtgtatagttctatttatatgaaatgtccaggaaagacaaaagcatagaggcagaaagcagactagtgctgtgggaggaatgggggatttgggaggtgatggctaaggggttatggggttttgggggaggtaatagaaatgttttaaaattggttgtgaaggtggatgcccaactctgcgaatacactaaaaggcatcgaattgtatactttaaataggtgaattgtatgctatgtgaattatatctcaataaagctattttttccctgctgtt

SEQ ID NO: 1324 - DNA, 2682 bp, Homo sapiens
tttggcggggagggagggccgaacgggcgaggttgggctgccgtgctgctcggcggcgctgaggccaaatagttgcatcacatgtatctaatccgagagtctcatgcttctggtagctcctcagtgaccagctcctgctcactgccctcagaaagcccaaccctcaggcaatggcggccttgttcctgtctgccccaccccaagcctggagtgatctcgcagttggagcgaggggatgagccctgggtcctggatgttcagggcacctctgggaaagagcacctgagagtcaacagcccagctcttgggaccagaactgagtacaaggagttgacttcacaggagacatttggtgaggaagatccccagggatctgagccagtagaagcctgtgaccacatcagtaagtcagaggggagcctggaaaagctagtggagcagagaggccccagggcagtcacactgaccaacggggagagcagcagggagtctgggggaaacctcaggttgctgtcaagacctgttcctgatcagagacctcacaaatgtgatatatgtgagcaaagttttgaacagagatcatatctcaacaaccataagcgtgtacacaggtcaaaaaaaacaaatacagttcgtaactctggggaaatcttcagtgcaaacttagttgttaaagaagatcagaaaattcctactgggaaaaaattgcattattgcagttactgtgggaaaacattcaggtacagtgccaaccttgtcaagcatcagcggcttcacactgaagagaagccctacaaatgtgatgagtgtgggaaagccttcagccagagctgcgagttcatcaatcaccgaaggatgcactcaggagagattccctaccggtgtgacgagtgtgggaagacattcacccggaggcccaacctcatgaagcaccagaggattcacactggggagaaaccctacaagtgtggggagtgtgggaagcactttagcgcctactcttccctgatttatcaccagagaatccacaccggagagaaaccctataaatgtaatgactgcgggaaagccttcagtgatggctcaatccttatccgacatcgtcggactcacaccggagagaggccatttgagtgcaaggaatgtggcaaaggctttacacaaagttctaaccttatccaacatcagagaattcacactggagagaaaccctataaatgtaatgaatgtgagaaagctttcattcaaaaaaccaaactcgtggaacatcagagaagccacactggagagaagccctatgaatgcaatgactgtggcaaagttttcagccaaagcacacacctcatccagcaccagagaatccacacaggagagaagccctacaagtgcagcgagtgtgggaaggccttccacaacagttccagactcatccaccaccagaggctgcaccacggagagaaaccctacagatgcagcgattgcaagaaagccttcagccagagcacgtacttgattcagcaccggaggatccacaccggggagaagccctacaagtgcagcgagtgtgggaaggccttccggcacagttccaacatgtgtcagcatcagcggattcacctccgggaggacttctccatgtaacagtggcgcggtgtccgagggcagagtccagctgagcacttcctgcatgcgcccccggcacctgactctgccctttatgtattatccacacgatgttttcacagagtgaaaggacgtttctcattaaacaaacctcttttcttaaatcaaaagcagtgcatgttcattttagagaaattgagacagaaaagtgggcaaaaaaagaagcttctgtgatctctcccacttagaaaaaaaattcattgctgctgatttacgaatattttcgagacatactggagagcattttaaaaagaaaataccgtaatgcttgtcattgcagcacctaggatcttcacttttgctatttcctcaatatcagaaaattcacactgaagagagcaccatatattttaacatttttacatattgtaaatttaaaagcatcggccaggtgtggtggctcatgcctgtaataccagcattttgagaggccaaggtgggtggatcacttgaggtcaggagtttgagaccagcctggccaacatggtgaaaccccgtctctactaaaaatacaaaaattagccaggtgtggtggtgggtgcctgtaatcccagctactcgggaggctgaggcaggagcattgcttgaacctgggaggcggaggttgcagtgagccaagactgtgccactgtactccagcctgggtgacagagcgagacgctgtctcaaaaaataaatgaaacaaacttaacattcatactttttatgtcaatagagttgaagttgcctttaactgtggtgaaataacataatatgaaatttacaattttaaccatttttaagtgtacaattcagtggcattaagtacattcatggtgttgtgtaaccatcatcactgtgtatttccagaactgttttattactccaaacagaaaccctgtacctattaaataataactcttcatttcccccttctccctactgctggtaaccccaattctattttctgtctctttgaatttgcctattctaggaacataaatatgtgtggaatcatgc

SEQ ID NO: 1325 - DNA, 2827 bp, Homo sapiens
gttctggaggctgggttgagaggtcgccggtccgactgtcctcggcggttggtcagtgtgaatttgtgacagctgcagttgctccccgcccccgagcagccgaggtgcgtgggggaaggggaagaaggaaaaggtccgggtcgcgtttccgctcagtttttgccagggttgaggcgattccagagagcggcggaaaggataagcctcgacttagaagctaccgagttaccctaagaaaggagtctaccatggctcaagaatctcccaaaaattcagcagcagaaattccagtgactagtaatggagaagttgatgactctcgtgaacatagctttaatagggatttgaagcattcattaccatctggacttggtctctcagaaacccaaattacatctcatggctttgacaataccaaagagggtgttattgaagcaggagcatttcaaggtggccagagaacacagacaaaaagtggaccttgaacttgaagctcagattgatatattaagggataacaagaaaaaatatgaaaatattttaaaactggctcaaacattgtcgacccagcttttccagatggtacatacccaaaggcaacttggagatgcatttgctgacctgagtttgaagtcactagaacttcatgaagaatttggctataatgccgatacccagaaactgctggctaaaaatggagagactcttcttggggccattaattttttcattgctagtgtgaacactttggtgaataaaaccattgaagatacattaatgactgtgaaacagtatgaaagtgccaggattgaatatgatgcatatcgcactgatttggaagaactgaatcttggaccacgtgacgcaaacactctgccaaagattgagcagtcacagcatctcttccaagcacataaggaaaaatatgataaaatgcgcaatgatgtttctgtcaaattgaaatttctagaagaaaataaggttaaagtattgcacaatcagctggtccttttccacaatgccattgccgcttactttgctgggaatcagaagcagcttgaacagacacttaaacagttccatatcaaattgaaaacccctggagtggatgccccatcttggcttgaagaacagtaaaatcacagcggaaaataaaaagaaagtcgcgttgttatatttctaaaccaacctaacaagaattaagcagagttgggggaagtgggaggggtgacaagcattatagtgattcttgcacaaacagctttaatttttccctttttcatactttaacaattgaactgttaagggtggttttaatgtaaacatagtttctataatctgaacacaataattttcctttttgagaaatccttttgtattgtgagggttgatggctatttctgtagtttgaaaacatctaatagagatttgcactgacaagataaaaattcaaggtttttggtcctggaaatgagggccgattgtaacttttccaaagggaggtttacatgatttgtatcaacatcagatattttatatgtgaatatattaaacatctttaagagattcattttcatgtattaaagaaagaagaaactattttgcagagtaaagttatatggtgttcctgcagcgtccacacagaggcagcagctctaatgaatgattagcttgtggagttgtggcaaatacctttttaaaaatgaatctgtaccactgtaattttatttagacttttttttaaagacacagaaatcacactgtcatttctgtgaggcttttaagcttatgaatttgcttcacccaaagtcattggacagttacatttgcaatttcttttggttcataacaaaacctgcttaagagaatttttttttttgacaggtggacgtgggaatggaaattcttaatggtttctggagtagaaatctgtacttagaaaactagtttttgggtcagttccattttgatagaagtgaatacatagacagcttttattgacttccatatgtaacaataccgtttaagccttaaatcacagatatgtgccttctcagatacagtaattcttgttcaaccaatgtacaaaatccataaagaaacccctgttggataatgtttgatgtgtctattccttccatggaatggagcactatgtatgaatgttgggtttctttgtacttgttaagccacatttgaggtttatggtaaaaatcatcttttgagtttgctctttggtttttcttcattccttttgaggattgggaaaacagaaagattctttgatttgggtaatgaagaggtaatttgggacagtgtggtggtaccaggaagaaagaggattggaaaggccagtactgttttagttgctcggcactgttggttttgttttaatgtggttgccctgtccactacatggttctatcagtagtgtaatccattttcaatgtaaagctcttttagtttttgtcatagacataaattaatattttgagaggcatccctcacctgttcatttcttctgtgttgaaatgaagtacttaaaattaccgttatacatgaactttgtggactgtaagatttgttatatatgttcaaatgccttttagctggctttttaattaatatgcctgttttgagtgcttaatacaatgtaatgtgattgtaaatcatacctattttaaatcattccttcctgcatatttgtactcagagagccttattttattcttccagcagaattactacttgtgatagttcatttacattccccagaatgtgcctctagtgtgaattttgtattcttattaaacgtgtttgctgcagt

SEQ ID NO: 1326 - DNA, 3056 bp, Homo sapiens
ctgggaccgtgagagccgtggtactgcagactggattcaacactgcaaagggagaccttgtgagatccattctctaccctaagccagtgaattttcagttgtacagggatgccatcaggtccctcctgtgccttgtaggaacagccaccattgggatgatctatactctgtgtgtctatgtgcttagcggggaacctccagaggaggtggtgaggaaagcccttgacgtcatcacaattgcggttcctccggctctacctgctgctctgaccacaggcattatctatgcccagaggaggctgaagaagagaggcatcttctgcattagcccccagaggatcaacgtatgtggacagttaaaccttgtctgctttgacaagacaggcaccttaacaagggacggcttggacctctggggagtcgtgtcctgtgataggaatggctttcaggaagttcacagctttgcctcaggccaggctttgccatggggcccactgtgtgcagcgatggccagctgccactctctgatccttcttgatgggaccatccagggagaccctctggacctcaaaatgtttgaagccaccacctgggaaatggctttttctggggacgatttccacatcaagggagtgccggcacatgccatggtagttaagccctgcagaacagccagccaggtcccagtggaaggaattgcaatcctgcatcagttcccattctcatcggcactgcaaagaatgacagtcattgtccaagagatgggaggtgaccgactggcattcatgaaaggtgcaccagagagggtggccagcttttgccagcctgagacagtacccactagttttgttagcgaacttcagatttacacgacacagggcttccgagtcatagcactggcctacaagaagctggaaaatgaccatcacgctactaccttgacgagggagacggtagaatcagacctgatatttctggggctgctgatcttggagaatcgattgaaggaagagacaaaacctgtcttggaagagctcatctcagcccggataaggactgtaatgatcacaggtgacaatcttcagactgcaataacagtggccagaaaatctggaatggtttctgaaagccagaaagtcattctcattgaggcaaatgaaaccaccgggtcctcatcagcacctatatcttggacgttagtagaagagaagaaacacattatgtatgggaatcaggacaattacattaacatcagggatgaagtctctgataaaggcagagaaggaagttaccattttgccctaactggaaaatcctttcatgttataagtcaacatttcagcagcctactgccaaagatattgatcaatgggaccatctttgcaagaatgtctcctgggcagaagtccagtctggtggaagaatttcagaaactggattactttgtaggtatgtgtggtgatggagccaatgactgtggggctctgaaaatggctcatgtgggcatctcattatcagagcaggaggcatctgtggcctcacctttcacttccaaaactccaaacattgagtgcgtacctcaccttatcaaggaaggacgtgcagctctcgttacctccttttgcatgtttaagtacatggctctgtacagcatgattcagagacaaacagcctttcaaattaccagtttctgttccaggatctggccattacaactcttattggtgtaacaatgaatctgaatggtgcctaccctaagctggtgcctttcagacctgcaggacggctgatctctccacctctgctactctctgtgattttcaacattcttctcagcctggccatgcatattgcaggcttcatcctggttcagaggcagccttggtattccgtggagatacacagtgcctgcacagtacaaaatgaaagcatcttagagttaaccatgtctccaactgctccagaaaaaatggaaagtaatagcaccttcacaagttttgagaacactacagtctggttcttgggaacaatcaactgtatcactgtggctcttgtgttctctaaaggaaaaccatatagacagccaacttatacaaactatatatttgtccttgtgctgataatacagcttggtgtatgtctattcattctatttgctgatataccagaattatatagacgtttggatctgctctgcactcccgtcctgtggagggcctccattgtcatcatgctcagcttgaatttcattgtgtcccttgtggccgaggaggctgttattgaaaatcgagccctgtggatgatgattaaaagatgtttcggctatcagtcaaaaagccagtatcggatatggcagagggacttggcaaatgaccctagttggcccccgctaaaccaaacctcccactctgacatgccggagtgtggcagaggagtgtcttacagcaatccagtatttgagagcaatgaagaacaactctgaaggacatgtgatatccaagttgatattacagagaaacaatgacaaaagggaccagtttcattgattttaagaaatgagactcttgtaacatcagctggagttttggggctacctatcaaatcatggtgacaaactaaagtctgtttgataaaatactgtctacagagaagaacattgacccagaagagtgctttcctcttggcttctgaaggtattagaggcattcagtgaaggcaagaatgggccaagaatttctatgggccaagagacaagcaggctaaaggggaaaaatatgtgatctttcctcttaggacaggacaatactttcctttttataaaaatgagttgaggggaagtagtactgtgtatgctcacggagttgtaatttttgaatttttacttcatcgatggaaaaactaatgcgtgggaaacattacaccaatctttactgtctgggttccttttctctgtagtacttttcagatttgaggctttttcttctgtttctggccttacccaacatattgttaaggataagcttagcctatgctgcaataaaaaacaactctcagat

SEQ ID NO: 1327 - DNA, 2850 bp, Homo sapiens
aattaattagaggcttctcatctgccttggtcctgagtgttccaggagctctttggtttggcttcttttgatggaagaatcctgcttcacagactgagtggcaggcctcctcctgagggcagcccctggagcaccaggaagcgttgccgctggctgtgccctcccctggcactctgactgcatgctgatgagcaaggcaggcaggtctgagaggcgaaacgaatctcccggcagtgcttggaagtgtctgtggggtctcctcctcccagatccccaagatctgtgtcactggtcgattttgaactttaggtacatgtgttcttttcaaaaattcagagaatcgtcatgtgccacagaagctcagcctgggcttcagcaattgacaaaatttgaagaaatattaaacaaaaataacaaaaaaagaaacaaccttggccttaatgtcaataaaagggagttgtgtctgttaagtggtcttttcatagaatcgtccattagaaatgtgtgcctgtgtttagcttcctatcagtgggctttaaattgtataccgagtcatagatacgccactgataactaaaactagatcagggctggtgaagaaggttaggtgttttaggtacattccagctgtcataggaagatcacagaaatgaggaggctgttttcctctgattctcctcggccgaccacctgtccaatgctgctggtttcgcagagcgaccggttggagatgtctgaggaagaaagttcaaggtgtagggatagtgtgtttggaatttgactttccatttctgagacccaagggggcgtagatgtagtggcaagtgtggcgatgtttactctcccttcctgaaccgctctggtctgctcctcagagagggcagcggtgccaggcctcaggtcagggagaatgtctgtgacttagctgcagactaggagactgccctgctaactaattagcaagcagctttgacctcattaatatataaaagcagctctcagtatattccgtgtcgtgtgtgtgtgtggccaaagcccccaagggtggcaagtgccaccttcgctgtgctagagttgtgttgtaggaattagtcagggagttgttgtgaaaaaaaaaaaccccagtgcttgtgagggaactcaaaatagttaccagaaaaataatatttgccaatatgacgtgtatattgctcagcacactctgtatctcctgtccttaaaatcctcttgtccccggcattctgacacactgggctgccgtccggtgtcaagccccggcgcaggcttgctcttcttttacaatgaaaggggtgaagagtgagggtctcacagttccttacctcaaagtccctttaggtccttctggtttggaggaagtggagcctccacgaactctctcttactccgaccattcaggcagcaaagtctctgcttacatcattttggttgtcaccttggggctgagtgagaagtcttttgtaaattaattcggcgtgtgctacatgagccataattattaacagaacaggaatatcagaaacgaagttgttgatcaggcccactgcgaccttcctttctatctcagggtttaaaactgtgaggaaggagaagtatgaaggaaggtagaaaatgctggtgggtctccgtgtttatgagtcacagattttgaaagctatcaggaaatgactagagtggatcctggcactgattccaactctttgccagctaatcttaacatttagcagaaagctctagcaacatgatcttaattgtatccagaggatttgccaatgtatgttcagtctctcaagatttggcattagtcagacatgttgatgctagccacaatttggatttctccatagaataatcatttatttttgcagatcaaataaatcagagtttacaatgcacaggggatcatttatttagcattcccttgctagaagcccgtgtgccaggcactgtgctaggcgtggtgggcagtataaagaaatctgtctccacagccacacaaccagagggtgcacatgacttgatccctatgaccaagtcaagttggtgttgcccaaatcgcagtttgacataagggtcccacaggcttccccaccccccgcccccactcactgccccagggaccaacttcctaccctcacccaaggctttagaggacctgtagcatgtctttttcaacctgtcagtatccccttctgcttaacacacccactgagaaaaccctgtttgtagttcactttgactcttgaatgtgtcactttactggcaagagacttcctttgatttctactgtttacaaataaaactcagccagtctcattctatatcccaaacgtactgaatgaaactgattttggttccacaagcagtgtttgggtgttgccttcctgaaggtgaccaagcttccaaagctcgtcccactggcctctgtacatttccctgtggttctccgtccttccctggcgagggagctgggactgaagctttcccgctgtttccctgcctgcaaaagcagccccaagagctgcgcattggcttccctcagcaatctgtcctgtctgtgctcccattcggtccacatagctttctttgcctctctgaggcagacaggaagtgtctaattacgattttgtggcctgggttttgttgcataccgcagattgtctatgtaacatgtagcgcacacctctcttggtgctatttcattcctgctgtaagagaatgacaaaaatattcatgtatagccaattgattgtgacgtgcttgtggtctgtgcttgctcagaaaaacaaacaaacaaacagtttttccaattataaataaatgctaaagacg

SEQ ID NO: 1328 - DNA, 2426 bp, Homo sapiens
cttgttaactctggaaattctgagctgtcattttccacatgcgaggagcaggttacagacccaggtgcacatgttggtcctgggttgagggtgccaggtgcttccttgccccgggagaagcacctgagtctccaggcgggcctctgaccgccgtgactgagcatttgggccaccccgggagcccagccctgtcctgtgtctctcctgcctggtgagcagcggtgaggtgcgggtgcatccagccgaggtgcagagcccaggtttgcagcagggtttctcccgccgcccctgatgagacacagactagcaaggactgtctgtcccagccgggatttgtcactctgcctccctccgttagagagtggagaggcctggaaggtccccgcggcctgggtcttgcagatggcaccagcaaaggccaccagccactccccgctgccgtcacctgtcacacagcagcagtcccgcggctcttcccgcgaggcccttcacgtgccgccgaaggccgggctccctagacttcatggtcgtgtttgcatattctgttgctgtgatctgagacggcccctctcagaagcgggtgccacaacccgctggtgggatgagtgggtcacccaggtgcgggtcccttggtgtgtggagggtggggtaggctccttgtaactgcagtgtggctgacgggatgtgccatcctgtttagctgagaatttggggtcagcgggcttagtgccaggaaggctgtggccaagtgccatgtctgcttcaggacaaaggtgtggatttgtttccctgagagggggtttatgtggagcgtggtacgggaggcacacgtgctgctggcttgtcggcacacaggtgggcgggtggatgtgagtgggcgcggcttggcagtagctcccattttacatgtcagttgctcctgggcagagcctgggtgcagggatgcaggaggagggcttcactctcgctggctgtaccttaggagcttcagccacatgggtggaaggggcatgtgtttgtcaaaattcatcaaaatgttcaaacctcggatctttgtattttgtgctttgtaagttacagctcagtaaaaaatgatagcaaaaaggacacccactcttaggcccagcagttctacttctgggaatttatcgtgtaggtcgagttgatcaaaaaaaggtgtaaacgtgctcagatgcatattgccaccgttacccaagagctggcgcagtaccagttcacgagcaggcgggggtgctgggcctgagctcagggcgtgcgggtgggagcagcgccaagtgcctccacccccttgaccccgcccgcgaggcatgagcggcaccgtggacacgtctgtagacgctgaggaaactgactgtcagggcggctcctagaggggcctagagcagggcgagcgcgcgtcctgactcatcccctagagcactcgctcgttcttttgttttgttttttgagacgcggtctggctctgtcgccaggctggagtgccgtggcgcgatctcggctcactgcaacctccgcctcccgggttcacgccattctcctgcctcaggctcccgagtagctggaactgggtgtgcaccaccgcgtccggctaatttttgtatttttagtagagacggggtttcgccgtgttggccaggatggtctccatctcttgacctcgtgatccgcctgcctcggcctcccaaagtgctgggatcgcaggcgtgagccacggcgcccggccgaagtcgctagttttttaaaaatcagatcagttttagaaaacagaaggcagtggaagagtctgtttgtcccgtgctctgccccttgagacacgcagctgagggtgcttagggtgccgttcgttaggcggctgctggtcaccgagagtctccttttggtttctcactccgtggtcatttgggtccctgcggcctcactgtgacccacgccggagcaagcctccgggtcctcctgtgccatcgcccctgcccgtaacccctactcctcagacatggccatcccaggaagtgggggcccgctcagggcagcagccgggaggtgtggccagggccccccgcgtcacagcacacttggagcctgaggcagcccatcagccgggaggcgggccttctgctctctttctagagttttcagtgtcatgcgaataggggtgtttgccacagaaaacaggtcagcatcaaaagttacccctcttcagccttttagcatttgttttatgtccatataaacttcttcagtgtaatgtgttgtgtgttcatacttttattttttaaaaatcatgctgggccgggcgcggtggctcacgcctgtcatcccagcactttgggaggccgaggtgggcggatcgggaggtcaggagatcaagaccatcctggctaacacggtgaaaccctgtctctact

SEQ ID NO: 1329 - DNA, 3060 bp, Homo sapiens
gagtccctgctcggctgtctcggtggtcgccgccggggtctgagcccgggaagaccgaggttccagccgtcctcacctcaggaggacatagctttgtgcctttcaaagccctttctcatctatcatcagggactcggaagacgagccaggtttacagccctgccttgatgtgtagtgccgagttccttgaagaaaattattttatggacaatgtatgagtctgttttcgtgctgctgataaagacatacccagactcacagttctacgtggctggggaggcctcacaatcgtgatggaaggtgaaagacacgtcttacatggccacagggagaatgagagtccctgtacagaaccatcagatcacatgagacttactcactgccatgagaacagcatgggggaaaccgcccccatgattcagttatctcccaccgggtccctcccacaacacgtggaaattatgggagctataattcaagatgagatttgagtggggacacagccagaccatatcagacaagaatcatcttctcaaatttggggtgcgtggctgagtgcacacacctgtgaaaactgcgggatgaatgcattacaacttcctggaacaagtcattttacctaagtaattggaaggggaaagccaactgatctgcttatctgccctgccttaccagctctctgcccatctctcagtgtggaccctaaagggggaggaaaggatgccttctgcacgggggaaatccaaatccaaggcacctataacatttggggacttagccatctacttctcccaggaggagtgggaatggctgagccccattcagaaggatttgtatgaagatgtcatgttggagaattaccggaacctggtctcgcttggtctttcctttcggagaccaaatgtgatcaccttattggagaaagggaaagcaccctggatggtagagccagtaagaagacgccgggctcctgactcggggtctaaatgtgagaccaagaagttacctccaaatcaatgcaacaaatctgggcaaagcatctgccagaaactagtttctgcacaacaaaaagctcctacacgaaagagtggctgcaacaaaaattcagtcctagtaaaacctaagaaagggcattcagggaagaaacctttaaaatgtaatgactgtggtaaaacctttagtcgaagcttctctcttaaacttcatcagaacattcatacgggagagaagccttttgaatgcagtaattgtagaaaagctttcagacagatctcatccatcctacttcatcagagaattcacagtggaaagaaaagccatgaatgcaataaatgtggggaaagcttcaatcaaagaacaacccttattctacatatgagaattcatgatggaaaggaaattcttgactgtgggaaggccttgagtcaatgtcagtctttcaatatacatcagaaaattcatgttgttgggaatgtctgccagtgcagaaagtgcggaagagccttcaatcagatgtcatcccttttacttcataagaaaattcacaatggaaagaaaacacataaatataataaatgtgggagaggcttcaaaaagaaatcagtctttgttgtacataaaagaattcatgctggagagaaaatccctgaaaatgcgaaggccttaagtcagagtctacagcaaagaagtcaccatttagagaatccttttaaatgcagaaaatgtgggaaattatttaataggatttcacccctgatgcttcaccagagaattcacacttcagagaaaccgtacaaatgtgataaatgtgataagttcttcaggcggctttcaacccttattctgcatctaagaattcataatggagaaaaactatacagatgcaataaatgtgagaaggtctgcaatcggcattcatcccttattcaacatcagaaagttcatacaaagaaaaagaaactatttgagtgtaaggaatgtgggaagatgttttctggaactgcaaaccttaaaatacatcagaatattcattctgaagagaaacctttcaaatgcaataaatgtagtaaagttttcggccgccaatcatttcttattgaacatcaaagaattcatactggagaaaaaccctaccagtgtgaggaatgtggaaaagccttcagccaccgaatatctctcacacgacataagagaattcatactgaagatagaccctatgaatgtgatcagtgtgggaaggccttcagccagagtgcacacctcgcccaacatgaaagaattcacactggagagaagccatatacatgcaaaacatgtggtaaggcctttagtcagcgcacatctcttattctacatgaaagaagtcatactggagagaaaccctatgaatgtaatgaatgtgggaaggcatttagcagtggctcagaccttattcgacatcagagaagtcattcttcagagaaaccctatgaatgtagtaaatgtgggaaggcatatagtcggagttcatccctgattcgacatcagaatacacattctgaagaaaaagcctaaggttgttttaaatctataaaatcaacgaatgaggctatcaaacatatggcgaatatgtatttgtctataatgtaaattttgtgtatatgggaccatttgatgatatgtcccactttgaaagccaaagagcaaaagtcattggtgattttgacctcaggatttgaaattaactgaaggaaactcagaagtttggtcagtcattgtgaatgaagatcatttttcatttgataagaattactggctgggcgcagtggcttacacctgtaaccccagcactttgggaggctgagacaggcggatcacgaggtcaagagtttgagaccacggtgaaaccctgtctctactaaaaaatacaaaattagctgggcgtggtggtgcgcacctgtaatctcagctactggagaggctgaggcaggagaatcgcttgaacccaggaggtgggggttgcaccgagcagagattgcaccactgcactccagtctgggcaacagagcaagactctgtgtc

SEQ ID NO: 1330 - DNA, 2607 bp, Homo sapiens
ggccctagagttaatcccatcagccgagatgaacctctagtcttgctttgaaaaaatcattctgtgtaactcttgactgtgactaagttcctaatacacctgttgggacgatcactgacaccgtataccatttgagaggtacttttcttgacccaatactggtgattagagaagagaggtatcttggtttttggttttttttctttgatcattatgaacattggcttttcacccctgaagtgaaaatgttgaaaactgagtcttcaggtgaacgaaccactctcagaagtgcctctcctcacaggaatgcatatcgaactgagtttcaggcactgaaaagtacctttgacaaacccaagtcagatggggaacaaaaaacaaaagaaggtgagggctcccagcagagcagggggaggaaatatggctccaatgtcaacagaattaaaaacctatttatgcagatgggtatggaacccaacgagaatgctgcagtcattgccaaaacaagggggaaaggtggacattcatctcctcagagaagaatgaagcccaaagaatttctggaaaaaacagatggctcagttgttaagttggagtcttctgtttctgaacgaattagtagatttgacactatgtacgatggcccttcatattccaagttcactgagactcgaaagatgtttgagagaagtgtgcatgaatcaggacagaacaaccgctattccccaaagaaagagaaagctggagggagtgaacctcaggatgaatggggaggttccaagtccaacagaggcagtactgattccttggacagccttagctcccgaactgaggctgtctccccaactgtgagtcaactgagtgcagtatttgagaacactgattctcccagtgccatcatttctgagaaggctgaagacaatgaatactcagtgactgggcattatcccttgaatttaccatctgttactgttacaaatcttgacacatttggtcacctgaaggattctaattcctggcctccttcaaacaagcgaggtgttgatacagaggatgctcacaagagtaatgcaactccagtaccagaagtggcttctaaaagtacctctctagcttcgatacctggtgaagagatccagcagagcaaggaacccgaggactccacatctaatcaacagactcccgacagcattgacaaagatggtcctgaagaaccttgtgctgaaagtaaggcaatgccaaagtccgaaatcccttcaccacaaagccaactgttagaagatgctgaagctaatttggttggaagggaggcagcaaagcaacagaggaaagaacttgcaggtggtgatttcacctctcctgatgcttctgcatccagttgtggaaaagaagtacctgaagattcaaataattttgatggttcccatgtgtacatgcacagtgactataatgtgtatagggtgagatccaggtataattcagactggggagagacaggcactgagcaggatgaggaggaagatagtgatgagaacagttactatcagcctgatatggagtactcggaaattgttggattgccagaagaagaagaaatcccagcaaataggaaaattaagtttagtagtgctcctattaaggttttcaacacatactccaatgaagactatgacaggagaaatgacgaagttgaccctgtggctgcttcagctgagtatgaacttgaaaaacgtgtagaaaagctggaacttttcccagtggagctagagaaagatgaggatggtcttggtataagtattattggaatgggtgttggagcagatgctggacttgaaaagctgggaatatttgtcaagacagtaacagaaggtggtgctgctcaacgggatggcagaatacaagtcaatgaccagattgtggaagtggatggaatcagcttggtgggtgtgacacagaattttgcagcaacagttctcagaaacaccaagggcaacgtcagatttgttattgggcgggaaaaaccaggacaagtgagcgaggttgcccagttgataagccagacactggaacaggagaggcgccagagagagctgctggaacagcactatgcccagtatgatgccgacgatgacgagacaggagaatatgccacagatgaagaagaagatgaggtaggacctgtccttcctggcagcgacatggccattgaagtctttgagctgcctgagaatgaggacatgttttccccatcagaactggacacaagcaagctcagtcacaagttcaaagagttgcaaatcaaacatgcagttacagaagcagagattcaaaaattgaagaccaagctgcaggcagcagaaaatgagaaagtgaggtgggaactagaaaaaacccaactccaacaaaacatagaagagaataaggaaagaatgttgaagttggaaagctactggattgaggcccaaacattatgccacacagtgaatgagcatctcaaagagactcaaagccagtatcgggccttggaaaagaaatacaacaaggcaaagaagttgatcaaggattttcaacaaaaagagcttgatttcatcaaaagacaggaagcag

SEQ ID NO: 1331 - DNA, 2679 bp, Homo sapiens
acctgaatacccggctagggacacgagagacaggaatcggggtttctgggtgacggtgatctcggggtgggcaggactccaaaggcccgtcgacccggtggtggactccttgcactgggattggacatatgcaagcgggagatttggggccggcgctcaaaatcggggggcgggggtggactcgggtttggaccccaggatccgatcagcggacccttgattcaacgtgaccccgcaactcagcctggaccagtttccctcctccacccacccccgaatcttgagaatcctgtactggggggagggcactgcccccgcaccatgttcttgggagagcagggctccagcgtgacatggctgaagcgcaccaggccgtgggcttccgaccctcgctgacctcggacggggctgaagtggaactcagtgcccctgtgctgcaggagatctacctctctggcctgcgctcctggaaaaggcatctctcacgtttctggggtcttacttactttgttacccaggctggagtgcagtgtcaccatcacagctcacttcatccctgaactcctgggctcaagcaatcctcctgcttcagccttccaagtagctgggactaagaatgactttctcaccggtgtgtttcctgccagccccctcagttggcttttcctcttcagtgccatccagcttgcctggttcctccagctggatccttccttaggactgatggagaagatcaaagagttgctgcctgactggggtggacaacaccacgggctccggggggtcctggcagccgcgctgtttgcctcgtgtttgtggggagccctgatcttcacactgcacgtggccctgaggctgcttctgtcctaccacggctggcttcttgagccccacggagccatgtcctcccccaccaagacctggctggccctggtccgcatcttctctggccgccacccgatgctgttcagttaccagcgctccctgccacgccagcccgtgccctctgtgcaggacaccgtgcgcaagtacctggagtcggtccggcccatcctctccgacgaggacttcgactggaccgcggtcctggcgcaggaattcctgaggctgcaggcgtcgctgctgcagtggtacctgcggctcaagtcctggtgggcgtccaattatgtcagtgactggtgggaggaatttgtgtacctgcgctcccgaaatccgctgatggtgaacagcaactattacatgatggacttcctgtatgtcacacccacgcctctgcaggcagctcgcgctgggaatgccgtccatgccctcctcctgtaccgccaccgcctgaaccgccaggagatacccccgactttgctgatgggaatgcgccccttatgctctgcccagtacgagaagatcttcaacaccacgcggattccaggggtccaaaaagactacatccgccacctccatgacagccaacacgtggctgtcttccaccggggccgattcttccgcatggggacccactcccgaaacagcctgctttccccgagagccctggagcagcagtttcagagaatcctggatgatccctcaccggcctgcccccacgaggaacatctggcagctctgacagctgctcccaggggcacgtgggcccaggtgcggacatccctgaagacccaggcagcggaggccctggaggcggtggaaggggccgctttctttgtgtcactggatgctgagcccgcggggctcaccagggaggacccggcagcgtcgttggatgcctacgcccatgctctgctggccggccggggccatgatcgctggtttgacaaatccttcaccctaatcgtcttctctaacgggaagctgggcctcagcgtggagcactcctgggccgactgccccatctcaggacacatgtgggagttcactctggctacagaatgctttcagctgggctactcaacagacggccactgcaaggggcacccggaccccacactaccccagccccagcggctgcaatgggaccttccagaccagatccactcctccatctctctagccctgaggggagccaagatcttgtctgaaaatgtcgactgccatgtcgttccattctccctatttggcaagagcttcatccgacgctgccacctctcttcagacagcttcatccagatcgccttgcaactggcccacttccgggacaggggtcaattctgcctgacttatgagtcggccatgactcgcttattcctggaaggccggacggagacggtgcggtcttgcacgagggaggcctgcaactttgtcagggccatggaggacaaagagaagacggacccacagtgcctcgccctgttccgcgtggcagtggacaagcaccaggctctgctgaaggcagccatgagcgggcagggagttgaccgccacctgtttgcgctgtacatcgtgtcccgattcctccacctgcagtcgcccttcctgacccaggtccattcggagcagtggcagctgtccaccagccagatccctgttcagcaaatgcatctgtttgacgtccacaattacccggactatgtttcctcaggcggtggattcgggcctgctgatgaccatggttatggtgtttcttatatcttcatgggggatggcatgatcaccttccacatctccagc

SEQ ID NO: 1332 - DNA, 3243 bp, Homo sapiens
ttacactgtgaggggaaaactgcctactcaagcctcagtaatggcagatacctctcccccaaccaagcttgagcatcccaggtctacttcagactgctgtgctggaagtaagaatttcaatccagtggatcttagctttctgggctccatgggggtgggatctactgatcaagaccacttggctccctggtttcagccccctttccaggggagtgaatggttctgtctctctggcattccagacaactctggggtacgaaaaaaactcctacagctagctcagtgtctgcccaaatggccactcagttttgtgcttgaaatccagggcccttgtggtgtaggcacccaagggatctccttgtctgtggattgcgaagaccatgggaaaagcgtagtatctggaccggagtgcacccccactcacggcatggtccctcatggcttcccttggctaggggagggagttccccaaccccttgcacttcccaggtgaggcaatgccccaccctgcttctgcttgccctccgtgggctgcacccactgtctaaccagtcccagtgagatgaaccgagtacctcagttggaaatgcagaaatcacccactttctgtgttggtcttgctgggagctgcagacagctgttcctattcggccatcttgcctgggaatctgtaattatattttattgcatattcttcctaggctgggtgtgtgtgtgtgaaagagagagagaaacagaaacagagacaaggagacagagacagtgaaacagaaacagagtcatcttccaggttctacttattaagcaatatcccatgaagtcgctgaaaagtgttatattctcctaatacctagtgtttgcaaatctggcagctgtcactgatgatttaaacaagattgggtgacttatttatgtacacacacatccacaatcaaacttcaacagtcgagtgtacccttttctaaataatcacgttgctaaaatgtgccacatggcccatttctttaaacaataaatggtaaattattattttggggagtgaaagctaaaagaaataatatgtctaatacgatgtggcattttctctatacagtacagttttagcattgaaaaggacctcagcaattccatttgccccgttttcagatgaggagattgaggctggtagttacagtggttttgcttcatgtcccatcccactggggctgctatgcaagctctcagtctagtcttctttcctctgcacttggtggccatcagctgtaacaagtcctgactagacaagggctttgttgttgactacaattcaatgccttttttgcctgcgtttgtttggaccctgctaatcaaggctacagggcagctgcagaaagacacctgctattggcttacctgctcctcgccttccctctgcttgggtctgagcatcagaaagccaccttccagtgggtctttgcctagcttttgtcttgtctttgctttttattcatctttgcttttgtcttctcagggcaaataggaaatcctagacctcagatcactgttctttgcttcccaatgacagaacagctcagtcctggctgccaccttctttctttactcttggtttaaatgtaatcccacatgccctagacaagcctcctgatgatttttcatcaaacatgaaaatagcttacttttaactgctgggtgtcagtctcttctaaaaattttgttcctaaggaattgattttgcaaatcagtgctaaagtcactttttaactgcctcacatactatcatttctttgacaattctttttaaaggggattgctcttttctccttctggtttctcaaatctacttttaacttcaaatagcaggcatgcaatgtagttttataagataatatactaggaccatctatcagatatgaaaccaagcataatcattgcaattatttctactgtattcagataatgataatacaaataagagtacgacatacgtaaatgttgattagctttctggttccttcatcaaaacttgcgttgtgttgtgcagccttttctttgcattgtccaggggttttgttattacaaaccataatatttaacccatttcttctactaatatcttttaatatttatgctattatatagctttttatttttgacatgtatctaaaccagaaaaaaatattccttgtacatgatatttttaggcaaaacataatgtctggagcaccaagtgaaataactgtggagaatggaatgttggacaatttgtgtggcatgcttaacttaatttgtttctatggcacaagcaaagctcattaattccatttattattttaagccacttgtttggtgttatggattttaagaatcagttggtgttagaatttttaataacacagagaaagccattgaatatggaactcaaattatctaaggtttacccagaagtcaaaatcacctggccctctgtaaatttctctttgtgttcctaggcccacaaagtctttggtctgaagactcagagcttaaattgcattggtcctgttaatctttgtcaaaaaggaagtttgggcggcagtttcagggtagtgttgagaagataactcctggtcccattttattctttcctcatttgttcagtgctcatggccatctacaaccttccttgattctattctgcctaagcctcttatttccacatctataagtatagtgctacataataattacaacctttaagaaaatggagagttttcattaaagggcccctgcaaatctatgatgctagatgacagattctaccagaaggccagagtattaatagcacccgtgataactgtaataagaatatgtctcgttttcttttaaagacatagatattccattttaatcctgtataactcaaagaaaatttgggtgttaacactttgaaatacctttacctcctttgggggaaatccaaactgaaaggaattaatatccacatcagttcctaaagcaaaatgcctgacacagactaacaaagctctttctcatcctgtggtaggaacttaggagtgataactcacattgagaacttgtgatctgaaagcactaaggaatttctgccattgcaggtaggaaaaaaaaagacaaaaatggtattctcaggtgagcttacctttcaaatttttctgagacttcctaaatgtgacaagaactctgctgtgtggcaaccttatgtatccacaacagaactaaggaccg

SEQ ID NO: 1333 - DNA, 2945 bp, Homo sapiens
tatggatgattccagtattctgagaaggagagggttacagaaggagttgagccttccaagaagaggcagtttatttcttttcccggcccagcgcgatggcttacacctgtaatcccagcactttactttgggaggctgaggcaagtggatcacaaggtcaggagttcaagaacagcctggccaacatgttgtcggacaagtaaccgcaagagcttgattgtgacctctagcacatcacctacactaccacggccacactcaccactccatggccacacaggtaacagtcctttggacagcccccggaatttctctccaaatgcacctgctcacttttcttttgttcctgcccgtagccatagccacagagctgacaggactgatgggcggcgctggtctttggcctctttgccctcttcaggatatggaactaacactcctagctccactgtctcatcatcatgctcctcacaggaaaagctgcatcagttgcctttccagcctacagctgatgagctgcactttttgacgaagcatttcagcacagagagcgtaccagatgaggaaggacggcagtccccagccatgcggcctcgctcccggagcctcagtcccggacgatccccagtatcctttgacagtgaaataataatgatgaatcatgtttacaaagaaagattcccaaaggccaccgcacaaatggaagagcgactagcagagtttatttcctccaacactccagacagcgtgctgcccttggcagatggagccctgagctttattcatcatcaggtgattgagatggcccgagactgcctggataaatctcggagtggcctcattacatcacaatacttctacgaacttcaagagaatttggagaaacttttacaagatgagtttgaccctgaagagttctaccaccttttagaagcagctgagggccacgccaaagagggacaagggattaaatgtgacattccccgctacatcgttagccagctgggcctcacccgggatcccctagaagaaatggcccagttgagcagctgtgacagtcctgacactccagagacagatgattctattgagggccatggggcatctctgccatctaaaaagacaccctctgaagaggacttcgagaccattaagctcatcagcaatggcgcctatggggctgtatttctggtgcggcacaagtccacccggcagcgctttgccatgaagaagatcaacaagcagaacctgatcctacggaaccagatccagcaggccttcgtggagcgtgacatactgactttcgctgagaacccctttgtggtcagcatgttctgctcctttgataccaagcgccacttgtgcatggtgatggagtacgttgaagggggagactgtgccactctgctgaagaatattggggccctgcctgtggacatggtgcgtctatactttgcggaaactgtgctggccctggagtacttacacaactatggcatcgtgcaccgtgacctcaagcctgacaacctcctaattacatccatggggcacatcaagctcacggactttggactgtccaaaattggcctcatgagtctgacaacgaacttgtatgagggtcatattgaaaaggatgcccgggaattcctggacaagcaggtatgcgggaccccagaatacattgcgcctgaggtgatcctgcgccagggctatgggaagccagtggactggtgggccatgggcattatcctgtatgagttcctggtgggctgcgtccctttttttggagatactccggaggagctctttgggcaggtgatcagtgatgagattgtgtggcctgagggtgatgaggcactgcccccagacgcccaggacctcacctccaaactgctccaccagaaccctctggagagacttggcacaggcagtgcctatgaggtgaagcagcacccattctttactggtctggactggacaggacttctccgccagaaggctgaatttattcctcagttggagtcagaggatgatactagctattttgacacccgctcagagcgataccaccacatggactcggaggatgaggaagaagtgagtgaggatggctgccttgagatccgccagttctcttcctgctctccaaggttcaacaaggtgtacagcagcatggagcggctctcactgctcgaggagcgccggacaccacccccgaccaagcgcagcctgagtgaggagaaggaggaccattcagatggcctggcagggctcaaaggccgagaccggagctgggtgattggctcccctgagatattacggaagcggctgtcggtgtctgagtcatccctcctgaaggttgctggaaggcccagcactttctcccagcacttcgggactcacccccaccagcagttgctctcctcccagctccacctctgggaagctgagcatgtggtcctggaaatcccttattgagggcccagacagggcatccccaagcagaaaggcaaccatggcaggtgggctagccaacctccaggatttggaaaacacaactccagcccagcctaagaacctgtctcccagggagcaggggaagacacagccacctagtgcccccagactggcccatccatcttatgaggatcccagccagggctggctatgggagtctgagtgtgcacaagcagtgaaagaggatccagccctgagcatcacccaagtgcctgatgcctcaggtgacagaaggcaggacgttccatgccgaggctgccccctcacccagaagtctgagcccagcctcaggaggggccaagaaccagggggccatcaaaagcatcgggatttggcattggttccagatgagcttttaaagcaaacatagcagttgtttgccatttcttgcactcagacctgtgtaatatatgctcctggaaaccatc

SEQ ID NO: 1334 - DNA, 2795 bp, Homo sapiens
aataaaaaacttagccgggcatggtggcatgcacgtgtggttctcgctactcgggaggctgaggtaggaggattgcttggtcctggacagttgaggctgcagtgaggtatgatcgcgccactgcactccagcctgggtgacagcgagaccccgtctcaaaaaaaaaaaagggaaagctcgggcatgttggttacccttcatgaaactcttttgcgttatctccctagattttgagctccaagggcagtggttctcatacaggggacatttggctgttgtctggagccattttttgattgtcaaaacccagataggggttgctagtggcatcttgtgggtggaggccagggaagctgctacacatccatcagtacacaggacagcccccacaataaagaattacctagcccaaatgtcagtagcgccaaggctgagaaatcccatcctgaaaggaccatactctagctcttttagtggctagtatagtcctgggcatatgaatagtcaagatatgatgaaagatggtatttgtatggactggagtatcaagcaaggctcgacccccaaagggctggaggcgtggccagaaggacagggccactttggcttctggattcctgtggcagggaccttttcctaggactccctggccaatgtggggctatgaacagcactgagtatccccctaagtgaccttggggtgctctgtgaccctcagcggctgccggaaacaacatggaggacatctttggggagcttttgctacagctgcaccagcagtacccaggtgatatcggctgctttgccatctacttcctgaacctgcttaccctgaagcctggggaggccatgtttctggaggccaacgtaccccatgcctacctgaaaggaggtgagccacatttcagcagtgagccccactgccatccctgctgggccctgtttccctatctggacaaaggaaggagaagggtggtcaaggagacccccaaggaccttgcagctctgacctctgagggtccctgggctcagcaagcaacagctggtagggatgatgaatgcatttagcattgaacacgccttgaatcctgacaccaaccctgtgatgccatgctactctgattttaagtcctgccagtcagtgtgggaaccacaatttgaacgcaggctatattggatcaaagctgttgttctgtcacagcctttgtatgtctgtccgacctaccagggatttttacactaaaatatgcatattgccatggaaggatgccacctttcgactgttggctgcttatccacacatgcctcatgcacaggattctggggtagaagtgggagactacagagttggggctccccaacccccaggggttaacatgactcccctctgacaataatgggtgacctgtcacctgtttttggtatttgatatcttaaccccattctcccagagaatacaattcatggaaatttttacctaacttggcatggggttcatggagctcaggttaggaggcccagaactggagagctaaggcatacttcatcagcttagcacatgacgactgtctctccagactgcgtggagtgcatggcgtgttcagacaacacagttcgtgctggcctgacacccaagttcattgatgtgccaaccctgtgtgaaatgctcagctatacccctagctccagcaaggacaggctctttctcccaacacggagtcaggaagacccctacctctcaatctatgacccccctgtaccagacttcaccattatgaagacggaggtgagtgaggggctatgatgggtgtccttcgtgtgccatgaaaatctctggcaagggtcacgatgtggaggacacctggggctgggtttcctgtcaagcccacttggcggagggtggccccagggcctgcccattccttcctgtaccagggaccaggcctctatgctgactgagcctgggttgtgcgagaaggtggcagagctctccctcgtgccctggggactgtcctgggcccatgagctgatgagagcagagtctgagctgcactgccttatcatttcttcctgcccaggtccctggctctgtcactgaatacaaggtcttggcactggactctgccagcatcctcctgatggtacaggggacagtaatagccagcacacccacaacccagacaccaatccctctgcaacgtggtggcgtgctcttcattggggccaatgagagtgtctcactgaagcttactgagccgaaggacctgctgatattccgtgcctgctgtctgctgtaaaggctgcagcctccccagctctcctctgccagccaccctaaattccagccaacctcacctcctcgggcccagctcaagcccccttccttgctctggaccccttaggtataccctggaagagctggggtcggggaggagggagcgtgaaggtagtgactcctgaacacacccaggtggaaccatctttggggaggagaggcccgtgtgaggggtctgatactccctttgtcttccctctctactcctcgctacacctgagccaggctcttgccaactctgttccagcctatggctttaggctagctgttaaatatgtgacccagcattagctcagcatctgtcagagcaagagaccaggtaatttctaagaacagggttctagcgatgggactgcccatttcctcagctgcagaggaggaaagggaaagggtaggcctgtagactaacgctgtttacacccttgttctgtcaaagcaattaaagatcacttgtgttgag

SEQ ID NO: 1335 - DNA, 2755 bp, Homo sapiens
ttgtttgcggaagtaggaggaagtagaagtgctgagtaagccgagagggggaagacggtggggcctccccacctgccccgcagaagatgcagttctttggccgcctggtcaataccttcagtggcgtcaccaacttgttctctaacccattccgggtgaaggaggtggctgtggccgactacacctcgagtgaccgagttcgggaggaagggcagctgattctgttccagaacactcccaaccgcacctgggactgcgtcctggtctaccccaggaactcacagagtggattccgactcttccagctggagttggaggctgacgccctagtgaatttccatcagtattcttcccagctggggaagcaggagatggtccgcgtgctgctgctgtgcaatgctcggtgcaacatcatgggccccaacggctaccccatctactcggccatgaagttctctcagaaggggtgtgcggagatgatcatcagcatggacagcagccagatccacagcaaagacccccgttacggagccagccccctccactgggccaagaacgcagagatggcccgcatgctgctgaaacggggctgcaacgtgaacagcaccagctccgcggggaacacggccctgcacgtggcggtgatgcgcaaccgcttcgactgtgccatagtgctgctgacccacggggccaacgcggatgcccgcggagagcacggcaacaccccgctgcacctggccatgtcgaaagacaacgtggagatgatcaaggccctcatcgtgttcggagcagaagtggacaccccgaatgactttggggagactcctacattcctagcctccaaaatcggcagacttgtcaccaggaaggcgatcttgactctgctgagaaccgtgggggccgaatactgcttcccacccatccacggggtccccgcggagcagggctctgcagcgccacatcatcccttctccctggaaagagctcagcccccaccgatcagcctaaacaacctagaactacaggatctcatgcacatctcacgggcccggaagccagcgttcatcctgggctccatgagggacgagaagcggacccacgaccacctgctgtgcctggatggaggaggagtgaaaggcctcatcatcatccagctcctcatcgccatcgagaaggcctcgggtgtggccaccaaggacctgtttgactgggtggcgggcaccagcactggaggcatcctggccctggccattctgcacagtaagtccatggcctacatgcgcggcatgtactttcgcatgaaggatgaggtgttccggggctccaggccctacgagtcggggcccctggaggagttcctgaagcgggagtttggggagcacaccaagatgacggacgtcaggaaacccaaggtgatgctgacagggacactgtctgaccggcagccggctgaactccacctcttccggaactacgatgctccagaaactgtccgggagcctcgtttcaaccagaacgttaacctcaggcctccagctcagccctcagaccagctggtgtggcgggcggcccgaagcagcggggcagctcctacttacttccgacccaatgggcgcttcctggacggtgggctgctggccaacaaccccacgctggatgccatgaccgagatccatgagtacaatcaggacctgatccgcaagggtcaggccaacaaggtgaagaaactctccatcgttgtctccctggggacagggaggtccccacaagtgcctgtgacctgtgtggatgtcttccgtcccagcaacccctgggagctggccaagactgtttttggggccaaggaactgggcaagatggtggtggactgttgcacggatccagacgggcgggctgtggaccgggcacgggcctggtgcgagatggtcggcatccagtacttcagattgaacccccagctggggacggacatcatgctggatgaggtcagtgacacagtgctggtcaacgccctctgggagaccgaggtctacatctatgagcaccgcgaggagttccagaagctcatccagctgctgctctcaccctgagggtccccagcctctcaccggccccagctgacctcgtccattcagcccctgccaggccaagcccagccactgccctcccgggcagatctgggcccaggcacctctgagtccatagaccaggcctgggagaatgccaagctgcctgcccgaggctggtcctgaaggcctgtctcccactaaccccgccttccagcactttctgtcattccaggctgggaaagtctagagccccctttggcccctttccctgactgtcaaggacaactgactcccccatcagctcaaacattaagggtacccgggcacaaccgtacccctgcccccagccccagcctccctgagggcctgccgggctgcctctgccccagcccccagcaagggcactcccaggcttcctggtgggtgcagcccactccctctgccctctgctccgttccctgggggctgggactaaagaaatgggtgtcccccaccccatcagctgggaaagcccaggccgcaggagtgggatgcccgttggactttgcccctcacactggcccagcccctcacactgccccaccccgagaaccctcagctctcaaaggtcactcctgggagtttcttcttcccaatggaagtggcttaagagccaaaactgaaataaatcatttggattcaagttc

SEQ ID NO: 1336 - DNA, 2142 bp, Homo sapiens
tctttacccagtgctttggggctgtattagatctcattcatctccggtttcagcactacaaggctaaacgggttttctccgctgccgggcaacttgtctgtgtcgtcaaccccacacacaacctaaagtatgtgtccagtcggcgcgccgtcactcagagcgctccagagcaaggcagcttccaccctcaccatctctcccaccaccactgccaccaccgccaccaccaccacctccgccaccacgcccacccccaccaccttcaccaccaggaggcggggctgcacgccaacccggtgacgccctgcctgtgcatgtgtcccttgttctcctgccagtgggaaggccgcctggaggtggtggtgccccacctgcggcagatccatagggttgacatcctccagggagccgagatcgtcttcctggccacggacatgcacctccccgcgccggctgattggatcatcatgcactcctgccttggccaccactttctgttggtgctgaggaaacaggagaggcatgaagggcacccccagttctttgccaccatgatgctgattgggacccccacccaggccgactgcttcacctatcgcctggaggatatagttctggtccagctgggagacacgagggtcacaggcatggagaatggagatggagggggagcccggtccgtgggccccaagagccgagccgggcgagggatggagtggggagacgcaggagggcggtgtctagggctggggaatggggtcgtgtctggcaccccggtggggactgtattggaaggcagcccagaatgggcagcggcgaggagtgaacacctggctgcaggtgacggccaaggaaggaggattgcttgagctcaggagtttgagaccagcctgggcaatatagcgagacttcatttctacaaaaaaaaaaaaatcagctgggcatggtgacacaagcctatagtcttaactactcggaggccaagacagggggatggcttgagcccaggaggttgaggtcacagtgagctgtgattgcaccacttgtaactccagcctgggcaacagagtgagaccctatctctttagaaaaaaaaaaaagcactagtccacctggaagcagggggcccaggaagtgggtgggctgcagatggaggcttcagtgcgccaggccctttctgaatccctttgcccacacccaggtttctcaccttagagtcccaggagtccctgcacagaacgctgggatctggttgcctcattcacaccaaggtgctagagttaatgactcactctctaaggagtaattgccttttaaaagaaggcctagagagacagcgcacttaacagtgaaaaatgagttaccagtatctgaacttcaggcatctgccagaggtttttttcaggaggtgtggagagaggagcattcctccccttgaggctgagcctacatacatggttgacgccgaaatggaggtcaggccacacgaagattgtctttaacaattggtatctgcatgaatctgtacctggtaaaccccatcactagctgtggctactctggacattttaggaatagatcagcatagtaaccataatagtactcatggctaccacttattgaggcttttctatatgatccagtaggctgcgtactttgaatatagtagatcatgtaatccccataacaaccttagcaagcaggtgctctttattgtactcatgttacgggtgggaaacgtaagctaagagaatttagccaacttgcttaagatcacccagctagcaaatggcagagctgggcctgggaccgggcacgtatggcttctgaccaacagcaaccatgtcatttctatgaacatatggacccaaggctcagaaggaccgagtcataaagtgtgaatggcatagaggccttttagtgctttcatactcaatatggccttttagctcccctttttctccctcttttttcaacccaagacctagtggagtactagagctgcttgtattctggttgttaatctttcaggaattttgcaagctgattgttaattaagtacagtcagtattaaaaatgatatacatttacaattaaataaatcatatttaaagcaaaggtcaaaagtacttaaaactcatc

SEQ ID NO: 1337 - DNA, 2862 bp, Homo sapiens
gaaagagtattcaaacgaaaatgcagttgtgaagagaatgcagtctcttcaacttgattgtgtggcagtaccttcaagccggtcaaattcagccacagaacagcctggttcactgcacagttcccagggacttgggatgggtcctgtggaggagtcctggtttgctccttccctggagcacccacaagaagagaatgagcccagcctgcagagtaaactccaagacgaagccaactaccatctttatggcagccgcatggacaggcagacgaaacagcagcccagacagaatgtggcttacaacagagaggaggaaaggagacgcagggtctcccatgacccttttgcaccagccctcagggctcaccagccaacctcaagtactgtatcagaacaatggattatatagctcacatggctttggaacaagaccactggatccaggaacagcaggtcccagagtttggtacaggccaattccaagtcatatgcctagtctgcataatatcccagtgcctgagaccaactatctaggaaatacacccaccatgccattcagctccttgccaccaacagatgaatctataaaatataccatatacaatagtactggcattcagattggagcctacaattatatggagattggtgggacgagttcatcactactagacagcacaaatacgaacttcaaagaagagccagctgctaagtaccaagctatctttgataataccactagtctgacggataaacacctggacccaatcagggaaaatctgggaaagcactggaaaaactgtgcccgtaaactgggcttcacacagtctcagattgatgaaattgaccatgactatgagcgagatggactgaaagaaaaggtttaccagatgctccaaaagtgggtgatgagggaaggcataaagggagccacggtggggaagctggcccaggcgctccaccagtgttccaggatcgaccttctgagcagcttgatttacgtcagccagaactaaccctggatgggctacggcagctgaagtggacgcctcacttagtggataaccccagaaagttggctgcctcagagcattcagaattctgtcctcactgataggggttctgtgtctgcagaaattttgtttcctgtacttcatagctggagaatggggaaagaaatctgcagcaaaggggtctcactctgttgccaggctggtctcaaacttctggactcaagtgatcctcccgcctcggccttccaaagtgctgggatatcaggcactgagccactgcgcccagccaacaatccgctctgaggaaagcgtaagcaggaagacctcttaatggcatagcaccaataaaaaaatgactcctagttgtgtttggaaagggagagaagagatgtctgaggaaggtcatgttctttcagcttatggcatttcctagagttttgttgaagcaagaagaaaaactcagagaatataaaatcaacttttaaaattgtgtgctctcttcttcacgtaggctcctgttaaaaacaaagtgcagtcagattctaagccctgttcagagacttcgtggatcacagctgcagctcaccgccacatcacaggatccgttaacgttaatacccaatactctgtcagccactgtaggctctaagaaccacgtgcagtcttcagcccattaaattatcgattattttttaatgaattgaatttatattgagtcttcaaattaactgaatggatttaaaggggtaccaaggaggggggaaacatcagaatttcccaggcagttgttgcaaggaattggtactaaccgtgactacaacaaaaattcttgattgacttttaaagttatttcctggcattctggtaccttcacccagcctgagtgccctggagagggaacaggaaatgctgatctctacccctgggtgagaccagaacctcagggctgatactgttgagtggcttcctcggtttactctgtgtactgtgaaagtattttcatattttttctgtgtgccagagtgaaaaaggacagcttctgagtgtggtaattgtgcctctagcacccagcctttcaaagcccacctgaaacctgggggtggatgaaagaactagaatagaagactgaagctgggtaggccgctcagtgtccactggcattttgctaaaccgacaaggaaggctgtgtgcttagctctccccagagggagggcgagaagggtgtggtgatggtcaatctggctgtcggaacagattctggtgtcttgggctgataacagtgttgttgattctgattgtgaatcccctcaactctagcagacacatacacacccctgaaatggggctgcagagcaggctgtctcagccttgccactgtcggcatctcgggctgggtaattctgttgtggggactgtcctgttccttgtaggatgtttagtagcatccctgcccccacctactagatgccaggggcactgttctccccagccccccgccccagttgtgacaatagtctctaaacattgtcaaatggtccaaggaaaggggaaaattgccccggttgagaagagcactgctgtaaagtaatgagcctcggctctcctgtctgcacctgtccggttactacttggccaccacgcagccttggctcctacagcccaaaagggagaatggagggaggctccaggctttgctggaggggcctgggtgagttctgtttgctccttgtaccaccatccaaatggtgttatcaaatctcttagattccaaagaggttgaataattaatgttcaaaggcaagagggcaaggcattttttaacactttttaaaataaaaatttataccac

SEQ ID NO: 1338 - DNA, 3045 bp, Homo sapiens
attagtcccagatagcaaacaggggaaaccacagtcagcaacagactatagtgaccctgacaatgtagatgatggtctttttattgtagacattcctaaaacaaataatgacaaagaagtaaacgcagaacatcacattaaaggaaaagggaggggagttcaggaatccaagaggggcctggtacaagatgagacagaattagaggatgaaaatcaagaaggcatgactgtgcacagttctgttcacagcaataacctcaactctatgccagctgctgaaaagggtaaagacacattaaaatcagcttatgatgatacagaaaatgacctaaaaggagcagctattcatatctcaaaaggaatgctccacgaagaaaagcctggagagcagattttggaaggtggctcagagagtgaatctgcacagaaagctgcagggaatcaaatgaatgacagaaagattcaacaggaatccctgggtagtgcaccactcatgggagatgaccaccctaacgcatccagagacagtgtggagggagacgctttggtaaatggggccaaactgcacacgctttcagtggagcatcaacgtgaggaattgaaagaggaattagttcttaaaactcaaaaccaacctagattctcctctccagatgagattgatttgcccagagaactggaagacgaggttcccattctgggaagaaatcttccctggcaacaagaaagagatgtggctgccacagccagtaagcaaatgagtgagaagataaggctctctgagggagaagccaaagaggactccttggatgaagagttttttcatcacaaggcaatgcagggcacagaggtaggacagacagaccaaactgacagcacaggaggaccagctttcctttctaaagtagaagaggatgattatccctctgaagaactactagaggatgaaaacgctataaatgcaaaacggtctaaagaaaaaaacccggggaatcagggcaggcagtttgatgttaatctgcaagtccctgacagagcagttttagggaccattcatccagatccagaaattgaagaaagcaagcaagaaactagtatgattttggatagtgaaaaaacaagtgagactgctgccaaaggggtcaacacaggaggcagggaaccaaatacaatggtggaaaaagaacgccctctggcagataagaaagcacagagaccatttgaacgaagtgacttttctgacagcataaaaattcagactccagaattaggtgaagtgtttcagaataaagattctgattatctgaagaacgacaaccctgaggaacatctgaagacctcagggcttgcaggggagcctgagggagaactctcaaaagaggaccatgagaacacagagaagtacatgggcacagaaagccaggggtctgctgctgcagaacctgaagatgactcgttccactggactccacatacaagtgtagagccagggcatagtgacaagagggaggacttacttatcataagcagcttctttaaagaacaacagtctttgcagcggttccagaagtactttaatgtccatgagctggaagccttgctacaagaaatgtcatcaaaactgaagtcagcgcagcaggagagcctgccctataatatggaaaaagtcctagataaggtcttccgtgcttctgagtcacaaattctgagcatagcagaaaaaatgcttgatactcgtgtggctgaaaatagagatctgggaatgaacgaaaataacatatttgaagaggctgcagtgcttgatgacattcaagacctcatctattttgtcaggtacaagcgctccacagcagaggagacagccacactggtgatggcaccacctctagaggaaggcttgggtggagcaatggaagagatgcaaccactgcatgaagataatttctcacgagagaagacagcagaacttaatgtgcaggttcctgaagaacccacccacttggaccaacgtgtgattggggacactcatgcctcagaagtgtcacagaagccaaatactgagaaagacctggacccagggccagttacaacagaagacactcctatggatgctattgatgcaaacaagcaaccagagacagccgccgaagagccggcaagtgtcacacctttggaaaacgcaatccttctaatatattcattcatgttttatttaactaagtcgctagttgctacattgcctgatgatgttcagcctgggcctgatttttatggactgccatggaaacctgtatttatcactgccttcttgggaattgcttcgtttgccattttcttatggagaactgtccttgttgtgaaggatagagtatatcaagtcacggaacagcaaatttctgagaagttgaagactatcatgaaagaaaatacagaacttgtacaaaaattgtcaaattatgaacagaagatcaaggaatcaaagaaacatgttcaggaaaccaggaaacaaaatatgattctctctgatgaagcaattaaatataaggataaaatcaagacgcttgaaaaaaatcaggaaattctggatgacacagctaaaaatcttcgtgttatgctagaatctgagagagaacagaatgtcaagaatcaggacttgttgcagcaggaaatcgaagactggagtaaattacatgctgagctcagtgagcaaatcaaatcatttgagaagtctcagaaagatttggaagtagctcttactcacaaggatgataatattaatgctttgactaactgcattacacagttgaatctgttagagtgtgaatctgaatctgagggtcaaaataaaggtggaaatgattcagatgaattagcaaatggagaagtgggaggtgaccggaatgagaagatgaaaaatcaaattaagcagatgatggatgtctctcggacacagactgcaatatcggtagttgaagaggatctaaagcttttacagcttaagctaagagcctccgtgtccactaaatgtaacctggaagaccaggt

SEQ ID NO: 1339 - DNA, 2831 bp, Homo sapiens
gtgcgctcctccccgcgctgtctcggcggcccagggtgagtcggccgcggccgcggggcggggactgggaggggcgcggtcctccgagcccggcctggtggaggctgtagcccccgcagtgggcgcgcggagctcggcagggagcggacccgcagccggcactgtcgcctccgctcgccttgggttccgaacccttatcggggcgaagggccctgcgccccggtccatgctggctgtggtcgggggcgtgcggccgggcccccgagacccgctccgccgagccggacggttgcgcagagatgaggctgcaggcggggaggcctggcgaggtggggctgctccggggaggaccaggctctgcccctcgcttccgtccgatggcgggctcttccccgcagcctcgctccccggcggacgccgtttcccgcagcgttcatttaccctgcgcagttttgccccctccccgggttggggcatttattggaccaacagtcatttcgtaaatagctgttgggtatttaactgtgagcgttccggtgctggggaccccgcagtgagcgaacagcccgcctcgcctccaggagcatgaattgtaatagagaattcactgtctgtagcatctgctcctccacagagggaccctggaatggcgatggcactcccgatgcctggacctcaggaggcggttgtgttcgaggatgtggctgtgtacttcacaaggatagagtggagttgcctggcccccgaccagcaggcactctacagggacgtgatgctggagaactatgggaacctggcctcactaggctttcttgttgccaaaccagcactgatctccctattggagcaaggagaggagccgggggccttgattctgcaggtggctgaacagagcgtggccaaagccagcctgtgcacagattccaggatggaggctgggatcatggagtctcctctgcagagaaagctctccaggcaggcaggactgccgggcaccctgcaccaccccacccgcatggcggtcctgaggacgggtcagataaacccacccacccccgggctcgggagcacagcgcctccccaagggttctgcaggaagacctgggccggcctgtggggagctcagccccccgctacaggtgcgtgtgcggcaaggcgttcagatacaactcgctgcttctcaggcaccagatcatccacaccggcgccaagcccttccagtgcacagagtgcgggaaggccttcaagcaaagctccatcctgctgcggcaccagctgatccacactgaggagaagccgttccagtgcggcgagtgcgggaaggccttccggcagagcacgcagctggctgcccaccaccgcgtccacacccgcgagcggccctacgcatgcggcgagtgcggcaaggccttcagccgcagctcccggctgctgcagcaccagaagttccacaccggggagaagcccttcgcgtgcacagagtgcggcaaggcgttctgccgcaggttcaccctcaacgagcacggccgcatccacagcggggagcggccctaccggtgcctgcggtgtgggcagcgcttcatccgagggtcctcgctcctgaagcaccaccggctgcacgcgcaggagggtgcccaggacggcggcgcggggcagggcgccctgctcggagctgcgcagaggccccaggcgggggacccgccccacgagtgcccggtgtgcgggaggccgttccgacacaactccctgctgctgctgcacctgcgcctacacacgggcgagaagccgttcgagtgcgcggagtgcggcaaggccttcggtcgcaagtccaacctcactctgcaccagaagatccacaccaaggagaagcccttcgcgtgcaccgagtgcggcaaggcgttccgcaggagctacacgctgaacgagcactaccggctccacagcggcgagaggccataccggtgccgcgcctgcgggagggcctgcagccggctgtccaccctcatccagcaccagaaggtgcacggccgcgagcccggggaggacacagagggcaggcgggcgccctgttgggcttcctgatgacggggacgacaggccgaggattcacgctggaagcccacccaagccggcggggccctagcgcagaaattcagaaccccctgtcctgaaggtgaagcaaagtctaaagaaagggccagctcccatcaggagctcggcttcttgctccagccgggcactggggagggaaagggcaccaggcagcccgtggtgtggcctcaggaaccactatcagccaccatttcctggggccttccggaaatgtccaggagcgggcagaagggagagagggaggggcagctatgctcagtccccaaagagcagggcacagggggcgcctcagacgcatatgcagctgagctccccacaggccggcccgggtcttcgtgcagaaccattgggcacagccaggccttagcgccaggctccgtgtggcggtcaattccaggtgctgtaaagccgactaacagggtacagggagccttagctggctgccatgtctcctgcctgtaatcccatcactttgggaggctgaggtgggaggtttgcttaagcccaggagtttgagaccagcttgggcaacatggtgaaacttctctacaaaaaatttaaaaataagtcaggtatcgtggtctgtgcctgtacgctgtagtcccagctactcaggaggctgaggtgggaggatgggttgagcctgggaagtcaaggctgcagtgagctatgatagcaccacggcactccaacctggttgacagagtgacaccctgttt

SEQ ID NO: 1340 - DNA, 2192 bp, Homo sapiens
atttttgcatatgaaagaggccagaacccacaggaaaaacttcaaaacttgacatttgccagaatgtttaaaatttgttcagaaaaggttaaagcaacaagtttagcctttgtgcatgaagacgcctggcctgctagaagcgtcgcccgtccctgcgtggtgctgtcccatgtcacttgaactgatagaggggcctgtgcaatctcctaaggcctgtgtttctgccatatattttattataaattacgatccactcatccacctgccctccaccaggagtgggcaccccataagggtttaggccactttgcagaggatggaggtcaaaaaccactcccagataagtttggttttcaacatttagtaacttgtctcagggcagagggcaggcagggggaccgaggggcagcagataggagagcactgagcccggatagttctcagcctggcaagtggctctgaagctgccttcagacaaggctagtctaggggcaagagtgcgagctggctgacaataagaacgtggccacctgcccagcttcacacctcccccgacttcagcccttcctaaacccagacctgcggtccaggcaggcactgggctgtgcccactcgagctcactgcccacacacagcatgcctttgggtgccatctctttgcccaagcctggaagccttggcaggtgggaaatgccgctgccctggtgggcatggcactgagatgcatccactcagcaggagtgacagaggcagaagttcctttaaagcacatcttccacttaggaaaggaaggaaatctttgtactgtcttggaagcctccacatccggctatggccctgcaagctgctttatccctgcgctagtctcccccgagggtttaggctggcccagcacatcctgtcctcctgagctcgcgtgcagccacccagagcgcaggggtcactgcacgctgcagggctcttgctgccatggtctcaagcctgaagaggctccgcccacaagctggcccatgaagttagcaatgcctgtggcttcagtcaattgtcttgagactgtgaagaggctgaaagacaccttcccgggtggaagaaggagttcactgaaaacttatcttaaactgacccttccctttgagtgagtcttcattcctctcccatgtgggaacccagcctccgatgccccggggactaggggaaacagttggaggtccgtgccgtccccagcctgccacgggtgcgaggacagccaagtcctgagtgactcaagatgcttcacttacatggaagaaacttctaaaactctaccgagtggtttttgtatatactaaagttctatttagagcttttctgttttgggcaagttcgctgctccttctatttgggcactttggtttttgtactgtcttttgtgacggcattgattgaacattttttactagtagtcttatgacttttgtatttttttttttttttttttgtaatttataccaacaacacttttatcactttttttttgttgggcttctgcaaaatacaagctcatttttaaaccaaatgaacagaccatgagctggcttcaggggaagtgctattcacaggaccatatccaccaccctcttaaattcctaaacaatatcatctaggacttctatttaagttatttaaaataaatcttccttgagagccttgggaggtgatgtcagggttataaatggcacagtgcatttgctgtaggaatgtggtttggcattgttttatacacacagtattttttataccttaatgcttattcttgatggcatctgtcagatattagaattgaaaataagaatcttcccaaaatcctttaatttacctgatgccctcatcaggtcgttaaaaattcaaatggttttaatagctaaaaaactacaaattaagctctaaaacaaacaaactacagaaatgtaaaccttcatttgccaaaggtccttggtggcctgtcccctgccctgggagcagatggccctgaagcccttccctcactgtgcaggccaccgggtgaggctggacggtcacccatggtggcttcactgcaaggagcaggactgccgagctcaagcacggggccttcagcttcccctgtcctctggccacaccgccagcccttggtccttatctgtgtgaggtttacaaataaagcttctgatgtc

SEQ ID NO: 1341 - DNA, 2695 bp, Homo sapiens
aaaatctctaagggaggtcatgagaactagaacttgctgggaatggagttgggaggcaggtgttgaagacaaaaacaccaggtagccatccttgtatttctgaagtaaatggagcctgtcattgctaaaggtggagattcagaagggacttataggctagaggtgggactgttgtttattcaggcagatgcttcacgggcaccaactgtgtgctgggcacgaagccccttcctcaggccttcaggcctcactggctccagggtcttagagcttaaggttggaatctggtctgggttcgaaactgtatagtgaagggtgggcttggaggaacgggctgccctatgaacacgtcagactcaggacagtgggtgcaaagtgaggccaccctggggaggaaaaggctgtggttccctactcagtgtctgttctaggtgctgagaaggatgggtccttgggctcaggggtgggatgggagactgggaggagtgggacccgaggaacccaggggtgtgtccttgagctcaagagtcacggcaaacatacagaggccttacagccccctgggacccagctcactgctggctcaaaacgagtccgttaccacgcagtcagtgatggcctcagtcagccccagcaagtcctcaaccaggtggcagaaacacctgtccaaagcttggcctacagccatggccacactgccaggcagagttcataggcctgacgccaggggtagtggcacgggcagataatctcaccccattttggcaaggtgcacagagagtcctcagagcacaagcgtggctgcgggcacaccctggcggggcccctggcttaaacggtacaggccgaaggtgctgccgttctccccaggagagcagcctgtgctggagcccgggaaacaaggcctctggctcagtgcctgactcaggactggggcagctgtccgccccgccccccaccttccggcctgaagggcacctgtacccatcaggctttttgttcaggcctcagcgcgtgagccacactgtctccaccaccatggcgtggtcccaagaccttagtcactttgtctctttccctccctgcctggaaaggcctcctgtgccaggcacccatggccctcactgaggagattcagcctgggctccacgtctgaagcgtctggaagtcctccccacagctcctcccaatcccaggcctgtttcctttccttcagacgaggccccgtggctcctccttcctcctccacaaaacctattggccatgggtgccgacaagaagcagcaggtcctctgcttcccagccagaaacagcagggagctgccctggtgaggaccctgccctccttggccttgctcgtgtgccctcctagggctgccctgatgggctggtcttttggaaaaaggaatatgccctgggcctgctgagaaggaggccacgcagcgaggaggcaggcggcccaggaatcgctctggcccaagggcctggcacaaatgttggctgtgagggagccaggcgggagatcctgcagagatgttcgagcttccttctggaccagctcctggggatgagccaggctggggacagtggggctgagggttaacaaggaggtctcctggctgggctgggacgcagtcccctcctccgtgggctcctcttttctcctgactgctggttggtgtttgtcctactttcctcattgcctaggcaaccatttcaggttcaccctttgccacccagcctacccccgggagcccagagcccagctcttcccactcccggaggaggagaacaaagaaacgaggcacaccgagaacagcagggtgacgccagggtcacgtgggctgaagagccaggggcaaggagagggaaagagaacgaaggggatgagaagagaggcagagctggagctgacggggagccatggacactgggatacggtggccgcacggcaggcctgaggccagggaaggtggaggaaggaagccaggaagggccctgggggagaaaagctgacaaggaggccgatttgaggtggactctccgagccgcatcctgggcttgtgggaatcgttcctttgtcccattgttgccacagctcattagccctggattttaccctaattagatccccacttgctttccaccaggatatcccattagccagggctgcagatgaccttccgctgggatcctgcccctagcccggcccctgccccacgcgcaggccctgacctcactgcctgcctcctctaccccaggaggctcttatctccccagccccgcccttctccccacatcccacccttaccccagcccggtctacagtgctcaaggcgggtgatggaatttccctggggggtgtcggcttcaaggagtccagcttatcttcctgccttccgccatcactgttgagtcgagaggaatgagattggggtcactgggaggcctctggagccgaactgcaaaccatggggtttaaagccagggtggagctgggagaggcccttgttcaactctgtttactgaggcccctaccctgacggcccacgccccctcgcctaactgctctttacctgcccccattttatgatagagcctgggtctttattcttccgcatgctgtgttaaggggagactaggctccctggactaggtcactccctggctgtgttgtgcacgcacagttccccgc

SEQ ID NO: 1342 - DNA, 2500 bp, Homo sapiens
acaacataccaaaacatataggatacacaaaagcaatgcttggagggaaattatagaggtaaacacgtatatttaaaaatagattaagtccttttctgtgcagaagctctttagtttaattagatcccattcatctatttttgcttttattgaatttgcttttggcgtcttcatcatgaaatctttgcccatgcccacatcctgaatggtattgcctaggttgtcttccagggtttttatagtttggggttttacatttaagtctttaatccatcttgagttaatttttgtatatagtgtaaagaaggagtccagtttcaattttctgcatatggctatccagttattccagcaccatttactgaatagggaatcctttccccattgcttgtttttctcaggtttgtcaaaaatcagatagttgtaggtgtgtggtcttatttctgggttctctattctgttccattggcctatgtgtctgtttttgtaccagtaccatgctgttttggttactgtatccctgtagtatggtttgaagtcgagtagcatgatgcctccagctttttgcttaggattgccttggctattcagactcttttttcaacggagtaaacagacaatctacagaataggagaaaatttttgcaaactctgcatctgacaaaggtctaatatccagcatctataaggaacttaaacaaatttaccagaaagaaacaaacaacaccattaaaaagtaggcaaaggccatgaacagatacttcctaaaagaagatacagatgtggccaaaaagtgtatgaaaaaaagctgaacatcactgacccttggagaaatgcaaaccaaaaccacaatgagataccatctcacaccagtcagaatgtctattattaaaaagtgaaaaaataacagatgctgatgaggttgtggagaaaaaagaacacttacacactgtcggtaggagtgtaaattagttcaaccattgtggaagacaatgtggcgattcttcaaagaactaaggtcagaaataccattccacccagcactctcattactgaggatatacccaaagaaataggaagtgttctattataaagacacatgtacatgtatgttcattgcagcactattcacaatagcaaagacatggaatcaacctaaatgcctgtcaatgacagactagataaaatatggtacatttacgccatgaaatatatgcaggcattaaaaaaacgagatcatgcccttcgtagggacatggatggagctggaggccattatccttagcaaactgacacgggcacagaaaaccaaataccacatgtttttgcttacaagtgggagctaaataatgagaacacatggacacatagaggggaacaacacacactggggcctgtcagaaggtggagagtgggaggagggagaggatcaggaaaaataactaatgggttctagacttaatacctgggtgatgaaataattggtacaagaaaccctcatgacatgcatttactaacaaacctacacatcctgcacatgtactcctgaatttaaaagttaaaaaagacctcaaattaataacctaagcttccactttaagaaactagaaaaagaagagcaaactaatcccaaggcaggtgtaagtaaataataaatattggagcagaaataatgaaatcgagaatagtaaaacaacagagaaaatcaatgaaataaaaacttggttctttgaaatgatcaaccaaattgacaaacatttaagtgggctgaccatgaacaaaagagagaagattcacatcacttaagtctggaatgaaagaggggacattactactggtgttataaaaataaaaaggtttacaagggaatactatgaacaattaatatatatgccaaaaaattagataacctagatgaaatggacaaattgctagaaagacacacactaatgaatttgactcaagaagagataataaatcttcataggcctataacaaataaggagattgaattactaatgagaaaacttcccacaaagaaaagtccaggaccagatgatttcactggtgaattctaccaaacatttaaagaagaattaacaccaatttttcacacattattcaaaaaaatagaagagggaacactttctatgaggctaacacattctttgaggccagcatatttaaatcaggcaaagacatcacaagaaagggaaatgatagagcagtatctcttatgaatgtaggtgcaaaatcttcaacaaaatactagcaaactgaattcagccatatattttaaaaaaaaatatacaccaagactaagtgggatttatctcaggaatgcaggtttgtttcaatatatgcaaattaatcaacgtgatgcaccatattaatagaatacagagaaaaaccctacatgatcacctcaatagatgcaaaaaaaagaaaaaaccaacaaaaaaagccaaacatttgacaaacaccaacaccatttcatgat

SEQ ID NO: 1343 - DNA, 2833 bp, Homo sapiens
accgcatgtaaacagtcccagccggcccagcccggccccggaggagcccgcgcaggccgagccgagcgccgcgctgcccgcccgggaggagggcgcctaggagcgggagggcgggcggcggcgggaggcgggcgcggggccgcgatggatttccagcagctggccgacgttgcggagaaatggtgctccaacacgcccttcgagctcatcgccaccgaggagaccgaacgcaggatggatttctacgccgaccccggcgtctccttctatgtgctgtgtccggacaacggctgcggcgacaattttcacgtgtggagtgagagcgaggactgcctgcctttcttgcagctagcacaggattacatctcctcctgcggcaagaagacgccccacgaagtcctggaaaaagtcttcaagtctttcagaggacttatctcagctgtacatgctctgcctgtggagacatggcttttctttgtgctgtggcagactggggctttggaagtggtgtatgtttaacttacctgagagtgagagatgtgtaggaagaatagctggaagaaagtgaaagatgagtgccagtacttttggcctgttatccagtagagagaaagtgacagtgaaagtaacgtgagagagaaagagtgtgtgtgtatatgtgagagagagaaagaaagagaaaggaatgcttgattgcttgttgttcactgggccagctctgaaatccaaaatcatgccttgataacattacaaaaccgtgatcctgggtttgagtgaatcctagagacattgttcttatggccgcctggtttccgcagcctgatcaccatatcgagcagacgtcaaggaatcagagtgaagtacggagccagggagggaggtgaggccccgtgtagtgcctgtcaccactgtggattcacctgcactcaggtgtccactcctgtctcccaggcccaaagcagcacatggtgcaatggaaaagtctcttatgtagggatcctccttgtgtcctggtgccagaattagatttccagtgtacttcaacgaaaacttctctcctttatagttgctgtcatctttcatgtataaacagaaaccgtctctagcacaatatatttctgaatattgtttctgtttcataagagcacaatgtacatggacctaggggagctgtggtcccaagtgtcattggaatttatattttaggaataggctttgcatgttaaaattcacaagttgggaaactggtatgaacagatctgatttcttacagagaggcatgaaggaataggcaggacttaacttggggtgggaggagatgaataagggagaatgggagagttggggtctgacagttaccacctgagccccaggaaaactgttttcattttcacggctgtctcactgggggcctgctttcctcaaaggaactgactgtatgttgagaggcaatgccttgtgttggcatggctttgccactttaaaagtgccccccagccaaggagaccaacaggaaccctgctcatctggtagggctctttccttcagtaaaaccagctgccagcctgagaagcctgtctttcccaaatgcaggcagatctgagaggggctccaggcacccggcaggtaaatcacaaagcaaacttgggtgtccttggcagcggggaggaagcaggagtgccccctcaggccagagggcagggccaacctcctcactgtgcttcaaggttgtagaaagagcacaattaatgcttaagcgatcacagacccctctcccctgcagtgggtgttagctccaaagagatgccattgctgatcacccagtcttcggagaagcctaaaatttctttgaattaaaaactgattctttttcataaagacccagtcacttctcccagtttagtgataacaggtatgacacaagaagctgaagtcttttagattttatagagagtaattctgaaacctgccagaatgctggtagcctgtggtgtccatggcaatgggtgtccatggtaaaatatctatagcttctgctcactgggcaaatataaaagacaacatattatttaacataatatgttgtcttttatatttttatttaaatctggattacgaaaatatagtacccatgagcatttcatgttagaaaccccatttaaagcactataaggctgaataggcacaagcgattaaaagtagatgccaggccacataaaaataaatgttttaatttacttagagctgtattcaagttgtttgataccagacagaaagctgacagtctgttctttgtaaactgcctttccctgtttttctgttttgttttgtttctcaagtttcattttttactaagccccttctgacacctaggcagataaagataagagtagtgcgcagtacaaatgtcagctctgaagaggaggaagtaaatcttcaatgctagggcagatcttcactatccgtgatccagtcttaatttgagcatgagagcaaaatttagtcatctacacaagaagcaaaagcaaggaatagttgttgggtttttgttttttggttgttgtttttttttttttttaggcaagaagtgttgccggtagggtatgtgtgctttctttgccttcctatttcctttcaaagaaatctcttgtaaattacaaaactgtgaattgggttgccaaaaactgttgcccttcgttagatgcttcaaacagtgtaaatcctatactgcaccctgtccacctctgctccctcctccctcccctgagagtgaggacctcatccgaccatgtaattaccattcgcttgctattaaagagcctttcaaactctg

SEQ ID NO: 1344 - DNA, 3362 bp, Homo sapiens
agtcctccgcttgtactgagacgcctgggatctcaaaatggcggccccgtgcggaaacagcgtctgggagcagccatgttgcctcctgaacaaagccgctgaagatgaagaatgggcaaaatcgccccatacggaacagcgcagcctcgggagcccgttacctggctcgcgaacacgaagcgggagagttcgccaatatggatgtgacagcggttcccattaagcggtgataggatttttgggacctgataatcaagctagggaccctgggatggcacaaatgaaacaatctctctatcatgatattcccccgttgctctgaatgagttcagctctgtctgcatgatctatcccagactgaaaagagtttaccagctaagtactttcctgcaatgtagtatattcccgtttattgttccaacctgtcagtaattttttatacaggcaactgccttgttgaaaatcagcaataaaaatttaaaccaaagaaatcttaaaatcagcaataaaaatttaaaccaaagaaatcttaaaatcagcaattttaatccacaaatattgatttatcaagagaatttgctggtttggagtaaaatataaaagagcttgtcttactcagtttgggctgctgtaacagaatgccacaggtggaggaccttaaacagcaaacatttatttctcacatttctggaggcagagaagttcaagatcaaggtgccagcaggtctagtgtttgctgatagcactcttcctgttttgtaaacttctcattgtatcctcacaaggccaagagacaaatcatctctctgatatttcctgttgtaagggcattaatcccatttattagggctctcatttcatgacctaattacctcccaaagaccccacttcccaatacaatcacattagaattgcaacatttgaattttggagggacaaacattcagtccataacagagctcttagaattttgtaggctgctttggtttaggaaataagggaatacactccttaattttcctcttggtcactcccattcttgtctccagggaacatctgcagttaaatatatatttctccatgatatccatgattattgtcttaagatagttctacaaatagaaattcaaatagaattgctggttcaaaggggaacaattaggtgtttgtaaatccacaggaaacatatctgcatttatctaattaaaaatacaccttgccctatgtgatcaaattatacacctagttctgtatgatcatatcatagtcacaaaaggactaaaggtggatacctccttcacatggtgtttgctataagggtcaaacgaccttctcccacaggatggcctatcagctacctgacttctggtggtggttgtttagagactggtgaatgttagttctggcccataaaaactccattctttcttccagacctgactcctcagacctctgccctatcggaagggaagcagaaaatgatcaggtctcagggtccagtgtcatttgaggatgtggctgtggatttcacccaggaggagtggcagcaactggactatgctcagaggaccctgtacagggatgtgatgctggagatctatagccacctggtctcaatgggatatccagtttccaaaccagatgtcatctccaagttggaacaaggagaagagccatggatcataaagagacacataccaaattggatctatccagagagagtagacttgacacccctcaactggatatatttagagatgttttcttccataaggagacactggaaagtattacagggggtcattcattgtactccattttaaaagtctggcaaggtgatgaccagctggagagagatcaggaaaactgagacaaatttgtcaggcaagtcgtagtcatcaacaacaaaagaatatctgaagagtcaggtcatccatataatatatctggaaaaatatttcatgactgcacagacctagatacttcaaaacaaagactgtgtaagtgtgattcatttgaaaagaccttgaaaccaaatattaacctagtgagttataataggaattttgcaagaaaaaacattgatgagaattttagatgtgggaaaacacccagctacagttcttgctattctaagcatgaaaaaattcatagtggaatgatacactgtgaagctactcattgtggaaagattcttagccataaacaatctcttattcattatgtgaatgttgaaactggggagaagacctatgtatgtgttgaatgtggaaaatcctttctcaagaagtcacagattattatacatcaaagaattcatactggagagaaaccttatgattgtggtgcatgtggaaaagccttcagtgagaagtcacaccttattgcacatcagagaactcatactggggagaaaccttatgattgttctgaatgtggaaaaggcttttctcagaaatcatccctcattatacatcagagagttcactctggggaaaaaccatatgaatgtagtgaatgtgagaaagccttctcccagaaatcacccctcattatacatcagagaatatatactggggaaaagccctatgaatgtagagtgtgggaaagccttttcccagagtcacagctgattatacatcacagagctcatactggagagaagccatgtaagtgtactgaatgtgggaaagcattctgttttatacattaaagaattcacactggtgagaaaccctacaaatgtgctcaatgtgaggaagccttcagcaggaagtcagaactcattatacatcagataattcatactggggagaaactgtatgaatgtacagaatgtgggaaaacattctctcgcaagtcacaactcatcatacatcagagaacccacactggagagaaaccctataaatgtaccaaatgtggaaaatccttctgtcagcagtcacatctcattggacatcagagaattcacacaggagaacaaccttatgtatgttctgaatgcgggaaagccttctctcagaagtctcacctcccagggcattggtgaattcatacaggagagaaaccttacatatgtgctgaatgtggaaaggccttttctcagaagtcagaccttgttgtacatcagataattcatactggagaggaacctgatcgatgtactgtatgtgggaaggccttcatccagaagtcccaactcactgtacatcagagaattcatacactaatgaaatcataagaatggtctgaacacagaaaagccttcagggtcagttcaagccttaatagatagtgcaacaaccaatggatttgatgattttggggactacatctttgttgataaaattttacaagtg

SEQ ID NO: 1345 - DNA, 2834 bp, Homo sapiens
tgactgttattgacatgattggcgtggaaggatttggagcaagagagttattaaaagtgggtggaagacttcctggtgcaggaggctcactccgatttaaggtgcccgagtccacgctgatggactgccgtagacgactgaaagacagtaagcaaattttatctattacaaagaactttaaagttgagaatattggacctcttcctataactgtttcgtctctgaaaattaatgggtataactgccaaggttatggattcgaggtgctggattgtcatcagttttccctggacccaaacacatcccgcgatatcagcattgtgttcactccagactttacctcctcctgggtaattcgggacctaagtcttgtaaccgcagcggacctagaatttcgcttcactctcaatgtgactctccctcatcacctgttgcccttgtgtgcagacgtggttccaggacccagctgggaggagtcattttggaggctcacggtcttctttgtcagtttgtccctgttgggtgtgattttaatagccttccaacaagcacagtacattctcatggaattcatgaaaacaagacagaggcaaaatgctagctcctcttcacagcaaaacaatggtcctatggatgtaatcagcccccattcttacaaaagcaattgcaagaactttctcgatacatatggcccctctgataaaggcagggggaagaactgccttccagtgaacactccccaaagcaggatccagaatgctgcaaagaggagcccagccacctatggtcattctcagaagaagcacaaatgctcagtgtattacagtaaacacaaaaccagcacagctgcggccagcagcaccagcacgactactgaggaaaaacagacttcacccctgggcagctcactgcctgctgctaaagaggacatttgcactgatgccatgcgtgagaactggatcagcctcagatatgcaagtggcataaatgtcaacctgcagaagaatttaacccttcccaaaaacttactgaataaagaagaaaacacactgaaaaacacaattgttttcagtaatccttcttcagaatgtagtatgaaggagggaatacagacatgtatgtttcctaaggaaactgacattaaaacttcagagaacacagccgagttcaaggaacgggagctctgtccactgaagacctccaagaaactacctgaaaaccatttaccaagaaactcacctcagtaccaccagccagacttgccagaaatttccaggaaaaataatgggaataaccagcaagtacctgtcaagaatgaagtagatcattgtgaaaatttgaagaaggtggacacaaagccttcttcagaaaagaagattcacaaaacatctagagaagacatgttttctgagaaacaggacatacctttcgtagagcaagaagatccttataggaagaaaaagcttcaggagaaaagagaaggaaatttacaaaatttaaattggagtaaaagtcgaacatgtagaaagaacaagaaaaggggtgttgctccagtctcaaggcctcctgaacagagtgatctaaagcttgtgtgcagtgactttgagaggtctgagctgagcagtgacatcaatgtaagaagctggtgtatacaggaaagcactagggaggtttgtaaagcagatgccgaaattgcaagcagtttacctgctgcccagagagaggcagaaggttactaccagaagcctgagaagaaatgtgtggacaagttctgctccgattccagctctgactgtgggagctcctctggcagcgtgcgtgccagccggggcagctgggggagctggagcagcaccagcagctccgacggggataagaagcccatggtggacgcccagcacttcctgccggccggagacagtgtttcacaaaatgattttccttctgaagctcccatctccttgaatctttctcataacatctgcaatcccatgaccgtgaatagtctcccacaatacgcagagccttcctgtcccagccttcctgccgggcccacaggtgttgaagaagataaaggtctttactcacctggagacctgtggcccactccgccagtgtgtgtgacaagcagcttaaactgcaccctggagaacggcgtgccttgtgtgattcaggagtcggccccggttcataatagtttcattgattggagtgcaacatgcgaaggccagttttccagcgcatactgtccattggaattgaacgattacaatgcctttccagaagaaaacatgaactatgccaatggcttcccctgtcctgcagatgttcagacagactttattgatcacaactctcagtctacctggaacaccccacccaacatgcctgctgcctggggacatgccagtttcatcagctctccgccctacctcacaagcacccgaagcttgtctccaatgtctggactttttggttccatctgggccccgcaaagcgatgtgtatgaaaattgctgccccatcaaccccaccacggaacattcgacccacatggaaaaccaagcggtcgtgtgcaaggaatactacccggggttcaacccgtttcgcgcctatatgaacctggacatatggactaccacagcgaataggaatgcaaatttcccactgtctagagactcgagttactgtgggaatgtgtgaaaataattggatttttaaacaatgtgaataaagaggcttgtgttttgattactagtgtaaactggttattgagatagattatgacattggtggatattttggcacttttatatgaaaataaattttttaatg

SEQ ID NO: 1346 - DNA, 3783 bp, Homo sapiens
gcatgaccctgacatcggcagcgggagcggcggccagactctcttggaagtttaggatatttcacagttctgaatgttagccactgaaaatgccagtagatgatgaagcctctgaagatgacacggattcatttttctcaaacagcccaagaacctttattttccaataagagaatataacaatttctgtacactatggaagagtttgacttggtgaaaaccttacacaaaacttcatcttctgtaggatctgatgaaaattctcttcattctcttggactgaacttaaatactgatagaagtagtccccaccttagtacaaatggggtatcctctttctcagggaagaccagaccatctgtaattcaaggtacagttgaagtcctaacttctttaatgcaagagctacaaaacagtggaaagactgattcggaactttggaaaaactgtgagaatgtagagtaagcgaaatgaaagattacctggtttaagaattcgatagcagcaactgctaaggaccaggtggttacagctattcaatttggtggaaaaacaatgccaagaacagatagttgcccagcaggagcagttccacaaccaaattcaacatatacaggaggagataaaaaatttagtcaaattacagactagtagtgcttccttagcttcctgtgaaggaaattcttcaaacaaacaagtatcttcggaaagtcaaatgggttttttttctctaagcagtgagagaaatgaatctgttatccattatcctgaatccacagaacctgaaatacagcaagaaatgtccacgtcacaaccagactgcaatgtggatagttgctcagtaagcagtggatatggcaccttttgtatctcagaattaaatctgtacaaatctaaagaccctaaggagttcatggagcacatagatgttcccaaaggacagtatgtagcacctgcggtgccggctgagtcacttgtagatggtgtgaaaaatgagaatttttatatacagactcctgaagagtgtcatgtgtctttaaaggaagatgtatccatttctcctggtgaatttgaacataattttcttggtgaaaataaggtttctgaagtatacagtgggaaaacaaatagtaatgctataacatcatgggcacaaaaactgaagcagaaccaaccaaagagagcacatgtagaagatggaggttcaagatctaaacaaggaaatgagcaaagtaagaagacaccaattgagaaatctgattttgctgctgctacacatcctcgtgctttttacctcagtaaaccagatgaaactccaaatgcttggatgtctgattcaggaacaggattgacttactggaaactagaggaaaaggatatgcaccactctttgcctgaaactttagagaagacgttcatatcattgtcttccacagatgtgtcaccaaaccagtctaatactagtaatgagatgaagctaccgtcactgaaggatatttattataaaaaacaaagggaaaacaagcagttacctgagaggaatctcacttctgcttccaacccaaatcatccaccagaggtaaagttgtccacattctgccgagtgaacgtgaacaatgcttcctgactctaacttttacctcaagcttcattttccctaggagatctaaagcctactcacttcaaaacaagcaaaacaaagccgagttctgagggattaggcagaatctgaaggaaaagcatgctcgacacatagcagatcttcgagcttattatgaatcagaaataaatagtttgaaacagaagctggaggcaaaagaaatctctggagttgaagattggaagataaccaatcaaattcttgtagacagatgtggccaattagatagtgctttgcatgaagctactagtcgcgtgagaacacttgaaaataagaataacttactggaaattgaagtgaatgatttgagagaacgcttcagtgcagccagcagtgcttccaaaattttgcaggaacgaattgaagaaatgagaacaagcagtaaagaaaaagacaataccatcattcgactaaaatctagactgcaagatttagaagaagcatttgagaatgcttacaaactctcagatgataaagaagctcaactaaaacaagagaacaaaatgtttcaagatcttttaggagagtatgagtcccttggaaaagaacacaggagagtaaaggatgcattaaatacaactgagaataaattgcttgatgcatatactcagatttctgatttgaaaagaatgatttcaaaacttgaagctcaggtcaagcaagtagaacatgaaaatatgttaagccttcgtcataattctagaattcacgtgagaccctcgcgtgccaacacactagcaacttcagacgtcagcaggcggaaatggctgattccaggtgcagagtattccatctttactggccagcctctggacacccaggacagtaacgtggataaccagctggaggaaacctgtagcctagggcaccgttcacctctggaaaaggattcttcacctggaagttcatcaacaagcttgttgataaaaaagcaaagagagacttcagacacgccgatcatgagagctttaaaagaactcgatgagggaaaaatatttaaaaattgggggacacagacagagaaagaggacacctcaaatataaatcctcggcaaactgaaacttcagttaatgcaagtcgttctccagaaaagtgtgcccaacagagacaaaagagacttaattcggcctcacagagatcatcatctttaccaccttcaaatcgtaaatcaagtactccaacaaaaagagagattatgctaacaccagtgactgtggcttatagtccaaagcgatcccctaaagaaaacttgtccccaggatttagtcatctgcttagcaaaaatgagagcagtccaattcgatttgatatacttttggatgatttagatactgttcctgtgtctacattacaacgtaccaatccaagaaagcaactccagtttcttcctctagatgactcggaagaaaaaacttattctgagaaagccaccgataaccatgttaatcatagctcttgccctgaaccggtgccaaatggagtgaagaaagtatctgtgagaacagcctgggagaagaataaatcagttagctatgaacagtgtaagccggtttcagtcactccacaggggaatgattttgaatatacagcaaaaattcggaccctagctgaaacagaacgattttttgatgaacttacaaaagaaaaggaccagattgaggcagcactaagcaggatgccttctcctggaggacgaatcactttacagacaagattaaatcaggaagccttggaagatcgtttggaaaggattaatcgagaactgggttcagttcgcatgacgctaaagaaattccatgttttgcgcacctctgcaaatctttgagatttgtagccattaaattttgagacatttttgtttgcactaatgtataattatgcagtcagaaaaggcaaactattttgtactgtttataagccttcaaacagtagttttacaatcatgctattcttacacttgctattttatacttcaaatagccacatattttcaagatatttttgttatgctcaggaatctcttgtatattttactatttaaaaagcattatttttaaatagtatctgtctccaatttatatcaagaataaggaaatataaacagaggaagcagcttgtttct

SEQ ID NO: 1347 - DNA, 2666 bp, Homo sapiens
aatcgcccggaacatggctgccgccggccgccaacctttgggatatgagattgaaaatgacgactcggaattttcctgagagagaagtaccctgtgatgtagaagtggaaagattcacaagggaagttccctgcttgtccagtttaggtgatggttgggactgtgagaaccaggagggacacttgaggcaatcagctttaactctggagaaaccagggactcaggaagcaatttgtgaatatcctggttttggggagcatttgattgcaagctcagaccttccaccgtctcagagagttctggcaacaaatggtttccatgcacctgactcaaatgttagtggtctggattgtgaccccgccttacccagctatcctaaaagttatgcagataagagaactggtgacagtgatgcctgtggaaaaggcttcaaccattccatggaagttattcatggaagaaatccagtgagagagaagccctacaaataccctgaaagtgttaagtcttttaatcattttacctctcttggtcatcagaaaataatgaaaagaggcaagaaatcgtatgaaggtaagaattttgagaacatctttactctgagctcatcgcttaatgaaaaccagagaaatctccctggagagaaacaatatagatgtactgaatgtggcaaatgcttcaaacggaactcttctcttgttttgcatcaccgaactcacaccggagagaagccttatacttgtaatgagtgtggaaagtccttctccaagaactacaacctgattgtgcatcaaagaatccacacaggagagaagccctatgaatgcagtaaatgtgggaaagctttcagtgatggctcagctctgacacagcaccagagaattcacacaggcgagaaaccttatgaatgcctagagtgtggaaaaaccttcaaccgaaattcatccttaattttgcaccaaagaactcatacaggggaaaaaccatatagatgtaacgaatgtgggaaacccttcactgacatctcccaccttacagtgcatctcagaatccacaccggtgagaagccctatgagtgtagcaaatgtggaaaggctttccgggacggctcgtacctcacccagcatgagaggactcacactggagaaaagccctttgagtgtgcagagtgcgggaaatccttcaacagaaactctcacctcattgtgcatcaaaagatccattctggggagaaaccctatgaatgtaaagaatgtggcaagactttcatcgagagtgcgtacctcatcaggcatcagaggattcatactggcgagaagccctatggctgcaaccagtgtcagaaacttttcaggaatatcgctggcctcattaggcaccagaggactcatactggtgagaagccctatgagtgtaatcagtgtggcaaagccttcagggacagctcctgtctgaccaagcaccagagaattcacactaaggagaccccatatcagtgtccagaatgtgggaagtccttcaagcagaactctcacctggcagtacatcagagactccatagcagggagggtcccagccggtgtcctcagtgtggaaaaatgttccaaaagagctcatcccttgttcgacatcaaagagcacacctgggagagcaacccatggaaacataatggttgggggccacatgagtcttccagttcactctcactcctgtgtttaggaggcgtgtcttagatctgactcctctctggtcagtagaaaagaatcctttaagctatccagtgaattgatgaatgtgagacattgctgagccacactgttaagtctgctcattggggaactccagagacaacttaggatgagggcagaaaagtctttggggatgattcagtctgtaccagacatgacaacacacacactggaatgaaatgtgcaaacatgggggtgacaccacagagagaacctgtgaatgcattcagaacatgattggaatgaagagccctgtagtagggagtttccaccttgtacgtaagcaaacactgaatcaactttttttttttttcggacagagtctcactgtgcagtggcatgatctccactcacagcaacctctgcctcccaggttcaagaccagcctggccagcatggtgaaaccccatctctaccaaaaatacaggaaattatctgggcatagtggtgtgtgcctgtaatcccagctacttgggaagctgaggcgggagaattgcttgaacctgggaggtggaggttgcagtgagctaagatcgcaccactgcactccagcctgggtgacagagcgagactccatttcaaaaaaaaagactgaaacaagcttgtgctaagatggaaagggctgcttctaacagatgtggtttgttgctttagttgttgaagcaaaaatactgagttgttatgtttatgttatcaccccaccactacctccatggttgttcatttaggatgcttctaattcagccactgtgaaccattataaaggttttattgccatgttgaaaatgtttataatatggcaaaaaggggcatcaaatagaagatttactattattccagccatgtaaaaatatgtgcacatatggatgtatgttgaaagtggatgatggagaaataaaatgtggttttctttgggg

SEQ ID NO: 1348 - DNA, 2784 bp, Homo sapiens
atggggatatgggggaacagtgaagaaaaggagggtgagagggcggcgaggcgagggccaccagcgcgtcctgaccggggtgggggcagagctggcaccggatgggaacgatggaggactggagcatgtggagaagccgtcaggtgctccagtgccggcaggtgggagggctgaggtggcacaggctgctccgccacctcggactgcggctcctactcggccactggccagagtccctccagccaactgcccctggtgagaccaccgtctttttcctcaaccctggaggccagcgactgcccaggcggcgctccgtctcacagaggcctgggggaggacaggtggccccagaaggaagtcgtgcttgatggcaaccgggacacctgcggcccatgaacaccagcgcggcctccgcccccgccccagcgtgggcctgctttctcctttgtctgtcttgggctggtagctcctctcactgcgccgcagcatctaggggtgaagcgacctcggagcccctcagccctgcccgaccctctccgggagtgcataacgcccctgctggtacccaggagccctctgccccgggggttgacttttgttgctcgctagtgatggagtgggagtggccggtggcgctgcactgaccgtccggagggcagaaagagggtggggtcccgggggcggggctgtcggcggaacaaagggctctcagaaacgtgggatacgctgtgtaacccagtatttaaaaccacacgacaggcgccccacccccccaccccgccctcggattcagttcatctattgtcaagtaagagggtgggttccaagggtggcccaagcccgagtaacaaactttcttatcttccatcgcggcgacctggaggtccgaggcttcgtgctgcggttgaagggtggggaatacgactaaaaactgcagcccagcgcgcgcgagacgacccaagacccacgcgcactcgcacgagcgcgtgcacagacttggagcacagaccctcccttcagatccgcagtctctaggtactgaggcaggaactggtctctttgttacttttcgcgcgcgcgtgtgtgtgtgtgtgtgtgagagagagagagaaagagagagagagagagactaatcctgcgtgcgtttgagggcgggaggggaaagggtgtcagaaacgttcactgcacaacctgttccctgcaattcgatgactgaagcgcgccgccccacacttcggaagggccgttggcgaggtgacgtgacctctttcatcccctggcgagaaaggccgaatgacccgggcgcacgcggcggagctcagcctgcagctgttgagcgagaccctcccagaactatcagcaagctgtcatcgcctccctttcccgctgtggggtggagggtggggggttcaagtcgattccaatgtacaaagagaagtagcgagaacaaaagcccaggcgcccccaaacatccagggcgcccagactggagctcgccggccggtattccagacccggccggcgtgcccgggtgagggtggggtctaccgagaggcagagagcagcggagggtctgtccacatgccctgctctcccggtaccaaggtctcggggcctgacctccgagtttctaatccagatcctgcagatgccgaaacgtcgagggctagcaattcccaaggtcatacagcaagttgaggacagggctcggactggaatctcgtcttttgggcacaccagacctcagggaaagtgaccgcatctcggccaaaagggctgtggcaggtgtcagcctcgaggtggcggctctggtgggaccaagctgcgccggaaggaacagagctagggcggcacccgcgcggcgagtgtagacacactcggagcggtcaccccctcgctgcgagctcccaggagcaaccctgatgctcagcgctggggggtggggttgggggccgctcagctccatgctgagtaacttgagctggccgcctgcctccttcatctaaccaattcatttctcagcttctgtttccgagccaaatctccattcagtgcccgggtgaaaacgcgtgttcaagatcatatagatagatgaaaagaccctttcctctcaggtttcttttaaaggggttggtttgggataggatgaggctggaaatcatccttctgaaagcccagagtgcccttggggacacttttggcccaagatctgctttcctttcaagcattttgctcgaattgtccccacacccctgccccttccgggcagccagtcttgttaaccggtctacatcgcacccccacccccacccccactggaattgtgatgctgcacatttttattttcacaaggagccgattttgtgttaaaatgttgacaacagccacacctttccctgaagtctttcagtttatctgataacccttaaacaaaaaaatcattcttaatccatgtagctcgcataaagagactggtacccggctttcaaagaaaaaaaaagtcgttttcagttgggtccccagcatttctgtctattcattatatgcaatgcgtctcaatctaggtcatcgtatatcaggcacgaagatttcggggcaacatatttcatgatctcttaatgttagtcttgatgatgtactaacatttaaaaattttcccttccagagacaattgtagaaatattgctgcataaaatacaattcaacatttgttttatacgtaatctattgcgtgactgaggtgagcaagatatcccttaaactattaaaattatatttgctttc

SEQ ID NO: 1349 - DNA, 3528 bp, Homo sapiens
cagtctggggcgagcgctctagtgagcgcggacggatgcttaggcagtagtcctggcagcggtagtagtggtggcagcagaagagaggaagggggagggccccgagggctacacacgctcacactttcaagttcccttggagggagaggaggtggggctgcagaaagaggaggccaggagcggtcccatccgtcccgtcccgtcccgtctccccctcttcctcttgctccttgccccccggctctgcgagagttgggggttcaggtggccgtacgcggcagtgagggcaagagggccgggagagtggggagcggaggcaggagtgcgggggaagatgcccatcctgctgttcctcatagacacgtccgcctctatgaaccagcgcactgacctgggcacctcttatttggacattgccaaaggcgctgtggagttattcttgaagctgcgcgcccgggacccggccagccgtggagacaggtacatgctggtcacctacgacgaacccccgtactgcatcaaggctggttggaaggaaaatcatgcaacattcatgagcgaactaaaaaatcttcaggcttctggactgactactctcggtcaggctctaagatcctcatttgatttgttaaatctcaatagattaatatctggaatagacaattatggacaggggagaaatccattttttttagaaccatctattttaattaccatcacagatggaaacaagttaacaagtactgctggtgttcaagaagagctccatcttcctttgaattcccctctgcctggaagtgaactaaccaaagaaccttttcgttgggatcaaaggttatttgccctggtgttgcgtttgcctggagtggcttctaccgaaccagagcaactagggagcgtaccaactgatgaatctgccatcacacagatgtgtgaagtcacaggaggtcgctcctactgtgtgagaacacaaagaatgttgaatcaatgtttagaatctctagttcaaaaagttcagagtggtgtagttattaattttgaaaaaacaggaccagatccacttcctattggagaagatggacttatggattcatccaggccaagcaattcatttgctgctcagccatggcatagttgtcataaactcatttatgtacgacctaactctaaaactggtgttcctgttggacattggccaattccagaatctttttggccagatcagaatttaccttcactacctccacgaacatctcatcctgttgtgaggttctcctgtgtagattgtgagccaatggtaatagacaaacttccttttgacaaatatgaacttgagccttcgcccttaactcagtatatcttggaacgaaagtctccccatacctgctggcagatgacttgtttaaagttcacaagcttaagccaaatctgaagtggcgacaggcttttgacagctacttaaaaactctgcctccatactacctattaaccaaactagagtcagaacgaatactagcatcagtggggaggaaacctccccaggaaattggaattaaagtgaaaaatcattctggtggtggcatgtccttgactcacaataaaaattttagaaaactattgaaagaaatcacaggggaaactgcacttagactgacagaattgaacaccaaagaatttgctggcttccaaattgggctcttaaacaaggatttgaaacctcagacatacagaaatgcttatgatattccccgtagaggtcttttagaccagctgaccagaatgagatccaatctgctgaaaacgcacaagtttattgttggacaagatgaagattcccttcatagtgttccagttgcacaaatgggtaactatcaggaatatctgaagacattggcttctccactgcgagagattgatccagaccaacccaaaagactgcatacttttggcaatccgtttaaacaagataagaagggaatgatgattgatgaagcagatgagtttgtagcagggccacaaaacaaagtgaaacgtccaggggaacccaacagtcctatgtcatctaagagaaggcggaatgctactatcattcacgatggccatgaggagaagatggaaaatggtcagatcacacctgatggcttcctgtcaaaatctgctccatcagagcttataaatatgacaggagatcttatgccacccaaccaagtggattctctgtctgacgacttcacaagtctcagcaaggatgggctgattcaaaaacctggtagtaacgcatttgtaggaggagccaaaaactgcagtctctccgtagatgaccaaaaagacccagtagcatctactttgggagctatgccaaatacattacaaatcactcctgctatggcacaaggaatcaatgctgatataaaacatcaattaatgaaggaagttcgaaagtttggtcgaaaatatgaaagaattttcattttgcttgaagaagtgcaaggacctctggagatgaagaaacagtttgttgaatttaccatcaaggaagccgcaaggtttaaaagacgagtcctaattcagtaccttgagaaggtactagaaaaaataaattcccaccaccttcacaacaacattagtcacatcaacagcagatcatcatgttagtgcaaagaccagtgagaaaaaaatgacaagttttctgtgctgtaggatggaacaggatattgttgaagcctcctggaatgtttgagtcaagggaattgctttccagatgctaagaagcagcagtggggcttttgaattttatgattatctggcagtgaaagctgggcttttgccttaataattttttaaagtatgaattgttttgttttgttttcctcaattgaggaagctgatgttattaattcacaggctaaattcggtaaacaccactgcccctaccacgggtaatgagaggtcactcacttgaactttgccattccaggcattctcagagtggcgaggggccacctgcaagtggagcacaacttggtgctcttactgtgtccttcagaaagaataggtgtacagaaaggaaatggcaatcttatgtgtgctgaacaaagttttcaacaattcctagttgtgccttttaaaccatgcaatattcaggatagtttgaatcaaagaagtaagaagctgctatttgggtaacttatttctctgtgggaaggggcagggagagtcaccaaacaatctacctccaactctcttctcttttgtctagagacattacaaagtgcacttgaggctgcccccaacctctgacatttgttcttgcatgtgatgatagaaagtcttcagatggacttatacattctgtgctttggaagcacaagaagaacaaaatatgtgtatatttcctttaatgtttatacaaaagtttatatggagcagtattgttatgtttgtatgaatttgcaaaaattaaagtgtacaaagagattttgattttgcatatataaaataaatcattttattgattttcacaagttc

SEQ ID NO: 1350 - DNA, 3646 bp, Homo sapiens
tttatgcccttgaccttgactcaccatgggctgctggggtgtcgggagaagccacacccaacatgcccattagcagaggctgctgctgatgtggcagctgctccctaccacccgccctggctccccagctgcaggttgcacaccctcagcctgagaatgtaaaatagggcagtgcccagctggggaggtagaggaaagtgctagagtacatggtccgtgtgtggcctagctcattccatgtcagcatttggtgttactcctgtccaaattctgtttgcagacttgtttcatgatgatgctctggaatgcttggggactttgggtggaggaggatgttacttcattttataaagaggaaggggcctgggagacttgggaaaatgtttctggagaggctttcagagtggctggaaaaggctcttgttgctgtaatttagagaggagctctgtgtccttggccagtcaagtaagttcctggatctttggcaaagccagaggaagaaaggagctacctgccctttcccgggcatgcttggtgactcagattgatcttggagtgtgcagtggcccttctaccctgcacctgacctcatgatcccctccacctgcactggtgtgcattactgaagcaagggtcctgtggacatcttgcattttgggcactgctagggggtctgggctgcttggaaggagccatggcctagggttcagggaactagactctatcccagttgggttcagactgctgtgactgtggacacgatgctccttgttctgggctccagttttcccatttgtgagatgaggcaacttccaatgcttctctaggccctgcacgtaagtgatttttccagttcaaagtcaagacaggtaaaagggcattcatcattgtgcctcatatcaggttttgatgaatatatgtgtgtgtgtgtgtgtgtgtgtgtgtgtgtgtgtgtagagggatggacaggatgctgtttattttccctttcttggaaatggaccttctgtcccttccatttggacaccacagtggaagctggtggcctggaaggaaggattaggtcatggacatttgaacaggtgccttgggcatgatgtatagatgcagtcatatataccttgctggggtggggtgccacctccagtggccagctccagatccaaggagcagccccctggggatggaccccattcattcatcatgactcccaacagttttcattgtggaagaagaaactttggcattatagagacatcatcacaaaacagtaaaaacaaaatcaaccctgaaccccatgcactgtgctgcttcctgagcctggccctgcatcctcatagaggtgccgggttcctattggttagttggttgtttttccgtctgagtgaatttttgccagtcttgtgagcagatgtacctgatgtattctcaatgttccaagaggttctggccttcagggtcacaggcagtagggggacagcataaggtctatgtaaaacccttccctctctgaccctctgttttcaaatctgtaaaatgggcaataagactagatgatttgtatatagcccaatgcatctctggaactctgtctaaacaccagccatctactgggaatgggccccaggactgtggtatttgcctgggccaggaaaggataagaaatcctgtcatgtgaagacagcttgagaggcttgaggaaagtggggctggggagaagcgggcttgtcagactccacccctgtttatgatcattcctgggaaggggtttctcgttctatgcaatcctaaaggacgaaactcacccatgggaggccgaattctccttgggatgaagaaattgctctttccctgtcatgagtgtccagccagggagcagggaggcagtgtcagggagggactctcatcctggaggaaatgggattccaagtcaaggatgctgaggctgtcagggagccagagaggggggtccaagtgcgggatgtgggtggctctgtggttcagtggctctgtggtagttcctagcactgcagacttcatgactccccacttaagtccaagtcacattgtctatcccagtgtgtagctctgtcaccctgcttgacacatccagtggcctacagcgactcttctctaaccccaccccctccaagctgggttctttgtggaagaaggacagggagctagagccaagccctaggcttgagagacacctgcatctataatccccgccaaggatgcccactcacctctctcatctgatcctcactctttgtggaagggaaagctcaaagggactctctctctctctctttttttttttttttgagtagtacccttgccctcttcatggccacttcaaagtgaagccagcaaagtgataatactttatcatttagtattatcataaagtattaatactttgtcataaagtcctccttgagcccagggaccatggaagtcagctagaagagccctgagcaaggagcaaggacttgggcttctccacgctttgctcctggcttgtttgaccttgactcattccccatatgtctttgaggaggctcacaaaatactaaagctgggaggaaacttggagatctataggtcaaacctccccattgggctgatgagaaaatacacgcaggcctagcatggtgcctgccaccatggtgggatccagtatgttttataaatctgaatgagtaaatggctcaccaatttatgcatagccctgcacatgagcagaatgtgacactcaaagcatccatgcagtacgcatgtaaccttgcacaggagtggggctctggtgaccgaaggttgtccaggactcttgcaggagaagcaatggagtcagtgtggtgtggggagacctactttttaacctgggcttagccacctgctctgtgatccagggcttaccttctttgggcctcggcctcctaatctgggtaatggggaggacttcattggcattgttagtcccacaggccaaggataaggttgaaatgagacggcttgtgtgtgaaaagattttggaaattacacagatgtgggcttgttattgggatgaagactgctggaagggactccttgctgtttatctactgctttgagccctcctaagttaacctgtgcctcatttgtaaaaccaccagcatcaggagtaagggggaggccagagggctcagatggacacagaattctagctttacctgcatccgctgattcagttttctgttgggatcagagtgaggatacttccatatgggtgatagcagccatgcccctgggagtcaacttcaaggatctgggacattttggtgtgcccattccttcttttcctgaactcacagtcttggggtgtttctgcacttggctatgtgtgtcttgtctgatgtctgtcttctgtagctttgcctctatcagggctggagtggtgcagcccctggcatctcagacatggttcctgcctcacttgtgggagctggaccagcctgggtttcatctcccacagtaaagctaagtaagccccacagaccttactgctactgctgctgccattaatgctgtgctcactatcttgtccaggattttaaggatgtcagactgctgtagatgactcaataaatgttttgccatttt

SEQ ID NO: 1351 - DNA, 2638 bp, Homo sapiens
ttcgaaggtactgctgctctcttccccggggttggaggaattgtatcgttgttgcatgctctttgtggatgacatggctgagccaagggagacgccagagcatcctctgaagcagattaagtttttgctgggcaggaaagaagaggaggcagtgctggttgggggtgaatggtctccttccctggatggcctcgacccccaggctgacccgcaggtgctggtgcgtaccgccatccgctgtgcgcaggcccagactggcattgatttgagcggctgtaccaagtggtggcgctttgccgagtttcagtacctgcagccgggacccccccggcggcttcagacagtggtggtgtacctgccggatgtctggaccatcatgcctactttggaggagtgggaggccctgtgccagcagaaagctgcagaggcagctcccccaacccaggaggcacaaggggaaacggagcctactgaacaggcacctgatgccttggagcaagcagcagacacttctagacggaacgcagaaactccagaggccaccacacagcaggaaacggacactgatctcccagaggcccctccaccccccctagaacctgctgtcatcgcacgccctggctgtgtaaacctgtccctccatgggattgtggaggatcggaggccaaaggaaaggatctcttttgaggtgatggtgctggccgagctgtttctggagatgctccagagggattttggctatagagtttataagatgctactgagccttcctgaaaaggtcgtgtccccacctgaacctgagaaggaggaggcggccaaggaagaagccaccaaggaggaagaagccatcaaagaggaggtggtcaaggagcccaaggatgaggcacagaatgagggcccggctacagagtcagaggccccgctgaaggaggatgggcttttgcccaaaccactctcttctgggggagaggaagaagaaaaaccccggggcgaggcttctgaggacctgtgtgagatggccctggacccagaactgttgcttctgagggatgatggagaggaggagtttgcaggagcaaagctggaggattcggaggtccggtccgttgcctcaaaccagtcagagatgtagttctcttcacttcaggacgtgcccaaggagctggatccctctgctgtgctccccttagactgtctgcttgcttttgtgttctttgatgccaactggtgtggctacttgcaccggcgagacttagagaggatcctccttacccttgggatccggctcagtgcagagcaggccaagcagctggtcagcagggtggtgacccagaacatctgccagtaccggagccttcagtacagccgccaggagggcctggatggtggccttcccgaggaggtgctcttcggaaacctggacctgctgccccctcctgggaaaagcacgaagccaggtgctgcccccacagaacacaaagccttggtgtcccacaatggcagcctgattaacgtggggagcctgctgcagcgcgcggagcagcaggacagcggccggctctacctagagaacaagatccacacactggagctgaagctggaggagagccataaccgtttctcagccactgaagtaaccaataagacgctggcggcagagatgcaggagctgcgagtccggctggcggaggccgaggagaccgcccggacggcggagcgacagaagagccagctccagcggctgctgcaggagctccgcaggcgtctgacccccctgcagctggagatccagcgggtggtggaaaaggctgacagctgggtggagaaggaggagccggcacctagcaactgacggcctcgcacggaactgccatcctgtgagggcagcggtggcgcccggcaaagttggagcccttgcggtaccagaaagcagcgagagcgagacctgggagccagggcaggggtggctgaccccatgctcagcctctaggggacggcaggccatcaggctgggggctgtgctatgtgggatggatgtgtgaggaaccccggttccacttaacaactaaatacaacatcttttgcacccctagaatgtcattttgccctcaaccttggtatttctcctggggcccttttagtcttgtgctgactttctcctgtcctcttccagtttggaataagacaggggagaaaaaggcttttcgagtgtgggacaaggtctgatgtcagtgaacggaattgaagagcaagacatggagcctggctggggctaagcagccccctcctccggatggcacaggctctgctaggttccggacacaggcttctgggggaagggtctcccttggccatcacgggaatggagtccatgctagaaagagctcagtgttgggctgggtttgccagtagaacactgcgttccagtcaccccggtcttgccagaagaaaccagcacctctttcccgtggctcctgtgttcagaatgtggtattggctctggcccagccttctcccctgttacccataattcttgcctctttccataatccgtggtttcagtttgactttgtatataaagttggggttttttttttttttttttggcttgttttttaaataaaccaaagtcaaaaac

SEQ ID NO: 1352 - DNA, 3793 bp, Homo sapiens
agtgccctgggacacctcttcagtccgtggaccttcccgctgcacactgccctccgaagtcggggacgcgggcccgtgagatggaagattttcgaggtatagcagaagaatcatttccaagctttctcaccaattcattatttggtaacagtgggattttggaaaatgtcactctttcttcaaatcttggcttgcctgttgctgtttctacacttgctagggatagatccagcactgataacaggtatcctgatatccaggcatcttacttagtagaagggagattttcagttccatccgcgtcatctcccagaagccagagtgatgctgaaccaagagagaggttacagcttagcttccaggatgatgattctatctctaggaaaaagagctatgtggaaagtcaacgtttgtcaaatgctctcagcaaacagtcagctttacaaatggagacagcaggaccagaagaggagccagccggagctacagaatccttgcagggccaagatctcttcaacagggcttcaccactggaacaagcacaagactcacctattgattttcatttacagtcatggatgaataataaggaacccaagattgttgtgcttgatgctggaaaacattttgaagacaagactctaaagagtgacctaagccacactagcttattagaaaatgagaaacttatcttaccgacaagcttggaagattcttctgatgatgatattgatgatgaaatgttttatgatgatcatttggaggcttattttgaacaactggcaattccaggaatgatatatgaagacctagaaggaccagaacctccagaaaaaggttttaagttacctacaaatggtcttagacaggcaaatgaaaacggtagcttaaactgcaagtttcaatcagaaaataacagctctctgatttccctcgactcacactcttctgaaacaactcacaaagagtctgaggaaagccaagttatttgtctacctgggactagtaattctataggtactggagatagtagaaggtacacagatggagagttctttgctcaaagatctgaagctcttggttgccttggtggtggtaacaatgtgaaaagaccatcatttggctattttattagatcaccagagaagagagaacctattgccttaataagaaaatctgatgtatcaagaggtaatttggaaaaagaaatggctcatcttaaccatgatctatattcaggagatttaaatgaacagtcccaggcacagctaagtgaaggatcaattacacttcaggttgaagcagtagagagtacttcacaagtggaagaaaatgatgtgacgttaacggctgataaaggcaaaacagaggacactttcttcatgagcaacaaaccccaaagatacaaagacaagctaccagatagtggtgattctatgcttaggatcagcaccattgcttcagccattgcagaggcatcagttaatactgatccttcccaacttgctgcaatgatcaaggcactttcaaataaaaccagagacaagacttttcaggaagatgagaaacaaaaggactattctcatgtgcgtcatttcttacctaatgatttagaaaaaagtaatggatccaatgcacttgatatggagaaataccttaaaaaaacagaagttagtagatatgaaagtgcattggaaaacttttcaagggctagtatgtctgatacttgggatttatctttgcccaaagaacaaactactcaagacattcatccggtggacttaagtgctactagtgtaagtgtgagggcaccagaagaaaacacagcagctattgtttatgttgaaaatggagagagtgagaatcaagagtcatttagaaccataaactcctcaaattcagttacaaatagagagaataacagtgcagtagttgatgtgaagacatgttccattgacaacaaattacaagatgttggtaacgatgaaaaagctacctcaatttccactccatctgatagttattcatcagtgaggaaccccagaataacatccctttgtctgttaaaagactgtgaagaaatacgagataacagagaaaatcagaggcaaaatgagtgtgtcagtgaaataagcaacagtgagaagcatgtgacttttgaaaaccatcgcatagtctcacctaaaaatagtgatttgaaaaatacctctcctgagcatggtggacgtggctcagaggatgagcaggagagcttcagaccttccacgtcaccactgagtcattcttctcctagtgaaatttctggaacgagttcatcagggtgtgcgttagagtcctttggttcagcagctcagcagcagcagcctccctgtgagcaggagttgtctcccttggtgtgctcgcctgctggggtgagcaggctgacgtatgtgtctgaaccagagagctcctatcctaccacagccacagatgatgccctggaggaccgcaagagtgatatcaccagcgagttgagtaccacaattattcaaggcagtccagccgcattggaggaacgggctatggaaaaattgagagaaaaagttccatttcagaatagaggaaaaggaacattatcatctattatccagaataactctgatacaagaaaagcaactgaaactacttctctgagtagcaagcctgaatatgtaaaacctgactttagatggagtaaagatccttcccccaaaagtggaaatctgttggaaaccagtgaggtaggttggacatcaaaccctgaggaattggacccgatcaggctggctctcctgggcaagtcaggtctgagctgtcaggtggggtcagccacatcacaccctgtgtcctgccaggagcctatagatgaagatcaaagaataagtcctaaagataagtcaactgctggccgtgagttcagtggccaggtttctcatcagaccacctctgaaaaccagtgtactcctattcccagcagcacagttcacagctctgtggctgacatgcagaacatgcctgctgctgtgcatgcactcttgacacaaccctctctcagcgctgctccttttgctcagcggtatttgggaacactcccttcaactggaagcaccaccttgcctcagtgccatgctggcaatgccacagtctgtggcttctcaggaggccttccctatccagctgttgcaggagagcctgtgcagaactctgtggctgtgggaatttgtctaggatcaaatatcggctctggatggatgggtacctcttccctctgtaacccatattctaataccttaaatcagaacctgctaagcacaacaaaaccttttcctgtgccgtctgttggtacaaactgtggaattgaaccatgggattcaggagtgacatcaggattggggagtgtccgagtgcccgaggagttgaagcttcctcatgcttgctgtgtcgggatcgcttcccagaccctcctcagtgtgcttaatccaactgaccgctggctgcaagtcagcattggggtcctcagcattagtgttaatggtgaaaaggtggatctttcaacatatcgttgtttagttttcaagaataaagccatcataagacctcatgccacagaagagataaaagtgctttttataccatccagtcctggggttttcagatgcacattcagtgttgcttcttggccatgttcgacagatgctgagaccatcgtacaggcagaagctttggccagcaccgtcactctcactgccattgccgagagtcctgttattgaggt

SEQ ID NO: 1353 - DNA, 2547 bp, Homo sapiens
aggtgagggcaggtggccaatgggtaccactcacccaccaggctgggtaatgtgctgcagctcacctgacctctttggacctcagtttccttggtgggaaaatacagatttaatacctgaatggcacaattatggtgagggaaagaataatgttgtcaagtaccagcccctggttggctggaatgggcagcttagccccttccctctacagctgaagcctggggcctctcctgggactaagtgcctcgattcctcaggcctggggatgaaccccacctcatggcacaaagagtactatgtacagtgtctgccactggggagccccagtctgaggggggacatggcctctgcctgccttgagatgtcccaatagaaccgtatcagtgaacatacagattagatggagagaattctgacattctgcaccaccaggagagtgcattctgtcgtcagcttagggatgagttccaggaaaaggagggttttccaaagctgtttgaataaccaaaattagattagtgagctgtaggatggccagtagaggtcccctttagaagtcttcccgatgggcatctgggtggtggggctgaccgggtacggcaggagcaccactggtctccctggaacttcattctctcctctttccccttcctctccccacccagcatgtctggccaccgagtgttacccctgtctgtgacccacttctatagtgccaccaagtatgccgtcactgcgctgacagagggactgaggcaagagcttcgggaggcccagacccacatccgagccacggtgaggctgtggcctagccctggtgggcacagggtggcgcaggccctccccacccacacacaccgttcaggaagcccatgttcagaatgtgccgctcagagctcctgggagtggactgggcacagaactgggtgctgctgctccaggcatggccctatgcagcccttcatttcctcatttcactgatccaggagccaacgaccagacttagactttgagctgggagggggctgacctgagggaaagcaagggactgtgggaaaccaggtgcacagtggctggaaaccgggactctgggctcttctcttgaaggccgcatgatcgtgagcgagtcactgaacctccctaagcctcggccttctcacttgtgaaaaggagatgatgagcttttcagggacacttttttgtaaaacgtttacctgacatataggaaaggctctgtagatggtaggtatcattgtggtcactgccagtggcagcttcggagggaggaggccgctgccggatatcaggcagccatcactgtgaagctggggttctgtggcctccatcctctcccctcgacctccccaagacctggcaaagctcagcccctgagaaggccctctctgttggcccagtgcatctctccaggtgtggtggagacacaattcgccttcaaactccacgacaaggaccctgagaaggcagctgccacctatgagcaaatgaaggtggggcctccctctgagcctggtgaagccactgactccctaaatgaaggcagagggaagctcggccttcagactccactcttccagcctttgtggctcctcctggagggttggggtggatgtgtggatgccacagagaagctcagtggtgggagggaatttgagtccattctgtccttgtctcaacccattcccctggtgctctcagtgtctcaaacccgaggatgtggccgaggctgttatctacgtcctcagcacccccgcacacatccaggtgagtctggccctgactgtctactcactggaggaacccaaccagccccagaggaggggagcagggagccctgcagggccaggggagagtgtcacagctgcctcatgccttgtaccttccacagattggagacatccagatgaggcccacggagcaggtgacctagtgactgtgggagctcctccttccctccccacccttcatggcttgcctcctgcctctggattttaggtgttgatttctggatcacgggataccacttcctgtccacaccccgaccaggggctagaaaatttgtttgagatttttatatcatcttgtcaaattgcttcagttgtaaatgtgaaaaatgggctggggaaaggaggtggtgtccctaattgttttacttgttaacttgttcttgtgcccctgggcacttggcctttgtctgctctcagtgtcttccctttgacatgggaaaggagttgtggccaaaatccccatcttcttgcacctcaacgtctgtggctcagggctggggtggcagagggaggccttcaccttatatctgtgttgttatccagggctccagacttcctcctctgcctgccccactgcaccctctcccccttatctatctccttctcggctccccagcccagtcttggcttcttgtcccctcctggggtcatccctccactctgactctgactatggcagcagaacaccagggcctggcccagtggatttcatggtgatcattaaaaaagaaaaatcgcaacc

SEQ ID NO: 1354 - DNA, 2510 bp, Homo sapiens
ttagcctctaggacttgtgcaagccaaccctcatccatgtctgatagcattcacatccgtgcccaatagagggacctgccccagcctctgtgtcccctccacacagtggggcctcttcactggcagtggaactgcatgcctgccatactgcttaacatcatccagttaggggccttggactgtgaatgcaccatacagatccctggctgtgatcaaacaaatcacattccctcacatgtgtttcaccccataaggcagaaactaccacccatccaaccctctggccttaccccatgaaacttccctttgaccttcgacctttcctcctaccccctctcaccttgccattgatagagattatatcccaaggccctctaaccatctaatcctgcctggtgtagtcactgactcctggcccctttgatccctgttctaattccttgaatctgtaatactgaccttctaacctccctctccccttacatattaaaaccgtgattccttaaagctttgacacttaccacctcccatgcctcctgactatttcctccccatcatccccaaccccaaaccttgctcttccagtatgagatgttctgacaactccccgcccccatgtcttccaatgtccccccatcttcctttcctccatgctccctttttctttcttctttctctccatctgtcttctgtggtaatctggtctctctgtctcttttcctgacactttttcttttcccctgagttgcttctgttttccatctacttcttttactttcttgatctctggttctttgacatctgtgttctcctctctcgctctttttctgcctgtatctgtccatctgatgcctctcttttcctggctccatctctgtatttccctgtctttctcttgcccttctttctctgtggcccgggccccagttctgaaccagctggaggagttgctgagcgacatgaaggcggacgtgacccgcctgccagccacgctgtcccgaataccccccatcgcagcccgccttcagatgtccgagcgcagcatcctcagccggctggccagcaagggcacggagcctcaccccacaccggcctacccgccgggtccctacgctacacctccggggtacggggcggccttcagcgccgcacccgtaggggccctggccgccgcaggcgccaattacagccagatgcctgcagggtccttcatcacagccgccaccaacggccctccagtgcttgtgaagaaggagaaggaaatggtgggggcattggtgtcagacgggctggatcggaaggagccccgagccggggaggtgatctgtatagacgactgactggatcccaggcctgcccttcacccaggccccgtccccgaggccgacccccagctcaagcgctggggcctgctgccagccctccaccttccccaccccttgggccatcactgggctaggaacccctttgcccctctctgcagctcctctcttcaagaagggccctttgtctttctccactcccacacacctttcccaccaagccttgaagactgtgctggtgagaagaagtctgggtgggagatggctggcagggtcttccaagtaccttcctcccacactgccaagtatacacaacttcccagtaaatggttgtggggaggaaagaggtggagcctccccagccgtttccctgcagaatcagctctgtctcatgtggaagtggagaatcagccttgcctggcctttaggaacttttgtggggaagagagctttgaagagaggagggggactttagagagggatgaaaatgagccctgggagggaggaagggacgaggaggggtggctgcatgttaccgtcccctacctctccccacgtggagggtggagcagttatgagggaggaagtcaactgctgttcagcctcagaataaaggtgccgttcactggctcagttacctcctgtgtaccggcatcttgtgttgggaatgttcccccctccctagggaccaaggaccacccctacaaaaagagtaatggttgggtgatactccctcaagccaaagaggagctccccaacctgttctagggacccaggtaacctagaagggtgggagagaatacaatgggccagatgtggtggaagcccagctctggggctcaggttcctggaagacttctactaccctccctcctcaaggcctggatacagactaaatttgtataagtcaggcaggggacctagtcagggtcttgggagctaccttgtcgttgggaccagagcaaaatagtggagggcaggctagggaaatgtgggcacatcccccctcccaggaggggccggggagagtggcagtttgcatggcgaaccccccacttcctctttgctgcccattcactttcttgctgcccctttcccagtctctcttcacacccactcctggtctgtcctgatcccctcttctgtatcaggtttattggttgtacatataaattatactttcctttc

SEQ ID NO: 1355 - DNA, 2931 bp, Homo sapiens
gaaccgatgggcgccccggcccgcgtcgccaacggagctgcggcgctgccccagcgctgaccgacgttagagtcgggctccgacagcgcggccgagtccccgcgcgtcatcctcctttgactcttgggggctccaaagggacctctctcttggcaccgggggtgtctgcgcccgccgcccgccccgcttggctttgcggcatctcggccctggctccagctccggctccggcgagggtcatgaagctggaagccagctgtggcacagccacctcagaggtccctaagccggaaaagaagactgcccgagatgcagagccaagctctgaaacccggccacaggaggtggaggccgagcccaggtcgggatcggggcctgaggctgaggccgagccattggacttcgtggtggccacggaacgggagtctgaggaagtgctggccatctcggggggcatctacggcggcctggactaccttcctagccgctaccacagctggctccgggaccccgaccgcacggtggtgctggccaagcgcaacggaggcgtgatcgcgctggagtcggtgaacgtgatcgacgccggggagacggtgctggtggaggggctgcgcgtggcgccctgggagcgcgggaagggcgtggccgggctgctgcagcgcttctgctcgcagctggtcaagagacagcacccgggggtcaaggtggcacggctcacccgggacgaccagctgggcccccgggagctgaagaaataccgcctaatcaccaagcagggcatccttttggtccgattcaacgcgtccgcgctgctggccgggctgggcgcgcggctggcggcgctgcggacctctggcaccttctcgccgctgcccaccgaggccgtgtccgaggcaggcggcgacgtggcacgcctcctgctgtcaccctccgtgcagcgcgacgtgcttccaggcgggaccatcatccaggactggcagccctaccggcctagcgaaagcaacctgcgcctgctggcggccaagggcctggagtggcgcgtggacagccgcgcgcgcccgcgcgtgctcacgctgtgcacgcgccccttccccatcccgcacggaggggacggcacttggcgctatctcaacatcgacgccttcggtagcgacggcgcgcaggtgcagagccagctgctgtggcacctgcagcgccaggccccgcgcctcgttggcctcaacgtcatgtgccagctcttcctggagccccagctgtggtcacagctggctgacttctgccaggtcgggctgggactggagctggtgaagggttatactgaacagtacctgctggaggccgacatctgaggcctctcctctggcggggagggggaaaaagacccgcccccttccgcagtttccccagccagcctctttcctgccatttccgacgctgcgcctcctgggaagtcccctctgactcctgccctcctgcccttaccggcgcaggtccccccactctgtcccttttgcccttactatcttgcctctagctcccccaaacaccattgcccactccctgacctgaacttgcggactattaggtgggggctgggggtgggggccttgagctgctgttatccaccctctgtttttccaaagaactggtccccgcacaggcttcagagtccttccttccctctccatcacctcacccggggcgtgaactccccctttcctggcttctcccttctgccccctcgtgggtggaagaactcaggagtgtgtgggatgcccagcctcgttcccgagcgcagccgcccaatccgcgtttcttttcttccttctgccctttctaaagccctaaaaactggtcctgcattgccctccacaccccaatcccctccccctgctcaagcttctggtgccagagatcagtgccctctccccacttctctctagcccctcatcctcatcctctctggatctctacgacgcttaacaccgcagtgcccatttttctgtccctgttttccttcccatcaccagcccagtgtgcaatccagagagagagagagtgatactgtaaaatgaaatgtatttagaatgctcccccatttgggtccttgttcatctggtgatgcactttctgagcctgcctctctcactggggtttcctcctgctttgcacaactttgctatttcgcaggctcccccgtgccccagctcacccgagccgggcggggtggtggtggtggtggtggtgtgtgtgtggtgtggttctagctgaagagtttggtacagtggagggcgggtccctcagcctggcataggggctgtctcctggttccaaccaggccgccttctagtgcaactggaattcccacctcctggtatttctggacaccactccctttctctggatcatttatgcttttagaactttgagagtcttctatttaattgcaagtagtaacagctgcatctgcacagcgctgtctccaatactggttccccacatcaaaggcagagggagaaaacagaaggctgggaaagatcaaagtgacttctaagtcattcaaagtagctaggagcctcccagcgaatagaacccgggtgtcccaagcctagagcatgacctagaacttcactctgtgggatgatgttagcttgaacttcttgttgggcaatgcgtaggtgctaggagaatgttgacagtgagtttggggttcgctgggatgggatccgagatgtgggcagaggtggacaccagcaggtggaagaatgtggacaaggtggggggtaggggcagccgccgcttcgccactttccgcagctctggttttgctactgtgctgctctccttgggtgcatcctgtgcctggccacgctgccaccctccttgtcacggtgaccacgattgtatgacaataaaatggaccttttggcc

SEQ ID NO: 1356 - DNA, 2537 bp, Homo sapiens
ggaagtgccgaatggggaccaagatggcggaccttgattcgcctccgaagctgtcaggggtgcagcagccgtctgagggggtgggaggtggccgctgctccgaaatctccgctgagctcattcgctccctgacagagctgcaggagctggaggctgtatacgaacggctctgcggcgaggagaaagtggtggagagagagctggatgctcttttggaacagcaaaacaccattgaaagtaagatggtcactctccaccgaatgggtcctaatctgcagctgattgatgccaacctgaaattgctgcaggaggctgagcaacgtctcaaagccattgtggcagagaagtttgccattgccaccaaggaaggtgatctgccccaggtggagcgcttcttcaagatcttcccactgctgggtttgcatgaggagggattaagaaagttctcggagtacctttgcaagcaggtggccagtaaagctgaggagaatctgctcatggtgctggggacagacatgagtgatcggagagctgcagtcatctttgcagatacacttactcttctgtttgaagggattgcccgcattgtggagacccaccagccaatagtggagacctattatgggccagggagactctataccctgatcaaatatctgcaggtggaatgtgacagacaggtggagaaggtggtagacaagttcatcaagcaaagggactaccaccagcagttccggcatgttcagaacaacctgatgagaaattctacaacagaaaaaatcgaaccaagagaactggaccccatcctgactgaggtcaccctgatgaatgcccgcagtgagctatacttacgcttcctcaagaagaggattagctctgattttgaggtgggagactccatggcctcagaggaagtaaagcaagagcaccagaagtgtctggacaaactcctcaataactgccttttgagctgtaccatgcaggagctaattggcttatatgttaccatggaggagtacttcatgagggagactgtcaataaggctgtggctctggacacctatgagaagggccagctgacatccagcatggtggatgatgtcttctacattgttaagaagtgcattgggcgggctctgtccagctccagcattgactgtctctgtgccatgatcaacctcgccaccacagagctggagtctgacttcagggatgttctgtgtaataagctgcggatgggctttcctgccaccaccttccaggacatccagcgcggggtgacaagtgccgtgaacatcatgcacagcagcctccagcaaggcaaatttgacacaaaaggcatcgagagtactgacgaggcgaagatgtccttcctggtgactctgaacaacgtggaagtctgcagtgaaaacatctccactctgaagaagacactggagagtgactgcaccaagctcttcagccagggcattggaggggagcaggcccaggccaagtttgacagctgcctttctgacttggccgccgtgtccaacaaattccgagacctcttgcaggaagggctgacggagctcaacagcacagccatcaagccacaggtgcagccttggatcaacagctttttctccgtctcccacaacatcgaggaggaagaattcaatgactatgaggccaacgacccttgggtacaacagttcatccttaacctggagcagcaaatggcagagttcaaggccagcctgtccccggtcatctacgacagcctaaccggcctcatgactagccttgttgccgtcgagttggagaaagtggtgctgaaatccacctttaaccggctgggtggtctgcagtttgacaaggagctgaggtcgctcattgcctaccttaccacggtgaccacctggaccatccgagacaagtttgcccggctctcccagatggccaccatcctcaatctggagcgggtgaccgagatcctcgattactggggacccaattccggcccattgacgtggcgcctcacccctgctgaagtgcgccaggtgctggccctgcggatagacttccgcagtgaagatatcaagaggctgcgcctgtagctgcctggatgagcacacctggctcatcacacttgcaggcctgttccctaaggggccccagccaaggagctgagcgaggctgtcgggcttgggggagatctgacagcccagacctttctacggctggcagcagagaaacaaagtctggacccactccatgctctgccctcagacctggccaggtgatgctctgggggcagcatctccccaccgagagaagcgggctcctaatgaggtgggaaagccacggcaggcagcgagcagcccaggccagctttctgcatggatggtcagtctcttgccctcaaacactacagcaaacaagctacccctgccagtcctagacaacttgggtacatctggggacctagcagttaggcttgactttgaggagaggctgtgatgtttatgatccctgaataaagctactccttggag

SEQ ID NO: 1357 - DNA, 2870 bp, Homo sapiens
aatcggcggcagtggcggcggcggcgcgttggagcctcaccaagagccgccgcccgcagcccgcgccggctcagcgcagtctcctcgctccgtgctcgcaggtgcctcctcctggacggcggcagcggcggcgcgaggagccggcgggcagcggcgcgatggggcccctccgcgagagcaagaaggagcacagagtgcagcatcatgacaaggagatttctcgaagccgaattccccggttgattcttcggccccatatgccccaacaacagcacaaagtgtccccagcctctgagtctcctttctctgaggaagagagcagagagttcaaccccagcagctctgggcgctcagcgaggaccgttagcagcaacagcttctgctcagatgacacaggctgtcctagcagccagtcagtgtctcctgtgaagacaccctcagatgctggaaacagccccattggcttttgccctggaagtgatgaaggcttcaccagaaagaaatgcacgattggaatggttggtgaaggaagcattcagtcctctcgatataagaaggaatcaaagtcaggccttgtgaaaccaggtagtgaagctgattttagctcctcgagcagcacaggcagcatttccgctcctgaggtccatatgtcgactgcgggaagcaagcggtcttcttcttcacgcaatcgaggtcctcatgggcggagtaatggagcctcgtcacacaagcctggcagcagcccatcatccccgcgggaaaaggaccttctgtccatgctgtgcaggaatcagctgagccctgtcaatatccatcccagttatgcaccttcttccccaagcagtagcaactcaggctcctacaaaggaagcgactgtagccccatcatgaggcgttctggaaggtacatgtcttgcggtgaaaatcatggtgtcagacccccaaacccagagcagtatttgactccactgcagcagaaagaggtgacagtgagacacctcaaaaccaagctgaaggaatctgagcgccgactccatgaaagggaaagtgaaatcgtggagcttaagtcccagctggcccgcatgcgagaggactggattgaggaggagtgtcaccgggtagaggcccagttggcactcaaagaagccgggaaagagattaaacagctcaaacaggtcatcgaaaccatgcggagcagcttggctgataaagataaaggcattcagaaatattttgtggacataaacatccaaaacaagaagctggagtctctccttcagagcatggagatggcacacagtggctctctgagggacgaactgtgcctagactttccatgtgattccccagagaagagcttaaccctcaacccccctcttgacacaatggcagatgggttatctctggaagagcaggtcacgggggaaggggctgacagggagctactggtaggagatagcatagccaacagcacagatttgttcgatgagatagtgacagccaccaccacagaatctggtgacctggagcttgtgcattccacccctggggctaacgtcctggagctgctgcccatagtcatgggtcaggaggagggcagtgtggtggtggagcgagccgttcagaccgacgtggtgccctacagcccagccatctcagagctcattcagagtgtgctgcagaagctccaggacccctgtccctcgagcttggcgtcccctgatgagtctgaaccagactcgatggagagcttcccagagtccctctctgccttagtggttgatttaactccaagaaatccaaactcagccatccttttgtctcccgtggagaccccctacgccaatgtggatgcagaagttcatgcaaaccgcctcatgagagagctggattttgcagcctgcgtggaagagaggttggatggtgtcatcccactggctcgcgggggcgtcgtgaggcagtactggagcagcagcttcctggtggatctcctggctgtggctgcccccgtggtccccacggttctgtgggcattcagtactcagagagggggaacggatcctgtgtataacatcggggccttgctcaggggctgttgcgtggttgccctgcattcgctccgccgcaccgccttccgtatcaaaacctaaatagaagttgttgttaccgtgtgccaatgtgtcccatgtgggttgtgccaggtagagaaacaggaagtcaatcatctgtgacagtctctattctgtcgttttgctccttggtatttgatttgcactatatttagttgaagcctgttcactgtttaaaaccggaggtatcttcaaaggcatggagacctggttccagtaaatgtcccaccagtggggtatagaaagcatgctcatgaccctgccgtgtcgtctgaggtacccgttcttatcctagtggttcaggaagagaaaacgcagtttgcactttcaagacagcttctctaaggctggcatgttatctccttgctttgctttttgccgttttaaaatgtgtaattgttccagcattccaatggtcttgtgcatagcaggggactgtaaccaaaaataaacatgtatttgtgtaattggtttgaagaagtcttgaatagctctttactgtcttacttggggttgataagatttgagtgtttgcaattttttactaaatgtagctccaaagtcttaaatggcttgtttgttcttaaactgttaattgatgaaactgtgcataagtttacaatgtactaacttattttgcttattatatatagtgttttattggaaattgtaaccacacacttcagcatgatgaaaataaagattagtgtttccatttaaataaatgttttatcctcccat

SEQ ID NO: 1358 - DNA, 2525 bp, Homo sapiens
acaaacccggaagcggatcgcgtggagtgaaggtcacgccgcggcgcgattgacttctaaagagtcatgctgtgatgaaaaagcccagaagagaaggaagaggaaagcaaaggagtcagggatggctcttcctcagggacacttaacattcagggacgtggccatagaattctctcaggcggagtggaaatgcctggaccctgcacagagggctttatacaaggatgtgatgttggagaactacaggaacctggtctccctgggaatctctcttcctgacctgaatattaactccatgttggagcaaaggagggagccctggtctggtgagagtgaagtgaaaatagcaaaaaattcagatgggagggagtgcatcaaaggtgtgaacacagggagcagctatgcattgggaagcaatgcagaagacaaaccaattaaaaaacaacttggagtatcctttcacttacatctgtctgaactggagctatttccagatgaaagggtaataaatggatgtaatcaagttgaaaactttatcaaccacagttcctctgtttcctgtcttcaagaaatgtcttccagtgtcaaaacccccatttttaataggaatgattttgatgattcttcatttctcccacaagaacagaaagtacaccttagagaaaaaccttatgaatgtaatgagcatagcaaagtctttagagtatcttccagccttactaaacatcaagtaatccatactgtagagaaaccttacaaatgtaattcatgcggcaaggtctttagtcgcaattcacaccttgcagaacattgtagaattcatactggagagaaaccttacaaatgtaatgtctgtggcaaggtttttagttacaattcaaactttgcacgacatcaaagaattcataccagagagaagccgtatgaatgtaatgaatgtggtaaagtcttcagtaataattcttaccttgcacgacatcaaagaattcatgctgaagagaaaccttacaaatgtaatgaatgtggtaaaggcttcagtcataagtcatctctagcaaatcattggagaatttatactggagagaagccttacaaatgtgatgaatgtggcaaggccttctataggattgcgctccttgtacgacatcagaaaattcatactggagagaaaccttacaaatgtaatgaatgtggaaaggtctttattcaaaattcgcacctagcacaacattggagaattcatacaggagagaaaccttacaaatgtaatgaatgtggaaaagtatttaatcaactttcaaatcttgcacgacatcgaagaattcatactggagagaagccttacaaatgtaatgaatgtggtaaagcatttagtgagtattcaggcctttcagcccatcttgtaatccacactggagagaagccttacaaatgtagtgaatgtggcaaggcattcagacacaagttatcactaaccaatcatcagagaatccatactggagaaagaccttacaaatgtaatgaatgtggcaaggtcttcaatcgaattgcacaccttgcacgacatcggaaaattcatactggagagaaaccttacaaatgtaatgagtgtggcaaggcctttagtcgcatttcatacctagcacaacattggacaattcatatgggatagaaactacaaatgcaacaaatgcgtcaaagaatttagtgtgcactcaagccttactacccatcttttattccatactgcaaagaaattttgcaaatgtaaagaatatgacaaggtcttcaaacacaagtttttctaataactcattagagaatttatactggagagacttcacaattataataaatgtgtggaaaagtcttcaaaaaaatttcacaccttgcaaaaggagatctaaaaaacacaatcagaaatgacaaaggggacattaccaccaaccccacagaaatacgaaaaaccctcaaagattactataaacacctgtatgcacacaaactagaaaacctagaaaaaattaataaattccttgaaagatataaccccccaagattgaaccaagaagaaattgcatccctgaacagaccaataatgagttccaaaatttaatcactaattaaaaatctatcaaacaaaactctggaccagacagatttatagttgaagcctacgagatgtataaagaaaagctgttaccaatcttactgaaactgttcaaaaacatggatgcagagggactcctccctatctgattctatgaggccagcatcattctaataccaaaacctgacaggcacaatgaaaaaagaaaacttcaggctggtactcctgacgaatataggtgccaaaatcctcagcaaaatactagtaaaccaaatccatctgcacatcaaaaagctaatccaacattatcaagcaggctttagtgttgggctgcaaggttggttcagtatacacaaatcaataaatgtgatttatcacatactccttgaacctaaaataaaacatgaaaaaaagc

SEQ ID NO: 1359 - DNA, 2494 bp, Homo sapiens
agcccctcctgccacacggattctggcataagccggcgggcacaggggacagccagggatggctggacacagctgaggatggccgaggccggcctgcagctccccaacggcctcctccgggtcaggatgagaggagaggttgccagctttgatgccagccgctcctgcctcccccacctgcctctgtgcctacagcccgcttctgcctcaagatcacacagcgggcttgtgaggccaggggtctccgctgctgctcaaggagatggcaaaggtctgtttcagtgatcgcaagttgccctggagccctctgaaccttctgagtcgccctcgctgccgcaggacctcctcccgcggggtgtccgacccgctcttgcttggctgagactttgtttaaaccctggctccgatgcctctgagcccttgatagcagcgtcccagcctggaagaacaaaaccagccacttttccccttggcaaaggcacagcaaggcgggggacaccgtggtgtttaaggatggccagtactggatccgaggccggacctcagtggacatcatcaagactggaggctacaaggtcagcgccctggaggtggagtggcacctgctggcccaccccagcatcacagatgtggctgtgattggagttccggatatgacgtggggccagcgggtcactgctgtggtgaccctccgagaaggacactcactgtcccacagggagctcaaagagtgggccagaaatgtcctggccccgtacgcggtgccctcggagctggtgctggtggaggagatcccgcggaaccagatgggcaagattgacaagaaggcgctcatcaggcacttccacccctcatgacccggcagactgggactgcgggtctggtggggagcagcagacgtccccttcacaccgagaaccacgggggcccgtccaagacctggcctcccttaaacctgaaccccccaaatcaggtcacgtagaatcaagaactgtttgggataaaatcaccatgtggggtccccagcctcgggccagttgttgcagctcaaggagaccgtccctggtgtcacctctgcctggtcaccgccgacctcatctgtgcagcgcggtgcagccagcccctggccccacgtgctgaggcacctcccgccccacagtgccctgcagttgccaggctctccagggcaggtcccagaggtttcccacaaaaaacaaagactccactggaggaaacaagcccctgtcccacgccgtctgcacgtgcctgtgcctcacccagagccagtgtctcccagcccacataggaggtctgggcagccacccagggggccctcctgggaggagctgagggttcacaagcctcccagaaccagccctgtcccatgggttccgtgcatttcctggtgctgctcttggaggagagcagctcccactgtggggacacctgccaccctgcacactactgtgtgtccatcagcatgtgtcacagaaagtgcgtggacggatggccccggagctgctctgccctgaccctgcctcaccccccagcgcagggactttccaggtcatctccacaccagcccctcagccggtgaaccctctctcccatcaccgtctccacccagacccccacctgccccatggcccccatttcatgtctgtggctcaccagcttttccccagacccagctccggagcccacaggcgtggccgatgcagaaacctcaggaaggtgtgttgtgaatgttgggtgcacccacgttgcatttacttagcggggccaattcagatgcacaggggccacatgcagaatccagaagtttctggacaattttcagaagaataggctgcctcctccccacagcctgggggaagtaacagtcatcgcccagcagtgtctggcctgaacttacccagaacattctgcccccggaatgcacgtctgaaagagtggccagaaacgagtgtgccgggcaggaggccagccccatctcaggctcacgtgcctctgacaggagaccagccccatctcagactcacatgcctcgcggacagttggacgtggcctggggcccctgctcacttgagcatgtcgcccaccaagcttgtctgaggccacagagcagcgtcccagccctgttttccaggactggtgggtgccccagtccacggccctgccccacccgaactcctgcctcacggtgtggccttgtgcatccccatggcctgaccccgggaacagtcagaggaaggggtcccgccctcccgccagaggcctggacccaagggaacggcagtcagagactacagtccagacgtttgtgtctaggccttgctggtagctaaggaaatgccttctgttgggaaaaggtcaaatttaacatagcaaaatttttacttaattccactaattttacatttgcatctctcctttaatcctgaaacttttgattcctaaaaagcttacataatcatttgctttatccgatagt

SEQ ID NO: 1360 - DNA, 2911 bp, Homo sapiens
aaaacctcgcctggctcccagctggtgctgaagctcgtcagttcaccatccgccctcggcttccgcggggcgctgggccgccagcctcggcaccgtcctttcctttctccctcgcgttaggcaggtgacagcagggacatgtctcgggagatgcaggatgtagacctcgctgaggtgaagcctttggtggagaaaggggagaccatcaccggcctcctgcaagagtttgatgtccaggagcaggacatcgagactttacatggctctgttcacgtcacgctgtgtgggactcccaagggaaaccggcctgtcatcctcacctaccatgacatcggcatgaaccacaaaacctgctacaacccctccatggatcagctggctgaaatgcttcctggagtccttcaacagtttgggctgaaaagcattattggcatgggaacaggagcaggcgcctacatcctaactcgatttgctctaaacaaccctgagatggtggagggccttgtccttatcaacgtgaacccttgtgcggaaggctggatggaccgggccgcctccaagatctcaggatggacccaagctctgccggacatggtggtgtcccacctttttgggaaggaagaaatgcagagtaacgtggaagtggtccacacctaccgccagcacattgtgaatgacatgaaccccggcaacctgcacctgttcatcaatgcctacaacagccggcgcgacctggagattgagcgaccaatgccgggaacccacacagtcaccctgcagtgccctgctctgttggtggttggggacagctcgcctgcagtggatgccgtggtggagtgcaactcaaaattggacccaacaaagaccactctcctcaagatggcggactgtggcggcctcccgcagatctcccagccggccaagctcgctgaggccttcaagtacttcgtgcagggcatgggatacatgccctcggctagcatgacccgcctgatgcggtcccgcacagcctctggttccagcgtcacttctctggatggcacccgcagccgctcccacaccagcgagggcacccgaagccgctcccacaccagcgagggcacccgcagccgctcgcacaccagcgagggggcccacctggacatcacccccaactcgggtgctgctgggaacagcgccgggcccaagtccatggaggtctcctgctaggcggcctgcccagctgccgcccccggactctgatctctgtagtggccccctcctccccggccccttttcgccccctgcctgccatactgcgcctaactcggtattaatccaaagcttattttgtaagagtgagctctggtggagacaaatgaggtctattacgtgggtgccccctccaaaggcggggtggcggtggaccaaaggaaggaagcaagcatctccgcatcgcatcctcttccattaaccagtggccggttgccactctcctcccctccctcagagacaccaaactgccaaaaacaagacgcgtagcagcacacacttcacaaagccaagcctaggccgccctgagcatcctggttcaaacgggtgcctggtcagaaggccagccgcccacttcccgtttcctctttaactgaggagaagctgatccagtttccggaaacaaaatccttttctcatttggggaggggggtaatagtgacatgcaggcacctcttttaaacaggcaaaacaggaagggggaaaaggtgggattcatgtcgaggctagaggcatttggaacaacaaatctacgtagttaacttgaagaaaccgatttttaaagttggtgcatctagaaagctttgaatgcagaagcaaacaagcttgatttttctagcatcctcttaatgtgcagcaaaagcaggcgacaaaatctcctggctttacagacaaaaatatttcagcaaacgttgggcatcatggtttttgaaggctttagttctgctttctgcctctcctccacagccccaacctcccacccctgatacatgagccagtgattattcttgttcagggagaagatcatttagatttgttttgcattccttagaatggagggcaacattccacagctgccctggctgtgatgagtgtccttgcaggggccggagtaggagcactggggtgggggcggaattggggttactcgatgtaagggattccttgttgttgtgttgagatccagtgcagttgtgatttctgtggatcccagcttggttccaggaattttgtgtgattggcttaaatccagttttcaatcttcgacagttgggctggaacgtgaactcagtagctgaacctgtctgacccggtcacgttcttggatcctcagaactctttgctcttgtcggggtgggggtgggaactcacgtggggagcggtggctgagaaaatgtaaggattctggaatacatattccatgggactttccttccctcccctgcttcctcttttcctgctccctaacctttcgccgaatggggcagcaccactgacgtttctgggcggccagtgcggctgccaggttcctgtactactgccttgtacttttcattttggctcaccgtggattttctcataggaagtttggtcagagtgaattgaatattgtaagtcagccactgggacccgaggatttctgggaccccgcagttgggaggaggaagtagtccagccttccaggtggcgtgagaggcaatgactcgttacctgccgcccatcaccttggaggccttccctggccttgagtagaaaagtcggggatcggggcaagagaggctgagtacggatgggaaactattgtgcacaagtctttccagaggagtttcttaatgagatatttgtatttatttccagaccaataaatttgtaactttgc

SEQ ID NO: 1361 - DNA, 2504 bp, Homo sapiens
tttccacggcccagaaggaagcttgcaagactacatagtacatcagcttgcactctgcctgaagcacagacaaatggctgcaggattctcctgtgaaatagtgagagctgaagtagatgctggtttttccaaggaacagctactagacctgttcattagtagcgcttgtctgatcccagtgaaacaatctcccagtaagaagaaaatcatcatcattttagaaaatttagaaaaatcttcactgtcggagttattgatggactttttggcacctcttgaaaatcgcagcactgaaagcccctgcactttccaaaaaggaaatggactgtccgaatgttattactttcatgagaactgttttctgatgggaaccatcgccaaggcctgtctccagggctccgacttgctggtgcagcagcatttccgctgggtgcagctgcggtgggatggcgagcccatgcaaggactgctgcagaggttcttacgaaggaaagttgtgaataagttcaaaggtcaggcgccctccccctgcgatcctgtgtgcaagattgtcgactgggctctgtccgtctggcgtcagcttaactcctgcctggcccgcttgggcacacctgaagcacttcttggaccaaaatatttcctgtcttgtcctgtagttcctgggcatgcccaagtgacagtgaagtggatgtctaagctgtggaatggcgtcatcgcacccagagttcaagaagcaatattgtcaagagcctctgtgaaaagacaacctggctttgggcagacaactgctaaaagacaccctagccaaggacagcaggctgtggtcaaagctgctctcagcatcttgctaaataaagctgtactgcatggctgtcccctccccagagcagagctagaccagcatacagctgatttcaaaggaggaagtttccctttatccatagtttccagttataacacttgtaacaagaagaaaggagagagtggtgcctggagaaaggtgaacaccagtcctcgcaggaagtctggccgcttctctttacccacctggaataagccagacctaagcactgaaggtatgaaaaataagactatatcacagctgaattgtaacaggaatgcttctctgtcaaaacaaaagtctttagagaatgatctatcactgacgttgaatttggatcagagactctctctgggttcagatgacgaagcagatcttgtcaaggaacttcagagcatgtgctccagcaagtctgagtctgatatcagcaagattgctgattccagggatgatttaaggatgtttgatagttctggaaacaaccctgtactttcagcaactattaataatctgagaatgccagtgtcacaaaaggaggtcagtcctctcagcagccatcaaactactgaatgcagcaacagtaaatcaaagactgagttgggtgtttcaagagttaaatcttttcttcctgttcctagaagtaaagtcacccagtgttcccagaacaccaaaagaagcagcagcagcagtaatacaaggcaaatagaaatcaacaacaactcaaaagaagtgaattggaacttacacaaaaatgaacacctagaaaaacctaacaaataggcctgcctacaatattctcattattaacttcctctatttcacacagaaaccaaggacaacaagatacaagtacctttaaattgataaaatgttttcactgtaatataaattatgagtgcgggaccactattcaatttttttttgtaaagaatgtatttataaccaacattttgttgcttttttttttaattctgtaggattgaacttcaataccaggaagttatgccaacttttcaagtagttttataatagaaaaattgtaatagttttaatcaagatgttcaggggtattaaaacagaactgtgtactgtatatctgtatatatgtatatatgtatgtatatttaaggaagtccagaaatcatactgcatacatgctacaaaaaagtagcaaaaaagtacaaagttggcttagataacttgtaccattttaaatggagatcataattttatgttcacttgatggggaatgactagaatggggcaataacaaatcatttctaaacagttattttccattaaaagccatattaagtattttgcttgttaaattctagttttatgttttaaatctcttagtggttacattgccatttggtagcatcatgtatatatttatgcttataagtttgcattatgactcctgtaaaatatgaaattataatgcaataaaagtgttatctttcttacaaaagttttgtacctaagtggatatagataactgcataaatgaataaattcagaattaactccttcaatatttctagtagcacaactgataatattgatattttctacaaatgttacttctaaaattacagacaaaattacttacacaattcagttaagatgctttgacactgaataaaatattgatttcatg

SEQ ID NO: 1362 - DNA, 2064 bp, Homo sapiens
cacactcttgcacagtctgacaacacacacagacccacatttctacagacgacagccacactttcacagacagcacccgcggggccaggctctcacagggagctacggttgtgtacaaacatgcacacagtctcacaaagaacacccagcactctctcaggcaacagtcacacccttacaaataaccctcatgaaaacactctcaaagacaacctcatgttcccacacaccctaacggatgcaccactgcacacagatacaccctctgtgcaatacccacacacccacactctaaggcaacagccacagtcacacaggctcaccgccaacagctgcactcttggacacagacagtcttgtagatccctcagatgcactctccgaggcaatgtcatcacagacaatagccacaccttcacacagagacatagctacatggataacagccatggacacaccctttgaaagacgacagcctcatctcaaacacagacacaccctcacaggcaacaggcactgagccacaagttctcatagacaacaacggcactctcggatatagacagcagacacacactcacaaccactctcagacatcgatgcccttcagcaacaaccttcagggcctcagactcacagacaacaaccacacttttggatgcatccctcacggacagcattcacagatgcacactatcctacaccattctcagacatgcgttcttccagacagccttcagaaacacactcacagacattacttgcctgctcagatatagagcccctcatagacagcgttccagaacataccattgcacacttacttacacacacacacacacacacacatccccctctgctgttggtgctcccagtcctgggactgtcaggatggctgatcagtgaagactgtcctagtggctggccacctccacacccactccacacacccacagccctgcctctgacagtcatcagtgcaaggccccagaagccttgcctggggactagacacagttgtcacagaatggctgtgtctcagagttccagagacaagccaccatcccccataccccatgcacctgactcctgcacccctgacccatgcaattcccaactcctctgctgccctctgatcaccccactgcctgactctcatacccctaaaacccctgaccgtgcggcccctgacttctatgccctctagcccccatgccctcctacgtctgatttcccaccctttgtgtcctcacggccctgggaatgaggaagcatccaccacatggacaagaagccctccaatgccctgaagcctgtgccccataccccccaccccagacctccagccccttagccccatggttctgaatccccagtgcccaactttcgcactcccctggcttctgttggctcctttcctcactgtcccctgacttgagctgctgatcccatgtgcgctgccaactgaccctgtaaccccgcttccagttatcttgttatctgaccccatgctccctgagcactggtccctccccgttgagctccataccttctgacccccacccttgacccacatcactgtcctgtgtcaccagacggggcgggcaccatgaacaagttacggcagagcctgcggcggaggaagccagcctacgtgcccgaggcgtcgcgcccgcaccagtggcaggcagacgaggacgcggtgcggaagggcacgtgcagcttcccggtcagggtgagtgggcgcggcagggtgcggcggggcgagggggacgggggccgctgtgctgtgctgtgcgggtgcgcggcctggctgggacaccagcccaagtcgtttgaagttggtgttaaaaagcgtgaggccggcagtcctggctatcacggtgaaaccccggctctactagaaatacaacaaattagcctcgcgtggtggcgggcgcctgtagtcccagctactggggaggctgagacaggagaatcgcttgaacccgggaggcggagattgcagtgagccgagatagcgccattgcactccagcctgggcgacagagcagactctgtttc

SEQ ID NO: 1363 - DNA, 2858 bp, Homo sapiens
atcttcggcgggcgagtgggctcggcctgtgcaacccgcacctgcgtccctcgcccggcccgatggcgccgcggccgctgggccccttggtgctggcgctcggcggcgccgcggcggtgctgggctcggtgctcttcatcctctggaagacctacttcggccgcggccgagagcggcgctgggaccggggagaggcctggtggggcgcggaggctgcccgcctccccgagtgggacgagtgggaccccgaggacgaggaggacgaggagccggcgctggaggagctggaacagcgcgaggtgctggtgctggggctggatggcgcaggcaagagcacgttcctgcgcgtgttgtcggggaagccaccgctggaaggccacatccccacctggggcttcaactccgtgcgtctgcccaccaaggactttgaggtggacctgctagaaattgggggcagccagaacctgcgcttctactggaaggagtttgtgagcgaggtggatgtgctggtgtttgtggtggactcggctgaccgactgcggctgccctgggcccgacaggagctgcacaagctgctggacaaggaccctgacctgcctgtcgtcgtggtggccaacaagcaggacctgagcgaggccatgagtatgggggagctgcagcgggagctgggtctacaggctatcgataaccagcgggaggttttcctcttggcagccagcattgcccctgcaggacccacctttgaagagcctggcaccgtgcacatctggaaactgctcttggagctcctctcctaggctggagctctcctgcttgccacctgcctgtcaagaccatagttgtactgctgctgcttcattgccagactgggcctggggcaagagccacatggcagcatttcccttttcccctcctttgcctttcaagagcagggcctgggcaaggccaagaaccatgcagaagccttcctggtgaggtggccgtgaagccgaagcagggaggtgggtgagacagagggtggggaggatagtgtctggctcattccaggctggaatgtggatccagctttcccttctcttacctgtacagtgagatgctcagtgggctcaatcctccactacaggtcccggtacctgaggaaccagtgtaggtgtcagaaatactcctagagcctcaaggtctcccagtccagaaacagtctggtgacgtcatgcccttctcatgtgggcagcttctgagtggtgacacagcaagcctttgttcctgtcctgcattgtccagccccagctccacctaagtgacttgtggccttgtgcaatctctgcctctctgaccccagggccattatttttaaagggaggtggtttcctaattcggagatgcctttcccagccatgggagtgtgaagtgctaggatgaacctggccatcctagcaaggagctttctgaagacctccctgcctttccctgagcccaggcctggcccgccagcctctcttgactacagaataactgatattcacccaccaaacagaaaaagtgaaggctgggtttttcccctctaatctggaggcaagctgctgctctcgtactaactgtgccagtgcccatgtttacagaagtcaggggaaggaaggagcctgtgtccctgggacgacagtcaactggagctaggtgttgacctcagaactgcattttatttattaatttataagcagaacaggccagagttctaggctctgtttctaggtgctgttttcaaaaccccagatgacagtcatagaaaatttggaacttaggaaaatagctggaatcatgaatgacaatgagataacatacagatgtcagtggagacaaagttgtgggttcctcctcccacctggctttgaggctgtcgtcgatatcatagtactttacatggattcacatgaactgaaacgccaccacttggcccaggatgttgaaagggtgcaaattccttctgggtagataagaaatgactctgggagaggatttcccttatgtgaatctaggtaaaaagatgaaaaaaaattgtattatgtgatcctaaggacaggaatagcagaccagccaacgggatggccttgggtacatcactcagcctttctggacccaatttttccccagtgaaagccaagttggactgaatttctggagttctcatcagtgcacattccatagttctccagtgcttggcgatcagcccaattgaaggactggctctgtactgacacttattatcggtacaggcaaagaggagcctgttgtctgttagggaccactaaatcaacaaccacaaatggattttttttttaagaggagctgtgcacctcaatttgctgtctagttgagaatagagattgtgtgccttcatttcattttcattgctttgtagtattttattgtatgcatgtaccataatttatttatccagttggaatttatcctggcaaagatttgcagtaagtctccagctgaatttcttttcaggcgactagccagttgcaccaacaatatttagtgagtaatccgtcttttctccactaatgtaaatgccacttttattatttattaaatgaccttaaatattgtggtctacttccagacttgctcttctgctccattcatctttctatttctgaatttgcaatgaacagtttattattgtcactttataatacactttaagatctggcagagtttgtctcccgcatttctctttctttttcagaacttttcttgatttccctgcatgatctttggaatcagcttgtcaagatccaaaataatcctgttggtatgtttgtttgtatcccattaaaattatagatgaaaag

SEQ ID NO: 1364 - DNA, 2942 bp, Homo sapiens
gcttactccctgaccagatgctgcggtgcacggggcagccaccatctctgcatgcatgtctgtgtaagtgtctctctctctgtgtgtatgtgcctctgtcatttcgtgtcaaaggtacattacctgattacctttctcggctgccagatttttatctagataattggaactgctatggaggctgtgccttgccagccagcttagaatctgtaaagccatagtttgtccaccttgttatctgtggctgcctgggcagaggaaattaaagagatccacagccaggggggcgcttcctactcctgacctccccagcgatcccaaacaggacagtttgttagtaccgtctttttgtttttatgttttgatttcgttttgggtttttgttcgctcgtgtatgttattttggcatgtggatacctattcccctccacatcgcacatcgtgttttatggagtttagagctgaggaaactttggtcgggttgccaggacgttcgcaccactttgcggaaagcacgagctaacagtgagaccgacagagatgtcttccaagcgaccagcctctccgtatggggaagcagatggagaggtagccatggtgacaagcagacagaaagtggaagaaaaggagagtgacgggctcccagcctttcaccttcccttgcatgaagttgatggcaataaagttatgtcttcatttgccccacacaactcatctacctcacctcagaaggcagaagaaggtgggcgacagagtggcgagtccttgtctagtacagccctgggaactcctgaacggcgcaagggcagtttagctgatgttgttgacaccttgaagcagaggaaaatggaagagctcatcaaaaacgagccggaagaaacccccagtattgaaaaactactctcaaaggactggaaagacaagcttcttgcaatgggatcggggaactttggcgaaataaaagggactcccgagagcttagctgagaaagaaaggcaactcatgggtatgatcaaccagctgaccagcctccgagagcagctgttggctgcccacgatgagcagaagaaactagctgcctctcagattgagaaacagcgtcagcaaatggagctggccaagcagcaacaagaacaaattgcaagacagcagcagcagcttctacagcaacaacacaaaatcaatttgctccagcaacagatccaggttcaaggtcagctgccgccattaatgattcccgtattccctcctgatcaacggacactggctgcagctgcccagcaaggattcctcctccctccaggcttcagctataaggctggatgtagtgacccttaccctgttcagctgatcccaactaccatggcagctgctgccgcagcaacaccaggcttaggcccactccaactgcagcagttatatgctgcccagctagctgcaatgcaggtatctccaggagggaagctgccaggcataccccaaggcaaccttggtgctgctgtatctcctaccagcattcacacagacaagagcacaaacagcccaccacccaaaagcaaggatgaagtggcacagccactgaacctatcagctaaacccaagacctctgatggcaaatcacccacatcacccacctctccccatatgccagctctgagaataaacagtggggcaggccccctcaaagcctctgtcccagcagcgttagctagtccttcagccagagttagcacaataggttacttaaatgaccatgatgctgtcaccaaggcaatccaagaagctcggcaaatgaaggagcaactccgacgggaacaacaggtgcttgatgggaaggtggctgttgtgaatagtctgggtctcaataactgccgaacagaaaaggaaaaaacaacactggagagtctgactcagcaactggcagttaaacagaatgaagaaggaaaatttagccatgcaatgatggatttcaatctgagtggagattctgatggaagtgctggagtctcagagtcaagaatttatagggaatcccgagggcgtggtagcaatgaaccccacataaagcgtccaatgaatgccttcatggtgtgggctaaagatgaacggagaaagatccttcaagcctttcctgatcttggatttttgtgtgtatgtatgtatgtgattatggtactaataataggaataacgttggaccattgtgagttaaacccacatctggggatgaaatcccacatcctcccaagtgactggtctagaaataatcttgaccttgactttgcacttcaaatgacaacttaaccaagtatagggctcagaaattatatttttaaatgtctgattattattggatggatcaggtggccctgtgtaatagaggtgtgcatgtataacatggaagctactagcaaactgctcccagatgtcctttctccctggtcagttggttccattaacgtttgctacttagtgatttttgtttttcctgttgatattttgagcaaaacaatcattgttttcattgaatatatttggccattttttcagacaaatagaattagcttatttcttcaacattccatcctttcccgatcaggaaatgaaactgatgattttataaggtatttttcacccctccatgaagtgaggtggaggcctttagcatttcagaagtgtgggccatatgtagttcatgccataaaaagtaggatttaattaaaagtcattgcagcccaataaaatggagcctggctgcacccagggatccttgccactgctcttcccttgctgtcagattaatccactgaagtccaactttggttcaagcagagtatttgcaaagagcaacaactgaatgtgatgggactgcttatgtagattttgccagccaaatgccaaggcagttgtagggcctgtacaaataaatgcaaaatcatttc

SEQ ID NO: 1365 - DNA, 2361 bp, Homo sapiens
tctaaagctcacaatctatcttgcaaaaaatattttaaattccatctcaaataagccagggtgaaaagggagcctgtgcaccagacactgccagccttgcctggctctcgccttcttgctcttccttccccacctgctggggattttcttaacgatggagatgggtttgggtttgtcctgctgtgctctgctccccattcccggatccaaggtcctgcctctgtcctgtcccctgagccacctcagggatgcagggtcccccacctggtcaagtgcccagtgctgtgttgtcatttgcaagttcttcctgtgactgaactccaaatggcactgggactgctgactccacccactggacaacccgtgttcttgcttttggggtttctgaaacagccccaagactctgggcatcttgattttgctcccattgcttctcaggacaccctgctcctgtggtttgcaaccccggccttctcttcgaggacgcctctgctcttctgcctcacactcggattggaccttcttcagcacagccagtggccgaggcttcctccctggggctcagtggagcaggacagatgctgcatccaaactcttccattgggttccagtctgttccagtcatgcccttgagcctctaaagctcctaggtgagagacgtagcagctgacagcacttcccacttgatttgggtggactccagcctccccagcaacaataagagatcaaaagcatcgttgaggaagcagcttgctgaaacgctgagtgcccgccactctcaggtcaggtgggaccggcaggccagcatgagttcctgaacacttggttctcaatactggccacagccacactgtaaggggaaacaagagggcgctgtatgcaaacatctcttgaactctggagtctgctcaccttcctgcctcaagcccctctcccacgtggtccagtcaccattctccacagagactaccctaaaacccagcgactctcgtgtgcctgcagaatggcacagcccgttctcatagcagcactcctgtttaatcagagggatgttaacgaccaagtcatatttgctcgatttgtgttcaatatatttcatttgtaccgataaaacttaaaaatatccccacacatgcattgcctattaaagagtatcttccaggtacacctcccttacacatcagttaacttgataatttcttcccattcttgtgcaataaatttccttcctgatcagctctgtccagcagcaacaataatccacgtagagacatgcaaactaaaagtccgttagtggaggcacgaagctgatgaggcttggaaaaaaatgaccgatttgattaaaattaggacccatgggagtggagctctgcctattttagaggcaaagtaaatgcctgggagtccaatcaccgacattctgtttgaggtttctaatcacaaggaagatggagaaaatgcagaacaagtggtcaagaacagggagataataaatagaatatttatgggctgaggaaaacaattaccaggggaaagcccaagaagcaaagatgaacagagaacgtgctgactgcgctcgtttggaaaggcctcatggccaaaggaggagaggcattatgaggagcagtgaccgagtgggcaggacccccggggatcaggaaaggtgcacggggggagatgagaggcctgagcggcttcccagcgaaggtttttgaagcacggtttgattttctctctccccctcaccatccccagattttagttgtgactatctccaggtacatggcttgcgacaggcagtgtataaaaactaatgtgagtttaattttaaaaccttagccattttctggaacttaaatatcaaagagaaaatgtccacatatgatgttaattgaggtttgtctcactggtgatttgtgctgattcaattcctgtttctttttttttttcttaaggggtcagttttagaattgggagataggtgtataacatatgactatacagcgcaggttggttttttaacatagaaatatctgcctttaaatgagaactgaaaacggagcttcttggaggccacctgctggtggcagtgatctgaccgctgtttaagctttctttgaactcctttttttaaaacagcctccataatcaatggtgtacgatctactctcgtggtaaaacttactcagtgaagagtgtgttttattttctgaggagctgaactgttccaacctgagtattctgaataaggacagtggtcgagcatgagtgatgccatctgggcttagaaataagtgggcctaaaatctgattgttttcatacattgttcagatattgacgcaaatagcaatttattttgt

SEQ ID NO: 1366 - DNA, 2800 bp, Homo sapiens
gagtaaattttaaaatttcctgtgaatcaagttcttcagtgacgttgtattacactcaagaacaatcttaagcctaagatcctcagttcagtacaggagacctctcatgtggcattttagttttctggactttccagtcagccacttgtgttcctaaaatcttcctgccatttcctctttgagatgccgccctatttcttcctctacactttacggttttatgttacgcagccagtatacctacatgcctctatccctgaataccccgagtactactgatcacatctacttaactggcacaatgaacacagtaggtacttttagcttatgttggccttttggagtgggtgtccaagatcagcacttcctcgcgctgactgcgtaattcccaagttcaatttcattagcattctaatatacaacttccaacttccggccttgaagtactgctcacttctggtgaatacagcatcagtgcactttgtttgccttaaaaccacaatcctgggaggctgagacagaatggcgtgaacccgggaggcggagcgtgcagtgagccggggttgcgccactgcactccagcctagacgacagagcaagactgtctcaaaaaaaaaaaaaaaaaaaaccaccacaatcctaataaatgagcctggcagagtactaacacaagcccatgtccacgaagcacgggactccaacaatggcagctttggcttgcataccaccattggactgaccaaacctttcttagaactgccagtgtgacagagggacctctgggggagggcgtcttgctttctcttgggtcagtatatctcactaccctctttgtaggttagcagatttgtaacaggatgttactggaggaaggggaagtgggaaagctggacagtattcccactcttttcccttactacaaaaactttccttctcagtcctgtctccaggagatggaagaccaaataacacaacagccagtgtgcttttcctacccaatcctttctttcaccctcttatcctaatacatttccagcatgttaattcttttgcagcatagacaagagaacccatacacgctgcaaaactgcaaaagggcttaggtggcaaactcccagtttcttgttgacattttcagtgcaatttaaagatgttaatttaaaaaactacctgtgctgtagacatcagtaaccctcagggggcagaaaaaaagactgttactgcatcagttagaaatgtagtactacctgggcaacatagtgaggcccatctccacaaataactaaaaagttaactggttgtggctgcacatgcctgtggccccagctatttaggaggctgaggcaggaggtttgcctgagccgaggaggttgaggttgaggttgcagtaagctgtaatcacgccactgcactccagcccaagcaacaaaacaagaccttgtcttcaaaaaaaaaaaaaaaaccatacagcaaaactgatgccttagttgttttattttagcatatccccaagaaatctaaaatatttaggaggcctgcttaaagtgcaatcttgaactttaccagattaaaacatgaagccaaagaaagctgccacctttccgtgcactattcccaacctccatgtacctaccataggattgctttttatgagtggagtaatatggcttaattttattttaatatactggaatgctttgtccagtcacaagtcccaagagcttctcatcccagtctatccaaatgaactgccaaagcccatcaacataatctccattcaaattttaagtttcccaatctgcattgaacaaatgcatagtatcacaaagcacttggcaggtgtggtggctcataactgtatcccagcacttcaggagaggccaaggaaggaggattgcttgagcccaggagtttgaagccagcataggcaagagtcagaccctctctacaaaaaatttaaaaatgacccagggatggtggcatgagcctgtggtcccagctacttcaaaggccaagggaggattgcttgagcctttgaatgtgaggctgcagcgagcaccactacactccagcatgggcaacagagcaagactctgtcaaagatactcgcattaaaacccgttcccttctaaatctctgtactcgccctgtaattttcatcacatgtctctctgacccccttgtactccaaaaatgctgagcaacctctatcattttaagcatgtagcaaatcaatttaaggtagtaagttttttaatccacttaaaaatacaagagcacaaatccacatttatttattgatttttcgttagtttaaatccttgaggggtacagcatctgcagggaaaaaagaacacaaaacattaggtgaatgttatatatacgtctacaaatcaagaaccgtaatacggataaatctctgaaaggctaccaattacatgttctagtggtaaggaaagtttttatagccttcagtctctacgtgaacataccgtaagaaccggcactcataaaaaacatgtactggccaggtgctgtggctcacacctgtaatcccatcactttgggaggcctaggcgggcagatcctaaggtcaagagatagagaccatcctggccaacatggtaaaaccctgtctctactaaaaaatacaaaaatcagctgggcatggtggtacgtgcctatagtcccagctacgcaggaggctgaggcaggagaatcgcttgaacctgggagcttgcagtgaggcaagatcccaccactgcactccagcctggtgacagaatgagactctggtctc

SEQ ID NO: 1367 - DNA, 3000 bp, Homo sapiens
cagcaccggtagagaaagcaacagaatgggaagtttcctctgggttggagcctcagagctctgcccctcaaggtgacagggacgtccctgtggcttgttccctccacctccagtactgtatgcttgctacttcaaccccctatttggtgaatttctgcacagacacagatctctgtgcctggaatgggactgtgccctgtgcgggtctctcccttggcgtatatccatctagatatttagtctttgagaatctcaaagcagagctctctgggaagagaactgtccacattgctaaataattaagattccctcacttttttgagggccatgtgttgagagagagagagagagagagagagagagagtgtgtgtgtgtgtgtgtctgtgtgtgtgtctgtgtatgcaagtgttggtaacttcccacttgaactaaataacatggggttagagaaaaaaaaataccaggcaagctgtctccattgaacaagtccttggcaatgggcaggtcccaagggactcacagcttctggcagcaagtgtgtcattcacacacatcattctggctggagagtgcaatgtgtcatttttttttctttttgtaattattttattaagtatttagttggaaatttcacactggcattaacaggtctagcataagtggcctaggcagtcatcccaggctccaaaatgaagatgtgcaaaagagatgccactgggaatagaaacactgagttggttcagttaggtcatcccctgcagacgtgtcatcgagcaggctgactcccacccctcagccatgccatgggtatgagaagccccttataatgaaagctgccagccctttcgtccttgtttcagagggtgggtcaggtggttggggtgagaacttgctcacggtgcacccaacaagacctgcaggtgcatataagtttagtcccaactgcagggccagaccaaacactccctgggaagtgtgtggagggctgtgctagaccttcctgagtttctggctaaatcatcagccctgtttggtgcagtctcatgtctctgtggttcccaagctgcatgatcagagccagtgagaagacaggatcagtgacccacagctttggggaaaaacagccccactgttaacttccctcctgcaaacctgggtccccaggccgtaaggtgggcacactggtgcttacagactgggtggagagccctaccttccaaggtcttgatcccagcctgcctataaggttgggattagcatgcaatcccccttccccaatcctgtctttttaaaatctcaagtttgcacttaaccttgacaacagcaccctctcctactccagtcctagaactcagtggccttagagaatggggtcccctgcactgaaggtccccgccttgctcccagttccatcctggccaataggctgcgcctcaagaggtgaaagagaaaaaagggagggagggaggaagaattatttagaacaaaaggatggctcgagcacgttagaggcaagtgagaggcacgttggtgagaagagcatgtgcatgtttggggtagctggggcctactgtcccttcattagggaaggaggcttccagaagcggatgtcttctagaaagaaaaattgtgtgaaggctgaaaaggggcttggagttttgtctttgttgattagaaagaaggaagaagtcagctctgagtgtttcaggaagaagagagcaggtagaaagggaatttagtgatttaacacccaagggtccagccatagcaggttggaaaatcctccaaatttggccacagaagctggctaggaaaaaactgccactcattgggccacacgctgggtccccatcagttctcaatgaatggtcattgatttacttagcagagagaagtcaccagccacaaaccaatctttgagtttgcaggccctgattccagaatatatgcatccagctcccgggttctcagctggttttgcccacttccctttgactgtccaatccaaagccagtctctcaagttgtatggctcaaagagcagtgaccacaatgggtcatacagtagggacccacctccacaaattagaaccagagttcagactccattgggcacatctgggaggaaggcaacctcctttgtcgtcttgttggtaccagtcattctcaagtatctctgacacctgtggtggttcagtttgctgagcctgccacctggtatgaattagactgggtgtgatgaacattcatccatggatataccctaccattttgcgttgccttataaccaaggcacactccccataagagtttactgcagagaaagaacagcaaaacagccaccctccttgaatttacaactcattatctgcaacaggttttctttaaatccaagacacaggatgggaaatgggtttccccaccaggtactcagaggtctgcaggaagtgactcccgggcaaggcagacttcagtaatccctgaagcgtgagcatgtggactgcatggctgggtggggactggtggatgtctctggagctccagaaccttggagaattcctcatggaattcccctcccagctcttagtgggctctgtggggtcaggaggagcccttcctccaggttttccttctttcctcctcagcagagaaactggagaaaggacattaaactcagtgcagtcgatttgagtgctgaaatatttccagaatcaatggtggtgctaaactatctccatgtttctagcatttttaatagtggagttggtttgtttttaatctcatcacaaaaatgcagtgcccttggggaagggaccagccccttggcctgccactttccaggtgtcctttatcactttgacgggactctttggtctgcagaaaatgctctgtcttggcatgcttctagactgtaagatttgggttttgttttgtattttatgtttacatgcatcttatatttccctgaaaactaaataaagttttgggcctttttaaccg

SEQ ID NO: 1368 - DNA, 2779 bp, Homo sapiens
aatataatcagccaatcgttgccccttggggacgcaggataaagcaagtcagccatgaccaatgtggagtcggccgtgcacaatgacatgcagacttgcaggacatcgagtccctgctatggtccctccccagtcaggcccccattgcctgggctgcagccagaagcattcaggcacaagtgcattcaacaaatacttatttaattgtattggtggttagagggttgcgattgattaaggtacattaatggatccatgtcctccctgtatccaagactctgccatttgtctctgcagttcctcccactgaagaatcggagtatatttctccagtccctaatgttgggttttgaattgtgtctagctttggccactggaatattaatctgtatgaccaaaaacttggaaagtgtgaattcatttgtgctcgctcactcctgctatcaccatgagaacaagcctaggccaggctgctgcttccagcagaagataagagacaccaagagcaaagtcgagcttcccagacatgctcatgctagactgaccaatcctcagctgacccatagatccatgaaaataaatgattgttgtattaagccactgagatttgtagtgacttgttatgcagcattttgtgacaacaactaactgatacaagggtcactgtcctttatctctgtagattttaaccaatttttaatagctagatggagatcatctagttgcctttatttataatgaatatgactgtagagctagtttggcctgacactaccagtaacctacccagaaattcagaaatactttcttctccaacccgccccaaccaacctattttttgtttgtttgtttttgggttctccctctttgcctaggctggagtgcaagtgttacagtcagagctcactgtaacctcaaaatcctgggctcaaatgatcttgcccttcagcctcctgtgtagctgagactacggtcatgtgccaccatgcctggctaatttttttattctttgcggagagagggtctcactatgttgcccaggttggtttcaagctcctggcctcaagcagtcctcctgcctcacccttccaaggtgctgggattataggcatgagccaccacacccagcctcttcttctttttaaatagaaaccttattttattctgacagtgggttgctttcttttttctttttttaagaaaaagttggcccagccctagggaataaattttgactgctctaaacagggttggccaactatagaccaagggccaaatctggccctctgactgtataaattaagttttactggaataaatccaggtccatcgatttatccattgtctacatatgcttttaggctacgatggcaccactgcgtcactacaacagaggttatctagaccaaaagcctaaaatattaccgtttgcctctttatggaaaaagtttgccattccctagtctaaggtttagattctgagcttatcattttagcctacccccacttaccagtgactggttcaaaacaagtctgtgattccattctgactgctctactgagggaattcccccttcttctcatgcagagttgatgagggtaagttgtattaataggacatatgcttaggttttctgaaaaatacttttatctagaaatgcataggaatatgctggtgcctgaatgtaccatctgggggcctggagattgactcacctgcctccagagctagtgctcacacttactactgagagacctgaggaaacgcctgcctacccaccaccagaacctgcatacgtcacctggagaactagagatcagactgccacacacaccacccaggagcccagaggtgcacctgcccacttggcccagtgctgccactgccagcaagcaaagaagccacctgggagcccagggattggcccacgcaaacaggctatcatcagtgtccacaaacactgcccatggtccctagtattgacacacctggtccaccagcactaccactgatgctgaaggacaagacttcctggcatccccatcctcagcaaagcctcaccacagcctccaataacaactacagtctggccaagtgtggtggctcacgcctgtagtcccagcactttgagaggccgaggcgggtagatcacgaggtcagaggttcgaaagcagcctggtcaacatggtgagaccccgtccctgctaaaaatacaaaaattagctgcgcattgtggcacgtgcctgtggtcccagctactcaggaggctgaggcaggagaattgcttgaacctgggaggcagaagttgcagtgagctgagattgtgccactgcactccagcctggtgacagagctagactccatctcaacaaccacaaaaaacatactgcagtctaagccacggaatgactcacaggcaccactcgtgccaattacagctgaaggaatcatatgcagactataccattgtacccacccagaatcaaagccaaagtgagatatccaatgaacactgtagatacagctataagaaaaggtctttcccatataaaagccaatccataaaattggaagaaatgactgttatctcagaggcacagatagtcacataaggatgcaagaaatatgaaaaaggaaacataacatctccaaagaagcacaataattctccagcaacagatccaatgaaaagaaaatctatgaaatgcctgaaaaaaattcagaataatgttattaaagaaactcagggagatacaagagaacacagataatgaatac

SEQ ID NO: 1369 - DNA, 2229 bp, Homo sapiens
acagacccagaacatgagcctttgactgctcctcagctcttggtcccagatgtctatctaaatctgaagctttccagtgaaatgtcagagaaaccttggtcaccctcaatacctcatacagtaacaaacttggttggacatacttatataaatgtgattgacattgaagctaatgatcttctacaggaattacctgtgagagaagagctttcaaatgataatgttatcaaacagcaaagtgatcatctagcagttccatcgtctgcagagttacattatatggcagcttcagttactaatgctgttcccccacataattttaagagtcaagaagtaactccagcttgtctggatggaaaaagcttgagagcaggcattacagaagtgaaggagcctagtgtcacctcacctacaccatcagacatacagcagaacaaaggtctgccaaaaccagagttccgattcaaaggacagagcacaaagtcagactctgcagaagattatctattgtggaaacggctgcaaggtgtctctgcagcttgccctgcaccaagctctgcagctcaccaactagagcatctcagtgctaagcttcagaaaattgacgagcagttgctagcaatacagaacattgctgaaaacatagaacaggatttccccaagcctgaaatgctagatctacattgtgataagattggaccagtggatcacattgaattctcttctggccctgaattcaaaaaaacattagcttcaaaaaccattagcatttctgaagaagcgcgttttttgacccatatggatgaagaagatcaaagtgacaaaaaggagacttcagaacctgaattttcaataacagaaaattattctggtcagaaaacctgtgtgtttcctactgccgattcagctgtcagcctttccagttccagtgatcagaatactacttctcctggtatgaatagcagtgatgaattgtgtgagagtgtttcagtacatccgctccagatgactggattgactgatattgcagacattattgatgaccttataattaaagacggagtttccagtgaagaacttggcttaacagaacaagctatgggcacctccagctttacatgacttcaagggaaataaggctgagacaaaagatgaagcatgaaaaagacagattgctgctctctgaacactatagtcgtcgaatctcacaagcgtacggtctgatgaatgaactgttatctgagtcagtacagctaccaactctaccacagaaaccattgcctaacaaacccagccctactcagtcttccagttgtcaacactgcccttctccaagaggagagaatcaacatggtcacagttttctaataaatcgacctggaaaagtcaaatatatgtccaaaccgagttatatccataagagtaagtcttttgggcaacctcaaggctcaccttggccacatggaactgccactttcaccatacagaaaaaagctggtggagccaaagcagcagtaagaaaggctacgcagtctccagttaccttccaaaaaggctctaatgctccgtgtcatagtctgcagcatacaaaaaaacatggaagtgctgggcttgcacctcaaaccaagcaggtgtgtgtagagtatgaaagagaggagactgtggtgagtccctggacgataccttcagaaatccataagattcttcatgagagtcacaattcccttctacaagacttgtctccaactgaagaggaagagccagagcatccttttggggtgggcggtgtggacagcgtgtctgagagcactggcagcatcctcagcaagctggactggaatgccatcgaagacaggtggccagcgtggaggaccagggcctgtctgtccactgggccctggacctgtaagacctggatatcattgggtttccatgcacaggccagcacctcagtaatgtggttctgaaagattaacaggtttaagggacagaagcaatgaaagaagcaatgtgaattttccatttgctttcatattattacctggattagccattaccagaggaaaaataaacatttctcagtaactttgcctttatggggaaagggttgactattgatgtattatatgtttttgtatttgatgcatcattaggcataatttttaaaatgataagtacctttcaagccaagtttgcataacctactttcaataaaaaccctctatcttg

SEQ ID NO: 1370 - DNA, 2857 bp, Homo sapiens
ttatttttaatattatgttgtatttgatgtgctatcctattcatttagtataagcacatttttctttatgtcttcagcataattatatgctttttcagaattttaacatcaggactgcttccagggtagctttattgccctttgtcttaagtatggattatagttttcattctttgtatgtcaagtaattttggattgtaacttgaactttgaatatactgtagaaactctgaattctattttattcttctaaaacaatatttctcagcttcagcactactgacattttgaactggatcattttgtttgtgttgttgtgtgtattttgggagggtactgttctatatgcattgtggggtactgagtattatcctttgtctccactcactacttaccagtagcataactctctctcctccccacatcccctgccaaaaaatgccttcagtcctttctaagcgctcttttttatggtgttggggccaaaatcatgcatctttactcactctttctcattgagagctatggctataaagggtagtgatacttttacttatttatttttaaggcaagcagttaacttagctggattcaaactccaggctgcctcgtgtgctgtgggaagcagcctacgctctattcagttcttttcttttcatattggttgggttactttgagtctggcctacatgatgggcagtttagaggtcaaccaaaggatttcagcagaacttatacacagaatttcattcaggcttcccgtgtctggttggctacagtgtgggaatttcctcccacttttcagccactactgaggatgcctttcggcaaaattccttgaaattggaaacttacagggaaattcctttcctccaagagtgcgctctcctccagtgttggcttgcttttggttgttctccgtggttttagatagctgtctttatattaattctggagtttacagttgatatctgttgggggcttagtttgataacatgtattcttctattactagtagccagacctgtatgtcttacttgacctgatggagaaaagtttcaacttatgagacaatactgtgctagctagttttactgatttgtactctaaagtacccaagcctaaaatagtagagctgtctatcccacatgaaacttctctgattttcactgttttttataaaaagtatacatgttcacatttctgtaggtttttttaagcatcacaatttttataaactttctatatttccaaggtctacctgctttgtattttgcctagtgagagttttgtattcatgtaggaataatctcttggtgtgagtatctattttccactcatccaaaacagatagagcattgatttcactaagcgttatgttctagtttgctttggtattattattagaaatacctggtgattaatttgagctaagtattcttctctaccctcattcccagcattatcacccgcttttaccacttccaaggggtggaagcattctccacaatgcattttttcatgccagagaaaaatctagaaaaaaatgaataaaacgaagaaattctttccccttggtatctgtagctaacttgcctaagtgttctttcccacagtttaagtcttcagtccatagttcataagcaaaggggtgtagcgagctctgatcttgccagaagagagaataagtgagctaccccacggtggacattctggccatctgaaatgagtcgatgcatgtggcttttgtctaaaggctacaaataaaatgtaaccactttcttctttgagtagttgatatagcaaatagttgaaacagaagttttgattggcaaatcaggatgtggtagatactttaacaaagagtagaactattaccagttttatgtgttgctgtttgtatctctttcacagttttgataatatcacatcctggaaagtgaaacagaaaattattattccattttaaatgactaaatttgctttcatggtatttacagtgaaagagtaaattagaaagtgaatggatgactgttcatgagaaaaagcagggtaaaaagattttatttaattaattgaaaatattagggtcaaaacataggcttatgttatgttttgtgaattgtgctgtgttgtagacatttgatgagtcctaacatagaattgatctagctcttgaaataccatttttgattgagtataaatgggatataggcaccttacaacttcagaattcgaggaagatgatgtgaatcttccaattttatctatttgattcaaatggtatgttttttcacatttctcataatttccacgtcaactcccatgatgatcatgcaggaaagcagcatgattgcacttcttgtagtgcataccatcactaaaacatagttactgtctttctgtggtcttaagaaaaattcagaaacagcataccaatgtacatataagataaataagcttatgtggtacagtaagtgttctgttctgagaaataccttgattcgtatcctaatgtctgatgttattggtagttctcaaacttccccaattctgctttcatctaaattcatcttatctatctattgttaaataatctatcagtccatttttatctatcatctatatatctgtctttatcaatcattcgtctgtaatctatctgtgccgtttggcataagagacagaagggcatagcagtggaaactcaaaggagttacctccatgtgaatggacagtggtgatggtgatctgtgaggtggtgatgtatagaaagaaaaactagaagagagcatgccctaactcagggaccttgtccagcaggcactctggccttgttatactgtgcttgaatatg

SEQ ID NO: 1371 - DNA, 3766 bp, Homo sapiens
tctcttcttgtacagccccggcagccctgccttcttggctggagagtatattcagggatttccccttaataatcaccgaccctgggagcactttttagtttccaaaataaaaatatgatcctcacccctcttgcttgacagggaaaggctctcgccggagcccaggggggagcagtagcagctgcagccgagcttcctagtccattgccagcgcctctcactctgatctgtcagcccagccgagggaacaggggggaaggagaaaaaaaaaagcagctgaaagacaatctgcttcatcctgattctgcggcattccaaactgtggtatccttgggggttctcttaacattgctatggtgcagaagatttaaaatcagctgatgttcacaaggaatagagtcacgtgatgtatgaagggaaacatatacacttctctgaggttgacaataagcccttgtgctcatatagccccaaactgtgcaagcagaggcgactcaacggctacgccttctgtatcagacacgttctggaggacaagactgcccccttcaagcaatgtgaatatgtggccaagtataacagccaacgctgcaccaaccccatccccaaatcagaggatcgtaggtactgcaacagccacttgcaggtacttggctttatcccgaaaaaagagaggaagaaaaagaatgatcctatagatgaggtgaaggtcaggcaccagatggataccatggcctttagcctgacagtgcccacgttggccttgaagatgcccaacggactggatggaatgtccctctctccacctggggcaagggtccctctccactacctggaaactgaattggaagacccatttgctttcaatgaggaagatgatgacctaaagaaaggggcaactgtgagaaagaagttgcagagcaagttggcccagaatcggcagcgccagagagagacagagattttaaaagttcgacaagagcactttagtccccctcctgcaccttcacagcagcagcctccgcagcagcactcccacctgtcacctttatctacttctttaaaacctccagcgccaccgcagggttcagtctgcaagtcacctcaacctcagaacaccagcctaccaatgcagggagtggcacccaccacacacactatagcacaagcacggcagttgtctcacaagaggcctctgcccctcctgccatccagtagggctcccactgtggacccacccaggactgaccggatcctcatgaaagccacagccttctctccacacttctcatgtataagccgactgcagagactggtgaaactgtgcacccagaaacatcagttggacactgatctgtttccccatttaggtttggactggtctgaagagagcggagaggaaccagaggactcagagcaggcctcgccctaccaggttgcatggtccatccgggaaaccctcagatatcaaagacatgtgtcagatgatgatgatgcggagagtaggagctccagggtgactcaactttgcacttactttcagcagaaatataagcacctctgccgcctggagcgggcagaatctcgtcaaaagaaatgccggcatacgtttaggaaagctttgctgcaggcggccagtaaagaaccagaatgcactggtcagttaatacaagaactgcggagagctgcatgcagtcgaaccagcataagccggaccaagctgagggaggtggaaccagcagcatgcagtggaaccgtgaagggtgaacagtgcgctaacaaagcccttccattcaccagacattgtttccaacatatcctcttgaaccactctcagcagctcttctcaagttgcacagccaagtttgcagatggacagcagtgctctgtgccagtttttgacattacacatcagacacctctgtgtgaagaacatgccaaaaaaatggataatttcttgagaggagataactcccgtaaagttcagcaccagcagcagaggaaacccaggaaaaaaaccaagcctcctgcactaaccaaaaaacacaagaagaagagaaggcgtggacctcgtcgaccccaaaaacccattccacctgcagtcccccaagggaacctcagcatgcctgccagcgtctcactgccagtggaggcctctcacatccggagcccatccacgccagagctgagtgctgatgagttgccggatgacattgccaatgagatcgctgacattccacatgacttggaattgaaccaggaggacttttcagatgtcctgccacggctacctgatgacttacaagattttgatttttttgaagggaagaatggagacctcctcccaactaccgaagaggctgaggagcttgaacgggccttgcaggctgtaacttctctcgagtgcctgagtaccattggggtccttgcccagtcagatggtgtgccagtccaggagttgtcagatagaggaataggggtgttctccacaggtactggagcttcaggaatacaatccttgagccgagaggtgaacacagacctaggggagctattgaatgggcgtatagtacatgataatttttctagtctagagctggatgagaacctgctccgttctgctaccttgtcaaacccacctacacccctggcagggcagatccaggggcagttctctgccccagccaacgttggccttacttctgccactctgatcagccagagtgcacttggggagagagccttcccaggacagtttcatggacttcatgacggcagccatgcctcccagaggccacatcctgcccagctgctgagcaaggcagatgacctaatcacctcacgacagcaatacagcagtgatcactcacactcctcaccccatggaagccattatgatagtgagcatgtgccgtctccctacagtgaccatatcacctctccccacacaacatcgtactctggtgataatatggcagctccagtgtgcttccggggttaccacagaccagcttcagtggcatggggccttctgctgaactaatggcctccacctctcccaagcagcaactccctcagttcagcgcagcctttggccaccagctgagttctcacagtggcattcctaaggacctgcagcccagccacagctctatagcccctcctacaggcttcacagtaacaggtgccacagctacaagtaccaataatgcatcttctccctttccctcccctaactgagggtgtctgtgtgtttgcaggcaggtggggaacccagtgttttctatctttgtttcctctttagcacccctctccccttttcctaaagaagatataacagatggggatcagaggggcaccccccttcccagttcaatgagtggccctgcagtggacctcgctacagtgttcacatgtgctccttagcactggtgctcattccctcctggcaggcccactccgccccagtggtttccttagtggttcagcacagtgactggataggattgatttttagcagcaagtcctagaagtggaagatacctcagaataccagtgccctttactatttcctagtattcagatcagtgctttccattctgttgccaggtttttacataggtggttctagatagaatgatcttattaattgagttcctgtataagagacagcaaatggtgtgtggcaggtcaagattctgacctagcaccaactgctaaacaccacagtgaggccaggattccattcgtaattgtgatcatgttt

SEQ ID NO: 1372 - DNA, 2662 bp, Homo sapiens
agagagattttctccaggagcaggtcaacacctttgagttgttcaaactggaaattagaactctagcccaggctttgtcaactgtagaggaaaagaagcaagaggaagccaagatgaaaaagaaaacattcaaaggattgatacgtatatttcggaaaggtgttattgctgttttggcagcaaacagactcaagattttgggccaatcatgtgccactctttttacctggatggagagtttcaaagaaggcataggcatgttagtgtgcacaggagagccccaagacaagcataaatttccaaaacatcaaaaggagcagttgcgttgtttacaagcgctcagttggctcaccagttctgaccttcttgctgcaataatcagttctatggctgaattacaagacgtcattggtaaagcagatccaaattccagaatttgtggacatttactcataggtgcagccaagaattcttttgcaaaactcatggataaaattagtctggtaatggaatgtatacctctgcacagtagcaggagtattacatatgtagaaaaagattccctggttcagaggctggcccatggacttcataaagtaaacacactggccctgaaatatggtttgcgtggccatgtgcccattacgaaaagcacagcatcgttgcagaagcaaatacttggatttacacaaagactgcatgctgcagaagtggagcgccgctcactacgcttagaggtcacagaattcaaacgaagtgtgaatgaaatgaaaaaggagcttgacaaagcccagggtctgcaaatgcaattaaatgaatttaagcagtctaaattgatcacccatgagaagtttgaaagtgcatgtgaagaactaaataatgcattacttcgggaagagcaggcacaaatgctattgaatgaacaggcacaacaactacaggaattgaattataaacttgaattgcactccagtgaggaagctgacaaaaaccaaactcttggagaagctgttaagagtctctccgaggcaaagatggagctgagaagaaaagatcaatctctgcgtcagctcaatagacatcttacccagctggagcaggacaagcgtcgactggaggagaacatccatgatgcagagagtgccctccgcatggcagccaaagacaaagaatgtgttgctaatcacatgagagcagtagaaaatacgcttcacaaggtcagagatcagatctcgctgtcatggtctgcggcaagtaggaatgacttcaccctacagctacccaaactgcacctggagacctttgcaatggaggggctcaagggcgggccagaggtggtagcatgccaggttagagtgcagtggtgtgatcatagctcactgcagtctcaaatgccagggctcaagcaatcttcctgcctcagcctgctgagtacctaggaccacaggtgcgcaccaccatacccagctacttggacaaaaaacagtgtttgatggactgcctaggtgaagacctggaaaaggaagggttatctacaaatgaactgatgaagttcttcaaattgatgccgcttatataaactgaccccgatttgccctattctgcatgacaacttaagtgacagcagttagaagaaaatacagcaatgaatatgcaacttaaggattaaggaagatgcagtaaatcagtctaaagctaagtacaatgataatttcttgtaataattccacagatgccttacatttgttaaacagactgttattactctcaaatactcaaatatatgttttcattatatacatgtatttgaattgaagaagagaactaaaagttattccaacagagatcctaattcttttccctcttatttaaacttggaattatcaaaatcacagttttaaaaatattttatttaggatatccacatgcaaaagaatgaaattggaccttggtcttacaacatgcacaataatcaactcaaaatggagtacacaatgttagaaagacctaatgccataaaacaaaggaaacaacaaaatggaaaggcaacttgtggaataggaaaaactatttataaactgtatatccagtaaggagtttaatatccaaaatatataaggaactcatacaacacaataacttttttaaaaaatgggcaaaggacctaaaaagacatttttccaaagaacacatgcaagtggccaataagtaaaaaggtgttcaacaccgctaaccattagggaaatgaaaatcaaaaccacaatgagatatcacatcacaactgttaggatggctattaccagaaagtcaaaagacaacaagtgttggcaaggatgtagagaaaagcgaacctttgtgcactattggtggaaatgtaaattggtatagctattatggaaaacagtatggaatttcctcaaaaaataaaaatagaactaccatatgatccagcaatcctacttctgggtatacatcaaaaggaaatgaaaccgttgtcttgaagacatgtctacacttccatgttcattgtagcattattcacaatagccaagatatagaaacaacctaagtgtcctctgatgaatgaatggacagaggaaatgtttatacacacacacacacacacacacacacacacacacccagaggaaaattcagcttt

SEQ ID NO: 1373 - DNA, 2655 bp, Homo sapiens
gcaggcctttgcatttctccagcctcccttctgctggcacttgaaagattacaccaggtcccagcgtgctcactgtggtgaactttaagctttgatgtggtccttgggtggtctggagctctaaaatgcctattgtggacactcccttgagcacagagaaggcagccgactctttttcctccaagtatattcccaatttactgtgatgctggaaataggcaaggaggagactgggaacttggagagctgagctggctgagtggggctggcctgagcattctgccaggggtttggtaactagtttttaaaatggggaaagtttgtaaatattgtgaccgtgtaaataacctctcagtgaaacctgaagttctgttagtgatagcagggcagcattttgcacaaaatgaagcatgcatacctctggacagaaggctgcttagagtttctttgcacaggagaagtttggggaggggctgtcagacccaccccccttctgtgcagccttctggaagggggcttcactctaggctggtggcgtgtaaggcctcagtcttacatgccaatggagaatggcaagttctccattcatccatctgggttgaaaaggcctagcgaccagttcaagcctctccctctcatctgtagttgctaacttttcttaaacatgttgtgggaagaggagaccccagcaagtgtttcttaagtgatttcaccagtgaaacccccaggagacttttgctgggaaggctggcagtggagctcactaggaagccttcttaccaaggaaaagccttgtgttcttaggctagacagctctcctagctggagcctccttgagagccacagcagtaactgtgggcctgggacatgcccacagagagcaggtctcttcaggcaacctgggagatctagggcctactggggagggagggagccaagtctaggcaaatggagaaagtgacatttcagcaaacttgttagcacttccatggagctgtgatcagttgtccttaggagtcgaggaggagaggaagccatcacgttcacctgacctagttttctgggagaagtttctctggcagaccttgtttttagataggctcatgtctctttctccctgaacaaaggttctggctctgttaaccaagtttgggttctatgttaacctccagatgatcctgagatcaattttcataaacagggataaagaggaagaggacttggagggactggtacagcaagacctacgtttcctgtctctgccttaccccaaagaaagaactgtcagtatctttgccgctggaaggtcccagtgaagcccagagcctctgcccccagctcttggctggacacctagagatcagtcatgggtaatagtgttgaagctcaggaagcctttagacctgtcttccaacttccccactttatagccaagaaaccagacccagggcatgaagggatttgcctcaagtcacacaaatgtcacacttggggctagaatcctggtctgagttccagcccagcattcaatctcttttttcagacccattctgcatcttgcttttcttagcatagaaagtttggttgatagtgtaaacaaaatggataccactgaagatgcagagtggcacagagctcctgcctgcccacggcatcaggaggcccagcttggcaaacccttgcctgttacctgttacaggctttggtgcgggcgaagggagcagctcgaggaaaggtggtggtttcttgtacagatcaaagtccacgtggtgcctgtcccagctccacctgtctcgatccaacacaggctccagtacattagcaaacagggagttttccttccactcctaaattgggggagtaagtaaatcaggaggagaaaggtccctatggacaccccacctgagaccctgctcttccctgtggacctcattcagctctttgatgggtggcagcttgagatcctgaaagctgctttcggtgtcgctctgaagacctgtcacttggaatcccctggctgtgagccaggcctggcgggatttcttctgggctttcttctcctcttccttcaagtccaggggctccaccatggctgagaggtaatcctgtgagtacgtgaatctctttcttggctcctagaaatgggggcagacaggttggggtggaagggctaatagcaatcttggatttatttccaagtaggaatcagaaacagctgggggcataatcatagttcctgacaatgtaaatagtgcattgagaggaaatgactgtgcagtagccctgtaagggacatattattgtcccctttgatgggagaagccgtttcctaaagttaatatgtgctggaagcctaaaccatggctttcccttctgttggtagctgccttgataagcagcaatcataaagtgttccccagaggtaaggatgctacagttgttctcctttatgtacatctgagcttacattgaggatcttgggcttaccctcaggtgtggaggattcacatttagtgtggaacagaacacctctcaacatctgagccttgtctacttcccctagctgattggctttcatctgtatagttgagatcccccactgacctccaggcaggcatggtcagaataaagaactcatgggatttgccaactgct

SEQ ID NO: 1374 - DNA, 3841 bp, Homo sapiens
gtttgggcctttacagacacacctttccttttggcagctgctatggcacggattctctatgccagcacgaagctggaaaacctgcctacctggctggtgaaatgagggtggcagctggaggaaacaggcatcttaggagactagaaatgtccttcaaagggacttcagtgagtgctcaggggaccaggggtgactgtgttaagaagggttagaggttgagagggagccatgagcttgggtcatcaccccagtgagaccatccaggcacacagctcccaggcttgggaggccgcctccagtccaccaggaccctcagggagctgtgacttcattgaagctgggtctaaaggcttccttcaaggctcagcaaactgggttttcaaagatttttgatccctgaagctaatttacacgttatgtggggccatggcaaagacttggccctgaagtggacagaaagaggctgtgctgagtgatgaatgagactaaacagtgttctcatgcttggtgattttgatgagaacatactacataagagttaagagcattataattccctttatcaccatataaacatgtcacttatccggaaagcatacaatttatttgtacatgagaatgtaaatttaaaaattttctgaaaactagattaaatcttgagaagcaattttcaagtaaacaaaaacatgccatgttaatcagcactagatctcccccaccccccacataatgtgtatgtacacatttctcaaattcagactgcagtacagctgtctccttggaggcgtcaggggttcctaagcctaaattctacctctagggtcttgatccctcaagagttcatcctgagttaaaattttgttatccccggaagcagagatgcactgactctggtgatctcagtatgaatgtggtatgaaatcttctaggtgtctttggtggggcctgagggagggtaggaaaggtgacgaggaaaaagtagagggagcctgaacaccctgggtctcaggtacggagtgaagaaatcactaaggtgaaaagacaggctggggcccaggagctcgtccaagtcctgatgaacaacaagtcctgggcaacatcacaggccaccaaacacaccttcagctccagggtcgaatagatggtggaagagcacagccatctggaaaagcagaaaaaagtggggaagattttctatcttgaacttgtgagctggagaattaccattagtagcccactaataggttatggccgatgagtcccttcataacacactgagagccacttttgacactcccagaaaaggcaggttaacaaaaccccttgatggaaggaagaccctcattgcccaatgtacccaagcctctttgaaccttgcttagactgaactgcaaatgtcttgactgctctgggctccttagtgcaactccttcccacagaagccatcaggagcctggtccaggaagctcctctcctacacctgccttaaaaggcccagctctgctggggagtaaggttcatgggggccgtcccaatgcaaaagggaatctctgccatcacccactgcaaccacatggtagccactctgcagccggcaggcgtgaggcatgctgcgctaacatgggagggcggaggctctgcctgacttcccagaagcccagtgagaagtccaggacaatcagcaggtgctatgggaaccttggctggcaggcaccatgtcgtcctgtatgatcggcaggaccagctccttcctgaagacaccaattcttggcggctcctgacaaggattgagaggatttgtgggggacagccctgaagccctgagccctcaactcaatgaagggattgtgctggtgtagacccacagccatccagctctgtcactgatgaaggtctgaactgccatactctgcccctttggtgtcagccttaaaggtcagttttaggtgagtttcaaccagtggctgtagatgggtcctttgtttaccagtttccccacatcctgtcttgagaccattgctagtttttgtctgcaccagtcttagggaaaacaacctggacaccgtgggtgagatcaccagtgggctccaagccagagcatgggcctgggacagggtgggttaccttggcatactctaacatactcaaacctcatttcttttggggtgatcagacccaacagcaggtcatgggggcgacgaagtccagtggagtccaaggaatgagaaagacagtttgagagagaaaatgggaccagggggctatcacaagtgtggaggctgcaacaaacaggtggtgaggatgtgggggttgaaaggaaacggtgtatcaagtgaatgagaaacatatggctacttgagaacatgggaatgctagaagcaaggagcagcaagtctagcaaacatgcaagccctgcctcagcttctctcccaacactcagcttttcttccaacacatttcatgtgcaaggttctcgtgcccactcctcttgtacagtttggcagcctcatggagcttcccctggtaggaaaacacatctgccagaaacaggtcattgttggtctctccccgcttcttcctctcctggaaaaattagaagcaaaggaaatggcctctgcagccatgggcagaaagcagcctttacaaaggttagatgtggctatttcaagtgaggcccctgggccttcctactggaacctgggcttggctcctggctgttgtctctctcccctaggttcccgctgggaaggcttgataacaaaagcaggcttttaccagacaagcaaagatcaaaaaaagatgcaaacctttgtttgtttaatggaaattcctcagggttgctttcctgtgtattccaaagctatgacggaatagtttgaatagtgtgtgctctgactcatccatgacccctaagctcccaagatctcccaaatccgcaggccccgtttggcagagttgtggctcatggggatgacagagcagaatgtttagggtttctgcccaagagggagaccaataaaataggatgacaagtcttacgatgtccctacttctaaagagaaggtaagaaatcccgtgctgaacatccactaggttctgggtatatacttaatacacacatggcccctttattcctctcagtgaccctcagggtaggtctcactacccaagtgttagagtgaaggacgctgagactcaagaagaggaacaggtcagggtcagacagagctggaatttggacacagttctgtctgactccagatattccttgtatcacacaatactgtcttctgaagcaagtgatggtccccaacacacacacacacacactctctctctctctctctctctctctctctctctcagcagagctgaggataaagaggaatatcctgcacacttcttccttctgtgtcagggaacatttgcttgtctacagctcgagtatttgtaaacactcagtagcacccaaaccctgagccctagcagtttccttttgcttgtttactagcaaaagtagcatgtcggaggacgatgagacattgaatcaaactcttagacaagctggtgaaagttttaacgactgctggaggcaacatgcttccacactgacagaaatcatctttcaaaaatcctgcacatatctcaggcttatgaaacaaactaattcctaatagttggaaatgaattaaaagcttgcggtgagataaaagatagattttggctggatgtgatgactcatgcctgtgatccctacactttaggagggcacagcaggaggatcgcctgagcccaggaattcaagaccagcctggtcaacatagcaagactctctctctgc

SEQ ID NO: 1375 - DNA, 2298 bp, Homo sapiens
taccaggtcattgtgcaggagaacaacacgcctggcgcctatctgctctctgtgtctgctcgcgaccccgacctgggtctcaacggcagtgtctcctaccagatcgtgccgtcgcaggtgcgggacatgcctgtcttcacctatgtctccatcaatcccaactcaggcgacatctacgcgctgcgatcctttaaccacgagcagaccaaggcgttcgaattcaaggtgctggccaaggacggcggccttccctcactgcaaagcaacgctacggtgcgggtcatcatcctcgacgtcaacgacaacaccccggtcatcacagccccacctctgattaacggcactgccgaggtctacataccccgcaactctggcataggctacctggtgactgttgtcaaggcagaagactacgatgagggcgaaaatggccgagtcacctacgacatgaccgagggcgaccgcggcttctttgaaatagaccaggtcaatggcgaagtcagaaccacccgcaccttcggggagagctccaagtcctcctatgagcttatcgtggtggctcacgaccacggcaagacatctctctctgcctctgctctcgtcctaatctacttgtcccctgctctcgatgcccaagagtcaatgggctctgtgaacttgtccttgattttcattattgccctgggctccattgcgggcatcctctttgtaactatgatcttcgtggcaatcaagtgcaagcgagacaacaaagagatccggacctacaactgcagaattgctgagtactcctatgggcatcaaaagaaatcaagcaagaagaaaaaaatcagtaagaatgacatccgcctggtaccccgggatgtggaggagacagacaagatgaacgttgtcagttgctcttccctgacctcctccctcaactattttgactaccaccagcagacgctgcccctgggctgccgccgctctgagagcactttcctgaatgtggagaaccagaatacccgcaacaccagtgctaaccacatctaccatcactctttcaacagccaggggccccagcagcctgacctgattatcaacggtgtgcctctgcctgagactgaaaactattcttttgactccaactacgtgaatagccgagcccatttaatcaagagcagctccaccttcaaggacttagagggcaacagcctgaaggatagtggacatgaggagagtgaccaaactgacagtgagcatgatgtccagcggagcctgtattgtgatactgctgtcaacgatgtgctgaacaccagtgtgacctccatgggatctcagatgcctgatcatgatcagaatgaaggatttcattgccgggaagaatgccggattcttggccactctgacaggtgctggatgccccggaaccccatgcccatccgttccaagtcccctgagcatgtgaggaacatcatcgcgctgtctattgaagctactgctgctgatgtcgaggcttatgacgactgcggccccaccaaacggactttcgcaacctttgggaaagatgtcagcgaccacccggctgaggagaggcctaccctgaaaggcaagaggactgtcgatgtgaccatctgcagccccaaggtcaacagcgttatccgggaggcaggcaatggctgtgaggcgattagccctgtcacctcccccctccacctcaagagctctctgcccaccaagccttccgtgtcttacaccattgccctggctcccccagcccgtgatctggagcagtatgtcaacaatgtcaacaatggccctactcgtccctctgaagctgagccccgtggagctgatagcgagaaagtcatgcatgaggtcagccccattctgaaggaaggtcgcaacaaagagtcccctggtgtgaagcgtctgaaggatatcgttctctaaaccagtctccaggaagaagagaaagaaaccacactggctagtgaagaagcaggagcttcttgttttaattgctcaccaatggttggttcttgagtggctatatttcagagcttttcctaaatgtattgtttataggtgattatcattctgtgacagtcccttgtttcaacaggcagcaggggtgttcagttggagcaaattagctttggcttgagttgttcatggggccttgatgttggggaaacagagacaaattcagttgtgaaaagtattatgtattaagtgtttgaatttatatatttttctatgtcaaaattataatataaattaccattgtttgtggaggattacatttaaaaaagc

SEQ ID NO: 1376 - DNA, 3167 bp, Homo sapiens
cttctggttctcttaaatattgattatcctttagggcaaagagagatcataaataaagatagttaaggggaatgtaaaagtgataaatattaacttgtaatctctagaggcctcatgtaatacatgatctggggtaatgctgttttaaactcaagccagtccatcttttacttttctttctgtttttaaaaggaaaagggaatttagttgtgatgattattcaagaatatatattaatattggtatttcttggaatttctggaaaacattctggcccgtctaccatttgcttctcagaaaaaaacattttatacaaattttcagttttaaagacagaatagtagacaatgaattccagaaatggatttttaaaacaaaccatttcagtgaaaggcactgaagatctggtaataaatctaggaaataaattttaacatatttacagtcgggtttttattttttaacaagagtgatagtgatgttgtatataaggacttgtatcttgcaccactgtattgagagctaatcccaccacagaggaaggcaaatttagtgtgcattcttgaaagtgcttagtactttgaggttggtccattgagccaactgagaagattcttctctaaaacatgaggatcttgtgtcggatcttgtagcctatttatgttgccttccttatcataacaaatttaatataatttgattaccaagtacaatttatttttctgagtactttaccaacattctccaattactcttggaaaatgattatactgggtggaaatgtattaagttttagcagtgtcacatgttgagcaaaaacagttgaatctgaaacagaggaattttgattcacaaatgagtctgccagtgagaacatacttacctatagtctttgaagcagctggttagagcttattgcagattcttggtctatgctcattaagtttagtacacagttcagcctgtgcctgaatgttaaattggaagtgatgtgatttttagaacagttcagaacaggcctgagctacctctggcatggagttgttgaaggctgcctgtggcccaccttcagtcccaccagactggttcttccctgctgggacacaggcatcataatgcaagggcaggttgttacttgccacatcaggtggtgggattcagcattgaagctacttaaactccagtgacatgattttagtttctcatactgtgaagctagaatatttgagactgttaccatcctaatttaggtttcttcatataaagtacttttgcttttctcatctcagtgtcatttgtctctactcttgagttgtatattggttttctacatgtcagacagattcatctcttcagagttggaatataattattatttgtataggtgcataatcttgtatgtttacgttgaacagattttcagaaataccatttacatttagaaaatacatagatgtatctaaggaatttttctgttgtgctataatacatactgtttcaaatatgtggtaaaattctgtgacctgccatattggatttaaaacttcatcttcatcttaaaacttcatcttttgaaatctctgaaaatcattagtgtgcatgtattgaacaccagtctttattctgtaattaacaccccagatttctttcccctcaccttatgccatccatctgtgtgtttggtttccagtatgccatgtggaagaggtgtgagcctttcttcagcccaagaaggaaactttaaacatatttgcacaataaaatttcaaattaaacatttcaaaaagggtgctcagactagaaatacatgctcttctgaaattccatgttgcaactgtaactcctgtcatatatacccagtgtatgaggaaaagttcttgcagttttcacactgcccttctgtattgctgcctggctgtgctctgttgttggaactgaaatatgaaatttttactttgaagtatgttaatgtcaaagttgatcgtattaagtttggaaatcctttgaggtttatctaataagtgtgttggagcttctgtctcttctggtaatactgtaccctgttgaaccaagaacagttttattgtttgtgggacttcgttggttttctaataccataacctgtgtccctgtgcagtcagggggtcacttctttaagatcatgtataatacggcccgtcatatacacgtagatagagccatgtgattccagaaattagaagactggatctgtggaatccatacatgttaaaattttgccaaaatgagatgattaaaatttttgtgagttttataaactgttgcagttcgccttactgatttttcaatgataatcacttttatgggaagggggcttaggaacaaaaaactttgccaagaatgcaaaatcttactggtttttaaagcttgtaacagttgtgtgtaaaacttttatatttgaaacgtaaactcaccctttctgccactgctttcattgcacttttcgtaccaagttctctccaacgtggtgtctgaaagatttttattatatacactctttatggaattcaatgaagtgtggttatgctgtgtttctgaagtttttaggcttttcttcattggcctgcctaatactagtgtgtttctataacttcagatgattcaaaagtttagtgcttcattgtagcaaaaaatgtatataactcataatatcctacatgtagtattcaaaatcaattattaataaccaataaaagactcaacacattttcattgcgtgttcttctttaggatacctaaactcatatctcataatttctgaatccgcaatccctattcattaattgattacagtttttgagttgttggaaagcctagccctctcagattcagggttcagaaagaattaccaggtctggtaaaattgtctgactagcccttagcctcagaatggtcaacttcatagtataagcaaagaaagtggtgatctcatatagtcagctttttcatgaacattaattcatggtgaatgcactcacagcaaccaaaatccaaaaaaaaaaaaatgttcatctaaaaccttaaacattagcttggctcattgagttcttggtacaacctgcttttcatatgacacagtatcaaacatgatttcagatgaaatgggtggtgttaatattgtgttaaag

SEQ ID NO: 1377 - DNA, 2597 bp, Homo sapiens
cgtccgttgcgttctgcatccagtccttgctgctccgagaggccccaggtgcctccgccacggctcctgtgacgctgtcacctgcgctgtgacctgctccggagtcataaagaggacgccgggacaccaagaagcagggaaatggacccagtggcctttgaggatgtggctgtgaacttcacccaggaggagtgggccttgttgaatcctttccagaagatctctacagagatgtgatgcaggaaaccttcacgaacctcatctgtatagaaattttatgggagagagactctttgagagtgcagaaggtagtcagtgtggagaaactttcacccaggttccggaagacatgctgaacaagaaaactcttcctggagtaaaatcatgtgaaagtggtacatgtggagaaatcttcatgggatattcatcctttaataggaacatcagaactgacactggacaccaaccacataagtgtcagaaatttttagagaagccatataaacataaacaacgtaggaaagccttgagccatagccactgctttcgaacacatgaaaggcctcacactagagagaaaccttttgattgtaaggaatgtgaaaaatctttcatttctcctgcaagcattcgaagatatatggtaacgcacagtggagatggaccttataaatgtaagttttgtgggaaagccttggattgtctcagtttataccttacccatgaacgaactcacactggagagaaacgatatgaatgtaaacaatgtggtaaagccttcagttggcacagttctgttcgaatccatgaaagaactcacactggggagaagccatatgaatgtaaggagtgtgggaaatcattcaatttttccagttcctttcgcagacatgaaaggacacacacaggagagaagccgtacaaatgtaaggaatgtgggaaagccttcaattgtcccagttcttttcacaggcatgaaaggactcacacaggagaaaaaccctatgaatgtaaactatatgggaaagcattatctcgccttataagctttcgaagacacatgagaatgcacactggagagaggcctcataaatgtaagatatgtgggaaagccttttactctcccagttcatttcaaaggcatgaaagaagtcacactggagagaaaccctacaaatgcaagcaatgtgggaaagccttcacttgttccacttcgtttcaatatcatgaaaggactcacactggagagaaacccgatgggtgtaagcaatgtgggaaagccttcagatctgccaagtacattcgaatacatggaaggactcacactggtgagaaaccctatgaatgtaagcaatgtgggaaagcatttcattgtgtcagctcctttcatagacatgaaaggactcacgctggagaaaaaccttatgaatgtaagcattgtgggaaagccttcacttgttccatatatattagaatacatgaaagaattcacactggagagaaaccttaccaatgtaaggaatgtgggaaagccttcattcgttccagttactgtcgaaaacatgaaagaactcacactattaatatatgagagaaatgctattttttaatttttattttaatagagacagggtctcactatcttgtccaggttggtcttgaactcctggcctcaagcatccctcccagcttgaagtgtcaataaaggaaggcaataaaatgtagagatggagttaggtgatgccacgctgggattcactggtggcctatcttacatatgatttcgaaggcagacatgaggaaggccttagtcacattttagagccagccaaattcacatgggctgtgtggccccctgattctagcccattttcctgattctctggcttgtcaatcaagagtatcctccaaatctcttgactttccttttttcagaggtgtaggtttccaaagatgtccccagaagctccacattcaagttctatctacagtttggtttttctttaagtattgtaatgtacataccagagagataatgcagactgtcatgggtggggaatgttctctgatgctcaactcccctagtctgcagattgagttggtaggaggtgtgatttgtttacatgcacctttgttcctgctggtagtgaccttgttcttgattcagcctgacagctactatgctgccatcagaaccaacttgatgagagctctgctgccctgtgcagtgactggtctcatccaggactctcatgtgagaagcaacaccttgctctggtcaggaaatgtccagtgtttcctgttatccacaggagaatgtaatgcctcagttcattttcagttatctttgattatatgtgattgacaatgtgtatttttgagggagcaaagatttctgtacatatttcttaaaaatagtttattcagccactgttcccagccacaatttttatcttgaccataatttgtcattcttttataatccccgaagttaaatcttgctgttatggtgctgtgttgcccaaaaccaccagtactaaaaaaactgttgtcaaagaggatgtaataaattgtagtaataaatatgaccacaagcc

SEQ ID NO: 1378 - DNA, 2406 bp, Homo sapiens
acacgttgcccagccgtgtggctgggatggtcggtacccatggccgtgcggtcgagccttgatgctccaggacagtcctggaaggcttcctggcagatccgtgggaagaaagccgacagaagggcgggaggcgggaggggaaaggtcccccgggatgggtagggcctcaacgctgggcatcggcgcaggtgtgtactgcagggagccagccagaccccccacggactgcctgaccttgggggaagcccggagtagaggaagaggccggacccccagacccgccattgactatgtccgccattgactatgtgttctgagagaagttttttttttttttttgagactgagtctcactctttcgcccaggccggagtgcagtggcgcgatctcggctcactgcaagctccgcctcccgggttcacgccattctcctgcctcagcctcccgagtagctgggactacaggcgcccgctaccgcgcccggctaattttttgtatttttaatagagacggggtttcaccgtgttagccaggatggtctcgatctcctgacctcgtgatccgcccgccttggcctcccagagtgctgggatgacaggcgtgagcctctgagagcaaattttacccagttcctctctatcctcccgatgactctgaaatcaaactcagcaagtcatccgagcccccacggcgcagcggccctaggctggcatgggcgatgcggagctactccgccctcaggaagcaggcgaggtgcccagcgggagaatcacccacatcaccgtctaatctctgctgtgaagtggaagcgcgagaaggagggagcgtctcatgacggagggtgtgaagacgctaggctggacgaagcagaaaggcgggtgtcactggggacgttctgagggtgctggggagtcagggaagagcaccatcgtcaagcagatgaagatcatccacgaggatggctactccgaggaggaatgccggcagtaccgggcggttgtctacagcaacaccatccagtccatcatggccattgtcaaagccatgggcaacctgcagatcgactttgccgacccctccagagcggacgacgccaggcagctatttgcactgtcctgcaccgccgaggagcaaggcgtgctccctgatgacctgtccggcgtcatccggaggctctgggctgaccatggtgtgcaggcctgctttggccgctcaagggaataccagctcaacgactcagctgcctactacctgaacgacctggagcgtattgcacagagtgactacatccccacacagcaagatgtgctacggacccgcgtaaagaccacggggatcgtggagacacacttcaccttcaaggacctacacttcaagatgtttgatgtgggtggtcagcggtctgagcggaagaagtggatccactgctttgagggcgtcacagccatcatcttctgcgtagccttgagcgcctatgacttggtgctagctgaggacgaggagatgaaccgcatgcatgagagcatgaagctattcgatagcatctgcaacaacaagtggttcacagacacgtccatcatcctcttcctcaacaagaaggacctgtttgaggagaagatcacacacagtcccctgaccatctgcttccctgagtacacaggggccaacaaatatgatgaggcagccagctacatccagagtaagtttgaggacctgaataagcgcaaagacaccaaggagatctacacgcacttcacgtgcgccaccgacaccaagaacgtgcagttcgtgtttgacgccgtcaccgatgtcatcatcaagaacaacctgaaggactgcggcctcttctgaggggcagcggggcctggcgggatgggccaccgccgactttgtaccccccaacccctgaggaagatgggggcaagaagatcacgctccccgcctgttcccccgccgcttttctcctctttcctctctttgttctcagctccccctgtcccctcagctccagacgtaggggaggggttgccacaggcctccctgtttgaagcctgcccttgtctgagatgctggtaatggccatggtacccccttctgggcatctgttctggtttttaaccattgtcttgttctgtgatgaggggaggggggcacatgctgagtctcccaaggctgcgtctggaggggcccctgcttctccagcctggacccccagctttgcccaacaccagcccctgccccagcccaagtccaaatgtttacagggagcctcctgcccagtcccccaaccccagccgctcggaggccccaaaggaaaaagcacaagaagcgtgagacgccaccattcctggaaaccacagtccacctgctcattctcgtagctttttaaaaaaatgaaagtaaagg

SEQ ID NO: 1379 - DNA, 2367 bp, Homo sapiens
aagtttgtagttcccagtggctcttttgttctgctatcttgaagggcaggttgcttgtcagctcacaatgctgtgggtaaggtctggtgaggtcggcgaatgtgttctcattgtttattcttctgcctgaagatgagaaataatgcaaatcagggtgcagattccggctcgagctccacaggcgtgcacgtatgtgtaagggcatgctcgccggtgctgcatgtcctcgtggatgcatgcaatttttacagctttgggattcacggttagctgaaagcacattggaactggaaggcggtgctcttaacaccgtgttctaggctggaagccgtagagccatcatctgctctgatgggactgcagcccttggtatgtgggacccttgctccatgtgagttctgcagatgggttccccgagggagctggctggaggacgccagcatcgcatgaagacctgcctgcctcgtttgccttttgtttttcagtagcagtaagaaacaggcattctcactacacaggcattgaatgcggacattgagaaaaaatgacaagcagatgcccagtgtcgggaaggcagcccaggatcacagcagcacccaccgagtcagaaggcaccgaacccacccacattctctgaactatctcactgccggggagccccagagctgccccgggagggccggggccgagcgggaaccctacctcgagattatagatactcggaggagagcaccccagcagacttgggaccccgagcccagagccctggctcacccctgcatgctcgaggacaagactcgtggccagtgagctcagccctgctctccaagaggccagccccacagaggccaccgccacccaagcgcgagcccaggagatacagggccacagacggcgcacctgctgacgcccccgtgggcgtcctcggcaggcccttcccaacgccatcccctgcgtccctggatgtgtatgtggcccgcctgtccctctcccacagcccctctgtgttcagcagtgcccagccccaggacaccccgaaggccactgtctgtgagcgtggaagccagcatgtgagcggggacgcatcacgtcctctgccagaagcactgctccctcccaagcagcagcacctgcgcctgcagacagccaccatggagacctcgcgctccccctcgccccagttcgccccccagaaactgacggacaaacctcccctgctcatccaggatgaggattcaaccagaattgagcgggtgatggacaacaacaccacggtgaagatggtgcccatcaagatcgtgcactcggagagccagccagagaaggagagccgccagagcctggcatgccccgccgagccacctgccctgccccacgggctggagaaagaccagatcaagacgctgagcacatctgagcagttctactcgcgcttctgtctgtacacgcggcagggtgctgagcccgaggccccacatagggcccagccggctgagccccagcccctgggcacccaggtgccccccgagaaagaccgctgcacctcccctccagggctcagctacatgaaggccaaagagaagactgtggaagacctgaagtcggaggagctggccagggagatcgtggggaaggataagtccctggccgacatcctggatcccagtgtgaagatcaaaaccactatggacttgatggaaggcatcttccccaaagacgagcacctcctggaagaagcccagcaacggaggaagctgctccccaaaatcccctctcctagaagcacagaggagaggaaagaggagcccagcgtgcctgcggccgtgtccctggccaccaattctacctactacagcacgtcggcccccaaggcggagctgctgatcaagatgaaggacctgcaggagcagcaggagcacgaagaggattcgggaagcgacttggaccacgacctgtcggtgaagaagcaggagctcatcgagagcatcagccgcaagctgcaggtgctccgggaggcccgcgagagcctgctggaggacgtgcaggccaacaccgtgctgggggccgaggtggaggccatcgtgaaaggcgtctgcaagcccagcgagtttgacaagttccggatgttcattggagacctggacaaagtggtgaacctcctgctgtcgctgtcaggccgcctggcccgggtggagaatgccctcaataatttggacgacggcgcttctcccggtgatcggcaatcactgcttgagaagcagagagtcctgatccagcaaatgtgtgtagatttcatgctcgacacttaccactcacctatcaacagatcatcctgcttgactgtaacaaaataaatagtgtctcttc

SEQ ID NO: 1380 - DNA, 2216 bp, Homo sapiens
tcagaaaatttaattcttcacatgtaagggagacaatagatgaggatgaagatgtgcgggctgagagattaagagttgagagtggtgcagctgaatttgacttggtccaactttattgtctcacaaagacctaccaacttatccacaaaaagattatagctgtaaacaacatcagcattgggatacctgctggagagtgttttgggcttcttggagtgaatggagcaggaaagaccactatattcaagatgctgacaggagacatcattccttcaagtggaaacattctgatcagaaataagaccggatctctgggtcacgttgattctcacagctcattagttggctactgtcctcaggaagatgccttagatgacctggtaactgtggaagaacatttgtatttctatgccagggtacatggaattccagaaaaggatattaaagaaactgttcataaactccttaggagacttcacctgatgcccttcaaggacagagctacctctatgtgcagttatggcacaaaaagaaaattatccactgcactggccttgatagggaaaccttccattctactgctggatgagccgagctctggcatggatccgaagtcgaaacggcacctctggaagatcatttcagaagaagtacagaacaaatgttccgtcatcctcacatctcacagcatggaagaatgtgaagctctctgtaccaggttggccattatggtgaatggaaagtttcaatgtattggatctttgcagcacataaagagcaggtttggacgaggatttactgtcaaagttcacttgaagaataacaaagtgaccatggagaccctcacaaagttcatgcagctgcactttccaaaaacatacttaaaagatcagcacctcagcatgctagagtatcatgtaccagtcacagcaggaggagtcgcaaacatttttgatctgctggaaaccaacaagactgctttaaatattacaaatttcttagtgagtcagaccactctggaagaggttttcatcaactttgccaaagaccagaagtcctatgaaactgctgataccagcagccaaggttccactataagtgttgactcacaagatgaccagatggagtcttaacacttccagcaaactcaatctcagcgtgtgaccaatggcttcattttgaagaaaagccacagaagatacacttccgcaagatatcttcattttaaagtaaagtaatatactgtatggaaagttacaactgtgttagactaacaagtaattataaaaggaaatttttccttctaaggtcagtgagtgttgttgctactgaaatgaattcctgtatactcaacactgtgagcatgctaatgtatatgctggtgattcttatgcaaaggtgaagccacctcaagatgaatatcttaatttattactttcaataaaaagacagtttaaaaggcatggattttggtagttgaaatataagagtggagaagaaaagtcagatggtttgtggcaggtgccaccgggcaagcagacaacataatttatttccagaaaacaacagaatgaacatcatcatgaatacatgaatcggctgtgatgtgtgaactgctaagggccaaatgaacgtttgcagagcagtgggcacaatgtttacaatgtatgtgtatgtcactttcggtacctgtgaatgcatggggacgtgctgaacccgaaaaaaagtgcctttccataaggactgcaatagagagggcaatttaccctggtggtacacggaacctagattcactcctgccatgccttgccaatagtaagctgcagggtggaacaagaaatcacttgctctggggggaagggaggggggaatgggtgtgtcagctgggtagatacaaaccctgaaaagagaatccatgtgctactggcaggcaacattttttaaagctctttcagaaaccctcatatttggggtttcttttcaggaaacattcctttggagggaaaacgaatatgaagataattttcagctaattatctgggtgacccagaatcgtgtatatggctataggatagacttcttaataatggcaagtgacgtggccctggggaaaggtgctttatgtaccgtgtgtgcgtgtatgtgtgtgtatctatacaagtttgtcagctttggcatgactgtttgtctcgaaaaccaataaactcaaagtttag

SEQ ID NO: 1381 - DNA, 2395 bp, Homo sapiens
cccccgcccccagccccctcccccggcgcggccatggatgtgaccagcagctcgggcggcggcggcgacccccggcagatcgaggagaccaagccgctgctggggggcgacgtgtcggcccccgaaggcacgaagatgggcgccgtgccctgccgccgggctcttctgctttgcaacgggatgaggtacaaactgctgcaggagggcgacattcaggtctgtgtcatccggcacccgcggacctttctcagcaagatcctcacctcgaaattcctgaggcgctgggagccgcaccacctaacgctggccgacaacagcctggcgtccgccacgccaactgggtacatggaaaactcagtctcctacagcgcaattgaagacgttcagctgctgtcctgggagaatgccccgaagtactgtttacagctcacgattcctgggggaactgtcttactgcaggctgccaatagctacctgcgagaccagtggttccattctctgcaatggaagaaaaagatttacaaatataagaaagtgctgagtaacccaagcctctgggaagttgtcttgaaagagatccggaccctggtggacatggccctgacatcccccctgcaggatgactccatcaaccaggccccactggaaatcgtctcgaaactgctctcagagaacacaaacttgaccacccaggagcatgaaaacatcattgtggcaatcgctcctttgctggaaaacaaccacccaccaccagatctctgtgaattcttttgcaagcactgcagagagcggccccggtccatggtggtcatcgaggtgttcacccccgtggtgcagcgaatcctcaagcataacatggactttgggaagtgcccgcgactgaggctgtttactcaggagtacatccttgccttgaacgagctcaacgcggggatggaagtggtgaagaagttcattcagagcatgcacggccccacagggcactgcccccacccccgggtcctgcccaacctggtggccgtgtgcctggctgccatctactcctgctatgaagagttcatcaacagccgcgacaattccccaagcctgaaggaaatccggaacggctgccagcagccgtgcgaccggaagcccactttacctctgcgccttctgcaccccagcccggacctggtgtctcaggaagccacgctgtctgaggcccggctcaagtcggtggtcgtggcctccagtgagatccacgtggaggtggaacgcaccagcactgccaagccggcgctgacggccagcgcaggcaacgacagcgagcccaacctcatcgactgcctcatggtcagccccgcctgcagcaccatgagcatcgagctgggcccccaggccgaccgcacgctcggctgctacgtggaaatcctcaagctgctgtcagactatgatgactggagaccgtctctggccagtttgcttcaacccattccattccccaaagaagctctcgcacatgagaagttcaccaaggaactgaagtacgtgattcagaggttcgccgaagaccccaggcaagaggtccactcatgcctgctgagcgtgcgggccggcaaagatggctggttccagctctacagccccggaggggtggcctgcgacgatgacggggagctgttcgccagcatggtgcacatcctcatgggctcctgttacaagaccaaaaaattcctgctctccctggcagaaaacaagctgggtccctgcatgctcctggcactgagggggaaccagaccatggtggagatcctgtgcttgatgctggaatacaacatcatcgacaacaacgacacccaactgcagatcatctcaaccctggagagcacagacgtggggaagcgcatgtacgagcagctgtgtgaccggcagcgggagctgaaggagctgcaaaggaaaggcgggcccaccaggctaacactgccctccaagtccacagacgctgacttggctcgtttgctgagctccggctccttcggaaacctggagaacctcagtttggccttcaccaatgtaaccagtgcctgcgccgagcacctcatcaaactgccttcgctcaagcagctgaacctgtggtccactcagtttggagacgctggccttcggctcctgtcggaacacctcaccatgctccaggtgctgaacctgtgcgagaccccggtcacagacgctggcctgctggccctgagctccatgaagagtctctgcagtttaaacatgaacagcaccaagctctcagctgacacctacgaagatctgaaggccaagcttcccaatttgaaggaagtggacgtccgctacaccgaagcctggtgaagctcccagctcaaggcaggaagacgtttgcaaccgcgac

SEQ ID NO: 1382 - DNA, 2467 bp, Homo sapiens
gagatgagaagaaagagtaggctctgttgtccctcagacggcgctgctgcagtgcgtcttcgcacttacgcggagcggtaatgtgaggaagcctcccgccaaacagatgagggaggaggaggaggggagaggccggagagagaagcggctttcgggaaggaaagtgtgatctaggaggtggaatagtcctctccaaactttgacctgagaatgaccctctatttggatttggattacacaaagtttaacgttttttggaaaaatcctacctaggtaatgtgtagttctcaatgcatcatgtcaggcagcttatgatgccaatttgtcccatggccttaaattccacaacctcatcatctaccacctttggtgctttcagaatcatgactctcaatgttgaagaatgggctactgcatggaaggtgctgatccttttagaggcagccgtggaagaggaaaagagatcagaagagaaaaggatattggtttgctggaacatgtgggacaagaagttcccagaagaatttgtgagcaacttcccgacagtaaggccctggctagacctcaggatggtccctgcctcctggacattaggaagcccaaaggccagaacaaaaacacatgcctagtgggggaaggctcactaagagggcaccaagtggggcaaatacccctggtaacccatttatggaggctgccacagaaatgctagttggaaattttcctccttcagtctatcatgaatttcttttttctcttttgagatgaagtcgcccgggctgcagttcagtggtgcaatctcagctcactgcaagctctgcctcccaggttccaacgattgtcttgtctcagcctcctgagtagctgagattataagcacgcaccatcatacccgactaatttttgtatttatagtagaaatggggttttgccatgttggccaggctggtcttgaactcctgaccttagggtgatccacccatcttggcctccaaaagtgctgggattacaggcatgagccactgcactcggctgtaccgtgattattagttcaaggttctctttcactggggtaaagaccttaagagagcagtttttgggctttatattctcaatttcccgcacagtgcctagcacatagcaaggactcaacaaatttcattgaatgaatgaaaaaacatagtttaccaaatgtcagtgtactcaaactcttttaactgctagctatagaaatccaattaagactcacttgggtaaaaaaaaataaaaaaataaacaaaataaactgctcacttatttgaaaaattaaggaaggatttcaggcatggcttgatccagctactcaaaaaaggttgtcagaaatgtctgtccgttcttcatttattctttctcatttgtgggctttgttcccagataagatcactccttctggggacaagatggtcactagtagatccaggtttactttctatcagctgagcaacctctcaagaaaaaataaataaataaataaacctctctttaaatagcaccaggctgctgggtgtggtggctcatgcctgtaaccccagcactttgggaggctgaggtaggaggattgtgggaagccgggagttcaagaccagcccagccaacattgtgagacataatctctacaaataaaataaactagttggacatgatggtgtgcacctatagtcccagctacttgggaggctgaagcagaaggatcacttgagtctgagaattcggtgttgtttaagccaccctgttgtggtatctgctatggctgcacaggcagaaatagggacacaagtgcaggttcagggcaaggtgtgtgagcacactcagtccctggcctcggagtctctctggatggcttcttgcctagggtgactgacagagggagggatgatatgcaaaggcacctgttctcctcatgacctaaccccaattcttactccacgggttcatgacagcctattctgctggagactgtgtcttaaaacttcctcccctagtttctctcaagtacccctcgtgagctgtgatttcactgggctttgaactcttaggccatttgaggctgcagtgagctatgattgtatcactgcactccagcctagatgacagaacgagaccccatctctaatgaataaataaatatggctgggcgcgatggctcaggcctgtaatcccagcatttggaagaccaagacaggcagatcgcttcagctcaggagttcgagatcattctggccaacggggcgaaaccctgtctctaccaaaaatacaaaaattggccaggcagggtggcatgtgcctttagtcccagctacagggaggctgaggcgggagaatcgcttgaacctgggaggcagaggtttcagtgagctgaaattgtgccactgcactccagcctgagtgacagagtgagactttgcaaccaaaaaaaaaaaaaaaaaag

SEQ ID NO: 1383 - DNA, 2933 bp, Homo sapiens
agatcccacatctcaagtcgtgcagtgcaggtcctcctattgcttctctgctgggtttcggtcacagtggagggctgtatgcacacacaggcacatgcctgtgttcttgagccgcgatgttcccccttcgggccctgtggttggtctgggcgcttctaggagtggccggatcatgcccggagccgtgcgcctgcgtggacaagtacgctcaccagttcgcggactgcgcttacaaagagttgcgtgaggtgccggaaggactgcctgccaacgtgacgacgcttagtctgtccgcgaacaagatcactgtgctgcggcgcggggccttcgccgacgtcacacaggtcacgtcgctgtggctggcgcacaatgaggtgcgcaccgtggagccaggcgcactggccgtgctgagtcagctcaagaacctcgatctgagccacaacttcatatccagctttccgtggagcgacctgcgcaacctgagcgcgctgcagctgctcaaaatgaaccacaaccgcctgggctctctgccccgggacgcactcggtgcgctacccgacctgcgttccctgcgcatcaacaacaaccggctgcgtacgctggcgcctggcaccttcgacgcgcttagcgcgctgtcacacttgcaactctatcacaatcccttccactgcggctgcggccttgtgtggctgcaggcctgggccgcgagcacccgggtgtccttacccgagcccgactccattgcttgtgcctcgcctcccgcgctgcagggggtgccggtgtaccgcctgcccgccctgccctgtgcaccgcccagcgtgcatctgagtgccgagccaccgcttgaagcacccggcaccccactgcgcgcaggactggcgttcgtgttacactgcatcgccgacggccaccctacgcctcgcctgcaatggcaacttcagacccccggtggcaccgtagtcttagagccaccggttctgagcggggaggacgacggggttggggcggaggaaggagagggagaaggagatggggatttgctgacgcagacccaagcccaaacgccgactccagcacccgcttggccggcgcccccagccacaccgcgcttcctggccctcgcaaatggctccctgttggtgcccctcctgagtgccaaggaggcgggcgtctacacttgccgtgcacacaatgagctgggcgccaactctacgtcaatacgcgtggcggtggcagcaaccgggcccccaaaacacgcgcctggcgccgggggagaacccgacggacaggccccgacctctgagcgcaagtccacagccaagggccggggcaacagcgtcctgccttccaaacccgagggcaaaatcaaaggccaaggcctggccaaggtcagcattctcggggagaccgagacggagccggaggaggacacaagtgagggagaggaggccgaagaccagatcctcgcggacccggcggaggagcagcgctgtggcaacggggacccctctcggtacgtttctaaccacgcgttcaaccagagcgcagagctcaagccgcacgtcttcgagctgggcgtcatcgcgctggatgtggcggagcgcgaggcgcgggtgcagctgactccgctggctgcgcgctggggccctgggcccggcggggctggcggagccccgcgacccgggcggcgacccctgcgcctactctatctgtgtccagcggggggcggcgcggcagtgcagtggtcccgcgtagaggaaggcgtcaacgcctactggttccgcggcctgcggccgggtaccaactactccgtgtgcctggcgctggcgggcgaagcctgccacgtgcaagtggtgttttccaccaagaaggagctcccatcgctgctggtcatagtggcagtgagcgtattcctcctggtgctagccacagtgccccttctgggcgccgcctgctgccatctgctggctaaacacccgggcaagccctaccgtctgatcctgcggcctcaggcccctgaccctatggagaagcgcatcgccgcagacttcgacccgcgtgcttcgtacctcgagtccgagaaaagctacccggcaggcggcgaggcgggcggcgaggagccagaggacgtgcagggggagggccttgatgaagacgcggagcagggagacccaagtggggacctgcagagagaggagagcctggcggcctgctcactggtggagtcccagtccaaggccaaccaagaggagttcgaggcgggctctgagtacagcgatcggctgcccctgggcgccgaggcggtcaacatcgcccaggagattaatggcaactacaggcagacggcaggctgaacctccgcccgtccggcccgcccattcccgacctccacctagggtgcctgggagcagcagtctagggctggcaggacttatgtcccccgtccccaaccttcacctactcctcccccttactactccccaaccttgactaccagggacttctattagggagtgggccgatttcaccagtccctgctacccacggctgccattctccctgcgggctgaatccccttccccgccaagcacagtgtttatcttaccccatgcaagactccacccgcagacggtgggcgatatctatgtccctccattcccgtcgcgattatctgcgaaatccaccccgcagcccgccccaccgtgggctctggagccagaggaaacgagcgaagactttggaaaccccgcggtaacgcggtggtttcgggggccagccaaggccagtggttggggtgggggggagtttcagtcctcgggatcagccctctccgcgaagcgcagcacaagcgcgggcctgggacggagtagccccccggagcccgtgcccttttctaaacgcgtctgtatgcagtcaataaaacaatcgatttg

SEQ ID NO: 1384 - DNA, 2573 bp, Homo sapiens
tattttgagacagggtcttgctctgtcttccgggctggaatgcagtggtgcaattgtagctcactgcaacctccacctctgggctcaagcaatcctcccacctcagcctcctgagaagctgggactacagacgcgtgccaccatgcctggctaatttttaactttttttttgtcaagatgggggtctccctaggttgcccaggctgatctcgaacccctgggctcaagagatcctctcgcctcagcctccctaagtgctgggattacaggtgtgggccacggcgctcggccaagcggcagcttcaccaatgacttgaatgtgaagcagaaggattccgagaagaaacggagccgtcacaaatgcatttcgaccagttgggtgactccagacccagagccgggcggacagcacctgttttctgtcttctcgcgtcagctgtttcttcgtgtcttcagaaggtgggcccttctggaatcgggtccagcgtgggcgcttgggcctccgctgacgagtatggacagcggccagggacgctcgcccctccactctcattccaaggcccccttcccagggcccaaagctggggcatgacagggtggcaatgggattggggagtctcttggccaactgcaagtggctttcgacacccccaatcccagctgagttgtcagaccaggcagactgcgtggccgggaaactggcccctggcactgtggagtggtgctggggctgagcaccactgccccaccggcactgctacccagggtctctgccctccaagggacgtggtccctgacagaggctgtgccagcctcatctttgagccttcaccccttccaagcctcaccaggtaagggcagttcagccccctcagctcagagggacctgggggagtgggggggtctggaggcctcccagaaacagcgtctcggaagggaggaagatggaggcggaaggcaaggtggtggccagggccaacccagagcatctccatccagtccccaaagttcaggagcatttttctacctaatcttccagaatttgttgccgaaaatcaacaacagaaaggcagtgaaagaagacagatccatgatctgcctgtggcctggctgcccgtgggccaggatgcctgctgtgaccaccagggagacacagggaccaacgtcctttgtgaaggatgcaggcactggctttgcagagccgccctcctagcaacttggggatggaagggtggtgggaagcaggacccgcccagacacaggtgtaggcgattggaaggtgtgggcaagggccccctatgagggcagagggcctgctcctggacaccctggcacatcccaaatatacaccaggcaccaggggagtggcccactcaacccgtgaggaaatggactcagacccggactccagagtcccactggaattggacccataatggccctgtggtccccggagtgagcgtcagctcaaacctggacccagcagccctccaggtctgcagatccacactagggatggagccagtgtcttgggtccacgttgtggggcttgggggacagaagaggcaaggtcagactaacagcacagcccggtccccagtgggcccaacacctggctccagtgcctatggagctccccagggttctccccaggaccctgacctccagtccccacaaggctgtcagccccaaaggcacacacacccgaaggagcccaagctggcgctgcgagtcaggcgggaaaggcccgggctgcagctgcttgccggggtcaccctttgactataattgaagcgcccagcagggcaggagaggaccacacagaaggtcagggccagagccacacccagcagtgagaggagccccaggcacagccagccagagcccacaagcttccgggaggggagaaagataccatgaacccaaggaggggacccagtagagaaggcccagcacccagagtgagaggcaggctcagtggacccctggccccgccatgcagccgggccctccccacccaggctgcgtgactgaggccagagggcccgtggagaaccactggagaggccagtgactgcacgagaacgccaggcaacttactaactctagtcaggcggctcagaatctggccacttccacatcggcgctgcaaggaaacacaaggctcagttggaggcagcatggggtctgaggactcgggggtgcagaggaggggggaccacgggcgagctgccaggagacctagaaccctggagcactcggagtcggcacacagctggggctctagctctccctggacggcgcctgcggagcctgcctcacttgcgggcctggagggagccaggagcctgcctcagctgcagacggccccccgcagagcccgggcagagtgagtgactgtcactggggccagctccgtgtgcaagcccaggttatctagcaggcgactgagtgccgagaaaatacctggcagaggtgggcacaaggcggggtccccacggcaaagacgcacgccgggaaccggaaggaggtccatacccaactcgtgcaataaataaaacttttattcaaac

SEQ ID NO: 1385 - DNA, 3738 bp, Homo sapiens
agaaagccgagggtttccgtcgcgaacccccctccccactcgctcagggctctccaatccgcagctctgcgtgcgggggcgcgcgcatccccccgccgtccgtccgtcagctgtctgtctgggtgtctatgcgggcgcagcagtgcacccttccccagcctcgggcgctgcgcagggacagacaaggcattcgcagcgccctgcccgcgctccacgcccgcagccgccagacggcagcgcctgcgtccgtgcccgccccagccggtgcgcgggagccgcgggggcaaaggcgcagtggccagcggaccatctctcgtgccctcgctctctgcgctccggggcagctgagccccggccacccgctctccaagatgaagaagctccagggagctcacctccgcaagcctgtcaccccagacctgctgatgacccccagtgaccagggcgatgtcgacctggatgtggactttgctgcacaccgggggaactggacaggcaagctggacttcctgctgtcctgcattggctactgtgtaggcctggggaatgtctggcgcttcccctatcgagcgtacaccaatggaggaggcgccttcctcgtgccctacttcctcatgctggccatctgtggcatccccctcttcttcctggagctctccctgggccagttctccagcctagggcccctggctgtctggaaaatcagccctctcttcaaaggcgccggcgcagccatgctgctcatcgtgggcttggtggccatctactacaacatgatcatcgcctacgtgctcttctacctcttcgcctccctcaccagcgacctaccctgggagcactgtggcaactggtggaacacagaactctgcctggagcacagagtctccaaggacggcaacggggccctgcccctcaacctcacctgcaccgtcagccccagcgaggagtactggagccgctacgtcctccacatccaaggcagccagggcatcggcagccctggggagatccgctggaacctctgcctctgcctgctgctggcctgggtcatcgtgttcctctgtatcctcaagggtgtgaagtcttcgggcaaggtggtgtatttcacggccacgttcccctacctcatcctgctcatgctgctggtccgcggagtcaccctcccaggggcctggaagggcatccagttctatctcaccccccagttccaccacttgttgtcttccaaggtgtggattgaagctgctcttcagatcttctattccctgggtgtgggcttcggggggctcctcacctttgcctcctacaacacgtttcaccagaacatctatagagacactttcatcgtcactctgggcaacgccatcaccagcatcctggctggctttgccatcttctccgtgctgggctacatgtctcaggagctgggcgtgcctgtggaccaagtagccaaagcaggccctggcctggcctttgtcgtctacccacaggccatgaccatgctgcctctgtcacccttctggtccttcctcttcttcttcatgcttctgactctcggcctagacagccagtttgcttttctggagaccattgtgacagctgtgacagatgagttcccatactacctgcggcccaagaaggcggtgttctcagggctcatctgcgtggccatgtacctgatggggctgatcctcaccactgatgggggcatgtactggctggtccttctggatgactacagcgccagcttcgggctgatggtggtggttatcaccacgtgcctcgccgtgacgcgggtgtatggcattcagaggttctgccgagacatccacatgatgctgggcttcaagccgggcctctacttcagggcctgctggctgttcctgtccccagccacgctcttggccctcctggtgtatagcatcgtcaagtaccagccctcggagtatggcagttaccgcttcccgccctgggctgagctgctgggcatcctgatgggcctgctgtcctgcctcatgatcccagctggcatgctggtggctgtgcttcgagaagagggctcactctgggagcggctccaacaggccagccggccggccatggactggggaccatcgctggaggagaaccggacgggcatgtatgtggccacgctggctgggagccagtcaccaaagccactgatggtgcacatgcgcaagtacgggggcatcaccagcttcgagaacacggccatcgaggtggaccgtgagattgcagaggaggaggagtcgatgatgtgaggcaggaggcaggcgggcagaaggccctgcccgggacctcacagtcccttcttagaagcctgcaaaggtcagctgtgccctctgggattctgagaggctatgggggggcctgccatagggatgccagtcccccagtgggggtcccttctgcagcctctgcctctcctgaaacctctgacaaccccctacacacacacacaggcatactcagacccactcaaagctgagaatgatccaactcagccctactttgcggatggacatattaaggccaggaggggagggacttgccccaggtcgcatggcagaggggacttgaacccacgcctcctgaccagccagctccctttcccatggggcagccggcaccaccttctcatctctattcagggcctacacccctccctttttggggggagcctgtccccacacaccttagcacaaccagaatcttgagttgggcagggaaggtcagggctacagaggctcttgaggctccgaggccctggggatcaaaggtcaatgagttaggtggggagaaagatccctgggggctcctgtatgcaggactcctgaaggaggtgggagctgagggccctggaggatggggaaggtttgcagagagaggaagaagagggcagggtggggaggagctctgggccagaggatgctgagctgcctgggcagagaccaagagggttggagacactagttttaccaggttacaggagggttcaagacagaaggaaaactaacagagggggagccagggatgatggggtgggcaggggatttgcatgatgaggagtatcattccagatctgtgcagagcggatcggacgggacagggtggagcggggaggcctgtgcaaagtgggaaagagctgccggtggcctgagccagggtgctggggctgcgggtggggaaaggaggccccagcacttcagacaaagaccaccccttcacccactggaccccaagccgcaaaagctggggaggtaggaagggtcactgtgagggcccagggcccctctcttcccatctcccttgtcctggtggccttcagtgtctcttccagttccaggagctgctgggaagctggccttcattgttggtgacagggcaaccatgggactaggaggtggcccatacacatggctggctggtcctgaggccacccaccttgttccaggacatgggcccgggcccggtgtgggggtagacgcagagggcagagggtagcccttggtactgtgggtccctcaaagaggagagtggggtgcagaaatgcctcagcatggctcatgcacacagcattctcccgtggggcagggttccctcatgcaacaggcctccctgtggccagcctctctgcctgtctctcgctgtgtccccccaaccccttgtgttctattggttcattgttaataaatatcaaatgaggtcacgctcctt

SEQ ID NO: 1386 - DNA, 3078 bp, Homo sapiens
attgtcgcccacgctgcagtagcggcttctgcggctccaagccagcgggtcctgtgaaggcgagcagacgcggagaaaggacgcgggagtgagagagggtgagtcagccactgtctaaacgataacgggaggcggctctgcggggtagggttgaattcagtaaatgggctcgtgctgctgtctcttcggaggcgctgctatcttagcgtcagcgagggaaggttgaggaggagccagagccgggtcctgcagcgtttctcgccgcctagccagtccccgtggtgggaagcggcccaagaagattcacaaacccacagtttcggccttcttcacgggtccagaggaattaaaggacacggcccattctgcagccctgctggcacagctcaagtccttctacgatgcgcggctgctgtgtgatgtgaccatcgaggtggtgacgcctggcagcgggcctggcacgggtcgcctgttcccctgcaaccgcaatgtgctggccgcggcatgtccctacttcaagagcatgttcacaggtggcatgtacgagagccagcaggccagcgtgaccatgcacgatgtggacgccgagtccttcgaggtgttggtcgactactgctacacgggtcgtgtgtctctcagtgaggccaacgtggagcgcctgtacgcggcctccgacatgctacagctggaatatgtgcgggaagcctgtgcctccttcttagcccgacgtcttgacctgaccaactgcaccgccatcctcaagtttgcagatgcctttggccatcgcaagctgcgatcccaggcccagtcctatatagctcagaacttcaagcaactcagccacatgggttcaattcgggaggagactctagcagatctgaccctggcccagctgctggctgtcctgcgcttggatagtctggacgtggagagtgagcagacagtgtgccatgtggcagtgcagtggctggaggctgctcccaaagagcggggtcccagtgctgcagaagtcttcaagtgcgtgcgctggatgcacttcactgaagaagatcaggactacttagaagggctgctgaccaagcccatcgtgaagaagtactgcctggacgttattgaaggggccctgcagatgcgctatggtgacctgttgtacaagtctctggtgccagtgccaaacagcagcagcagcagtagcagcagcaactctcttgtatctgcagcagaaaatccaccccagagactgggtatgtgtgccaaggagatggtgatcttctttggacaccccagagatccctttctctgctgtgatccatactcgggggacctttacaaagtgccgtcacctttgacctgtctggctcacactaggactgtcaccactctagctgtctgtatctctcctgaccatgacatctatctagctgctcagcccaggacagacctctgggtgtataaaccagctcagaatagttggcagcaacttgcagatcgcttgctgtgtcgtgagggcatggatgtggcatatctcaatggctatatctacattttgggggggcgagaccctattactggagttaagttgaaggaagtggaatgctacaatgttaagagaaaccagtgggcattggtggctccactgccccattcttttttatcctttgacctaatggtaattcgagactatctctatgctctcaacagtaagcgcatgttctgttatgatcctagccacaatatgtggctgaagtgcgtttctctgaagcgcaatgactttcaggaagcctgcgtcttcaatgaggagatctattgtatctgtgatatcccagtcatgaaggtctacaacccagttagggcagaatggaggcaaatgaataatattcccttggtctcagagaccaacaactacagaattatcaagcatggccaaaaattgttgctcatcacctctcgcaccccacagtggaaaaagaaccgggtgactgtgtatgaatatgatattaggggagaccaatggattaatataggtaccacattaggcctcttgcagtttgattctaactttttttgcctctctgctcgtgtttatccttcctgccttgaacctggtcagagttttctcactgaagaagaagaaataccaagtgagtctagcactgaatgggacttaggtggattcagtgagccagactctgagtcaggaagttcaagttctctttctgatgatgatttttgggtgcgtgtagcgcctcagtgaaatgcacaggatcaacagggtttgttgtaactagattgaaacactaagttgtttttactgttttggaaaatatcttaaatatcctttttgttcctaaaggagaggaaaagttgattaacttctggtttggtttagaaaaagtaatgtttgaaatacgaaggtaatttaatgttacaaattttaacactcaaatcaaccttttaataattttctgtgctaagggtccagtatttatttgattatttagtatgtttatgtttcatgacactaatttagtcttttgatacattttacattctgtttactgccacaagcactgtggcaataacttttgaattttaatttttataatagaaaaatgattaggaattgctagatagtgttttgaaagcatatctttttcttcagaacaatgtagacttccaaaatggttaacctaaggggtctttacaaaatgtgttataagttaaacataatttgggaagttttacttttgttttcttctatgaagaaaaaaatgcaggctgggcgcggtggctcacgcctgtaatcctagcactttgggaggccgaggcaggtggatcacctgaggtcagttcaagaccagcctggccaacatggtgaaaccccgtctctactaaaaatacaaaaattagctgggcgtggtggcatgcgcctgtaatcccagctacccaggaggctgaggcaggagaattgctgaaacccgggagtcagaggctgcagagagccgagactgggccactgcactccagcctggatgacagagtgagactccgtctcaaaaaaaaaaaaaaaaaaaaagg

SEQ ID NO: 1387 - DNA, 2742 bp, Homo sapiens
atttacagaccactccctcttcttgttcccctcgactctgagagtgtggtggggtagctgtggaacctgactgcttgcctgaaggttgggcagcgtggctagaaattgcggcccagacctgggatctcacccacacctctatgagacgtcctgaaggaaaccatcgactgagcggagaggcttcgccttgcccgcctcctcccaggaaggaagagcggaagaggcgtcgccagccaccgagactgccagccaccaccccctcccagactctctgtccccaccccagaccagggtcaccttcttcctgcactgggggtggggtgcggtaggtttcgcaatccagactgtggggtgggggtgggagcaggtgtgtgtaaatgagcagctcgtcaggagtcactgagaaggaggcagatggagctggtacccagcaggtctcctctcataagcgtcaaccctcgcctgggcgggctgggggatcctcagcaccccagctctgagccaggggtctgcaacccgggcaccagcgatgggccctcatgcacacagggcgccgagcggggccggaggcaagagtgacttcagacaggaacccgacgccatagccggtgacgcggaccctgggtcagccagcacgatgggccgctggggagaggagggctggaggcagagagtgtaagtgtgcagccttcatcagcttatttttagtcgcgttatgtaagtggcttcatctcaacgtcacatggggggggggtctcagatttaattacaggatgacagcctttgcttttcaagcaagctgttctcctggcaagccaggcgaaggattggggagttttgctaaacagaaggagccctttctgaggtgaccacccgtcaaaacttgaacccgcttccacctccgtctccctcttcccgaccagcctcacccagcctcggctgaatgtggcctgagagtagccacttgtccgcaatcacagggacgttttatgcctgtcaagggagcttcctctctcctcttcctccccctcccaccttctgcctggcagctttgccttctctccaagagaagggtccacccaatcagaactcctcttccttttcattcctggattaaagcacttgtaatcagtaaccagaaagttccagagcgggagagaccggaaggcactggagtgctatcggacgggtgtctggggcagagccaggagggcgagcctcttctctccccgcctgcccttgctcacttccccctccatgccaggtgctgtgggagcagctgggcctggccggggtcggcgggtgaagctatccgcatggtgtctggagcaccgtttctttgcttcctggatgggctggatgggctcccgtgttcttcaccaatggcagcgttaccagcaccaatggcagcgttaccagcaagaaggcaaaggcaggagcacatcgagggtgggagccagggctgtggggtcaggagtcccgctccttgccgcgggaagcctggctcagccacctccagcacacttcggctttgtccagcataaaaggcagagcgacgttttcactgcaggctgtttcccaccagggcaagtgggacagggcgagtgctgacgtctgcaggcatggtgtgcatttaggggtgggcggcaccgagggggcatcatttggcataggcgggcccgggggccactgggctagatgactggctggttgctgggggcaggtgtcacagcctctctgagcaccctctaagtggaggacagaacattgttgggaggagtccaggcataaagtgacataaacagcgcagagaatgggaccagcgcacctgagaggtgatcattagcctcagcaactggatgggacattccgaagagctcccagccaacacagatggtcactccagaggctgacatttaaaaggaaggggcccggccgggcacagtggctcacgcctgtaatcacaacactttgggaggctgaggcgggcagatcaactggggtcaggagttcaaaaccagcctggccaacatggtgaaaccgcatctctgctgaaaatacaaaaaattagccaggcatggtggtgggcacctgtaatcccagctactcaggaggctgaggtaggaggatcgcttgaacccaggaagtagaggttgcagtgagccgagattgtgccattgcactccagcctgggcgacaagcgaaacttcgtctcaaaataaataaaagtaaggggcacagggagggggccccagctcgtgccccttctgtgtgggctgcacatggtgacttccttccagagagcacagagtgggaggtaggcaaggcgtctccacagtggagagcccgacccactgtctcagcccagaggtcaaggctggcaccatcaccgaaaggtcacacgggcagatgtgacagggcgcttcaccactgggctcttcctcccagacccataacccttgtcttagtattagaaaaacactggcagaccgggcgcagtgagctgagatcatgccactgcattctggcctgggcgacagaatgagactctgtctcaaaataaaaaaaaaccaaaaaccaaaaaacaaccaagcaaagtctgagaaactgtcacagcctagaggaacctggagacagctgatccctaaatgtcacgtgggatcctgggtggggtcctgggagagaaagaagacattggagggaaactgaggaaatatgaataaagtatgggctttagttaat

SEQ ID NO: 1388 - DNA, 3152 bp, Homo sapiens
taaaggcccctggcaagagctcgttcacgatgtttgtggatctagggatctaccagcctggaggcagtggggacagcatccccatcacaggtgaggacaggaggacagacctgctgtgaggccagggtccaggggcagcctggaggggagcacagtggtcttgagacgcagcctcacaaagcatagccacaggacctctcccttgggccctagcacctgcctgggcacagaggcaaggaagagcctctgagacccctccttcctgtcccacaggacaggaaatgctcagagttgccaggggacctgggcaaagactcaaagctaacaagtgacagaaatgggacttgagccagaccttttgactccaagtccagcactctatccccctctcccatgcacctcctctcctcctgtctttctcctcctttctgcgtattatgaggtgccaagacctgatataggggatggaggtaaaaagagatggggtgagaagctgcagcccctcctcccacctcctcctccttctggcagccctagtgggtggagagggcactcggctcgaccagctgcagtacgacgtgaggaagggttctgtggtcaacgtgaatcccaccaacacccgggcccacagtgagacccctgagatccggaagtacaagaagcgattcaactccgagatcctctgtgcagccctttggggggtcaacctgctggtgggcacggagaacgggctgatgttgctggaccgaagtgggcagggcaaggtgtatggactcattgggcggcgacgcctccagcagatggatgtgctggaggggctcaacctgctcatcaccatctcaggtacaggtgtggtgagtgggggagggaggaggggctcagctccttggcgctgtcaccatcttctgcctgggaggagggcaggcactggaaggtggggccacactttctcaccccttgtggtatgctgacagaggaggccagggcggtggcattcgggcctcagatgagaatgggggcgggtgtgtatgtctgtccgtccctcagggaaaaggaacaaactgcgggtgtattacctgtcctggctccggaacaagattctgcacaatgacccagaagtggagaagaagcagggctggaccaccgtgggggacatggagggctgcgggcactaccgtgttggtgaggatgtcccaacagagtggccagcgcatacttgttcatgaagagagaaatggatctgggagccagggacttggggcctgggtggggcagtgtagtgacagaccacggggaggcgcccgtggcgcaagaagggaagtctcagcatccctcttctctcccgcccccagtgaaatacgagcggattaagttcctggtcatcgccctcaagagctccgtggaggtgtatgcctgggcccccaaaccctaccacaaattcatggccttcaagtcctttgccgacctcccccaccgccctctgctggtcgacctgacagtagaggaggggcagcggctcaaggtcatctatggctccagtgctggcttccatgctgtggatgtcgactcggggaacagctatgacatctacatccctgtgcacatccagagccagatcacgccccatgccatcatcttcctccccaacaccgacggcatggagatgctgctgtgctacgaggacgagggtgtctacgtcaacacgtacgggcgcatcattaaggatgtggtgctgcagtggggggagatgcctacttctgtggcctacatctgctccaaccagataatgggctggggtgagaaagccattgagatccgctctgtggagacgggccacctcgacggggtcttcatgcacaaacgagctcagaggctcaagttcctgtgtgagcggaatgacaaggtgggaggctccttccctctgaaagccctgctgtcccggctgccatgaccctaggcccctgggcagagttctggggagaggatggtggtggtggcttcctaaaagcgggcccctctgggagctcggagggcagtcagccactaccactgccctgcgctcccttcagattccgaggacttcctagctggcccccagagggcgagtggtgcaccctctcccctaacatcccagcctgcctttcctccgggtgaggggcactgtgagtctcctcctgcagtctctgtgtctccctcaactcttctgccaccccttcttcccttctttccctctcccagttgagacacccccccaacctcagcccttggtgacttcttctcctgccccacccaggtgttttttgcctcagtccgctctgggggcagcagccaagtttacttcatgactctgaaccgtaactgcatcatgaactggtgacggggccctgggctggggctgtcccacactggacccagctctccccctgcagccaggcttcccgggccgcccctcttcccctccctgggcttttgcttttactggtttgatttcactggagcctgctgggaacgtgacctctgacccctgatgctttcgtgatcacgtgaccatcctcttccccaacatgtcctcttcccaaaactgtgcctgtccccagcttctggggagggacacagcttccccttcccaggaattgagtgggcctagcccctccccccttttctccatttgagaggagagtgcttggggcttgaaccccttaccccactgctgctgactgggcagggccctggacccctttatttgcacgtcaggggagccggctccccccttgaatgtaccagaccctggggggggtcactgggccctagatttttggggggtcaccagccactccaggggcagggaccatttcttcattttctgaaagcactttaatgattccccttcccccaaactccagggaatggaggggggaccccgccagccaaaacattccccccattcccgacccccatctcctcttctagcccatgcccttccccggcggagggagggagcagggagccctcactctccacgccccttgcttgcatctgtatatagtgtgagcagcaagtaacccttctcctccctcccccctcacccctcctcaatgtagtggccttggatatcctgtttgttaataaagacaattcaaccagctcccacc

SEQ ID NO: 1389 - DNA, 2755 bp, Homo sapiens
acaatcacttccgccgccgcagtcgccgcccgccccgctgctgtctggcgggggaggagctcgggaccgggagcagcggctctggcggtcgtggcggtcggagatccgagagctctgcttctctgaaaagcgtgtggctttctggacttggtctacacctgacagtcactggaatgctactccaggccttagaagaaagtgaaactaattttaaaggccccttattctttctgttacctgcctgctgaagtgaaaataaatctccctgctcctttattctaaactgattttactttcccatctcaaaaacgtgtgcagggagcaggagccctcctacccgagccccagctgtattggaaaccctcctaagtcagagtgatgggtcaggaatctagcaagcctgtatggcccaatccaacaggagggtatcagtccaatacaggtaggaggtatggaagaaggcatgcttatgtcagtttcaggccacccacgagccagcgggaaaggattgccagccagagaaagacgaactccgaagtcccaatgcacagatcagcccccagtcaaaccaccaagaggagccgatcgccattttccactactcgtcgtagttgggacgacagcgagagttcgggaaccaacctgaatattgataatgaggactattccaggtatccgccaagagagtacagagcttcgggtagcagaagaggagtggcctatggacatattgactcttatggggcagatgatagtgaggaggagggggctgggcctgttgagcgaccgccagtgagagggaaaactggcaagtttaaagatgataagctgtatgacccagagaaaggggcaaggtctttggctgggccacctccacatttctctagttttagccgtgatgtgagagaggagcgagacaagttagacccagtccctgcagcaagatgctcagctagcagagctgacttcctgccacaaagtagtgtggcctcacagtcgtcttctgaaggcaagctggctacaaaaggtgacagctcggagagggagagaagggagcaaaatttacctgcacgtcccagcagggctcctgtgagtatttgtggtggtggggaaaacacctcaaagagtgcagaggaacctgtggtcaggcccaaaatcagaaacctggcaagtccaaactgcgtgaaaccaaaaattttttttgatactgatgatgatgacgatatgccacacagtacttccaggtggagggataccgccaatgacaatgagggccactcggatggcctggcaagaagagggagaggcgagagttcaagtggctatcccgagccaaagtaccctgaagacaaacgggaagcgaggagtgaccaagtgaaaccagaaaaggtgccgagacgacgacgcaccatggccgaccctgacttctggacgcacagtgatgattactacaaatactgcgacgaagactctgacagtgacaaagagtggattgctgctctgcgtcggaaatatcgaagccgagagcaaaccctgtcctccagtggcgaaagctgggagactctgccggggaaagaagagcgggaacctccacaggctaaggtgagtgccagcactggcaccagccctggccccggtgctagtgccagtgccggggctggcgccggggccagtgctggcagcaatggcagcaattaccttgaagaagttcgagaaccatctcttcaggaagagcaggcatccctggaagaaggagaaattccttggctccagtaccatgagaatgacagtagcagtgagggggataatgattctggtcacgagttgatgcaacctggggtattcatgctggatggaaacaacaaccttgaagatgactccagtgtgagcgaagacctagaagtggattggagcctctttgatggatttgcagatgggttaggagtggctgaagccatttcctatgtggaccctcagttcctcacctacatggcacttgaagaacgcctggcccaggcaatggaaactgcccttgcgcacttggagtctctcgcagtggatgtagaggtggccaatccaccagcaagcaaggagagcattgacgctcttcccgagatcctggtcactgaagatcatggcgcagttggtcaggagatgtgctgccccatctgctgtagcgaatatgtgaagggggaggtggcaactgagctgccgtgccaccactatttccacaagccgtgtgtgtccatctggcttcagaagtcaggcacctgccccgtgtgccgctgcatgttccctcccccactctaaagaccaaggccgtttactcctggtctgattattttccccatctgaaatccacaatactgcaggagccctcttgaaattaacaatggaaataaaaccaatcagtcagttagcctaaacctattgattcctcgtgattatttccaatgtgaaaacagttgtgtatgattgcattaaaaatcatatcatcttttagaggttagaaaagggaaaactaaactttctaaatgctacttgagattgcagtaagaagatacgttttctaacctgaaggttaaatcgcatttgttttcttcagtagaatgggaatgtgttgctgttacttgtaatgtcaagtttatctgttaaatatgtccaaaaggcaaaatcatttttgttgcatgttatgggtcgatgttcctgtaattgcagtgccgtaaaagcttattaaagttgttcttttggtttt

SEQ ID NO: 1390 - DNA, 3351 bp, Homo sapiens
aaatgaatgatcacctcgaagtcactttagaacacatgttgagatggtgacatttcccagcctgcctgcccctctgcccaccccggtcacattgccctgagcttctttccatgacagcagctccgacgagccggcaggaaactcaatgcccctgctggctccatttccatgtaaatggcgccgttcatatttcacagggacgccgtgcatctccgccgtgcgtccccggcacgtgtttgctgtgctctgtatctctgtttttcttcctggaaggtcaacataacttgaaaatgtgtctttctgtggcccatggtccgctgtgatgacatttagacctcatttgtgctatgacctttggctcatgaaaacacaaatttaacattgccaggttctagtgatttaaaaccacaactgcccacttggtgaaaacgtgctctcgatgctgatttgtggtgtgctgctgtccacagataaaccagtgccattagatggaaggcagaggatactgcgaccacccctggcagacggtggcgtagacaccaggtgcgccctctggggctcagagcaacggatggtcagctgcgaacagtctcgtccgatgttaggaaatggtcctacggccgcgcctttgtgttcctgtcttctctccaccaccaaaagcaaaagatgatttcccattcactgcagtcatctgactcattttaatatctgtgctagtgacaatgaatgtcagaactgccaaaggataccaagtgatcatacgatgatttgcatgatcgggtctatttcacccaatagtcacttgtgtgtcccccgaaattgggatgggtgagcacccttgctgtggtgtaaacttcctgttatttaatctcccccacggtttcatttttctcttctgttaatacttagaactttctaagaaactccatgaaatgaggaaatactgtttctaataatatgaggaaagaagtaaaaatgttcattccaagtggcaagtcttattggacacattttaaataaaatcatgcatacctgatacactgcctcaaggatccagtcattgtgggctatccttccatttaaaatatttcagatattcttaaattttttaaatattgcaaatactacaacatgtaattccagagcagcgttctaagtcaggtaccagaaatgagtcttaggaacccatagtctttgcaaaaattcagtagattgaaatagtccccagaagcagccagggagctgaagggatgattcgatcaagttcagatgttgccaattgtatcttactgctgtgaaggaggaaaagtcttccgggataatgtattcaattcttcaggcagttttgtctacttggggacctgcccattggttcaaggttttcagagatccaagaggccttgcctcaaagaacaaggattggcgcctttcagcagggctgcccattcaccaaacttattgttacttttgtttttctttaccactttcttatttgcccccaagtgcacacaggcagctctgccagaccaaaatgacagtgtattaagaatgcagggcctgctcagcttccctgtgagtcataatagtcgtgaaacttgatgacagtgaacttacgatgtcattcatccaaccctctatggtggcattctccatcctggaaacctgacatttggctgacggtctttggaccctggagctagtggtcatcatggaattacactgtggagatgaaagacctaggacagaaacatcttgctagggaaagcacctgagtttattcctttctaaatattttcctcttctaatgaaaactaaaagcagctttactttagggggaaaaatatatccaaaggcaggtcatttcagtagtgtttattagctgattgaaaaacaggttcacggtgctctctgagaactgcaccaaggggtgcagccaagagactggtctgaccccgggttgggctgggtggcagccggcgacagagcagagagacactcagctcagtgtcgctccttccatacactcagagtttgatttttcttgcatggcatttccattaggtttgttagaaacttatagaagaaatcaattctttagtgaacgaaataccatttttcactcaattggtaagaatttttcattttaaaagcagtaggaagtgatgtaaaactctaccattgcttggactgttaggagtgcggactccctttctggtagactcccttcgtaggcaagcacggtggtgcccagccatggaggcacccttaggacactgagcacaggcctggctgcctgtgccttggccacagcctccttccaccccactgaagtggacacctgcctctggagcccagggtgagaaggagaggcctgaagcctggggccacgttcccacacaagccaaggaacctattcctctttggacagacagcgagggaataatcagacagtgggtgcaaatgttcatgtcccgatagctccacacacccatgtatctgtgggaactcaaaccaagccagagcccacagagccaaacaaacagaaaatcacaaacccatctgtcctcttctcaatgcagaactccttcccgtccaataattttcctgaaccaatcacccttgttattgggtatcttctccactgctgggtaaggcctgcacatggtctgtctgtaactttctagaagactgagaactgcttatgccttagggagttctatgtgagcagcaaggttattccccctagttacacacacacgcacatgtgccaatactcctgcaaagacttgctgtttctaaaatccactactcagaaaaaccagggtgtcggcttaaagttttcagctccatctatcaaaatttgacctttttttaagagaaaaatatgtagatgagtgaaaaagacctaggattgaaagacaaaaagccatgtgtccatgtaaccctggccagtcactccacctgcctgagccttggtttcctcagctgtgagctcctaccaggtcagtgtgggaattggccaaaatgacgcagcagaagtgctttggagactaaagattgtcaacgaaatgtaagtgtcattttcgtagtattaggacgtttacattacagcaggctttaattagaacccacttagatatcgactcagaatgatcaattacagtggttaaaatacacatacctggtaatcatatacttgctttctgtccccagttcttacattaagtcaaccaactgacccaaaaatcaaccaataactaactggccatctctccactcactcagcattctcctcttaaatgcagggcatgcagaagattaaggtacagccccttccctggataggaactc

SEQ ID NO: 1391 - DNA, 2684 bp, Homo sapiens
agctccacttacctttggtgcccggccctctggccgctctcctcccgccctcgcgccccttcggcccgtcccgtccagcccgggctgcccggctctcgcaggcccccccgcgccgaccgcgttcctatggacagacgcacagacacctgcaggagtgacactgctgatcctgtaacatggaggattgtcttcatacctcatctgagaatctgtccaaattggtcagctgggcccatagccatgggactatttgcagcctcattccaaacctgaaacacttgctttctgaaggttcccatgggaacctgacagcaatgtggggctgtagtgctggccatgcttatcactggccactaacagctacttgcagagctgggtcccaagagagggtctgtttccaggataacagaagttttaactctgatagtcccagtataatcggggtgccctctgagacacagactagccctgttgaaaggtaccctgggagaccagtgaaagcaaagctagactgtaaccggaccagagactcttgtgacttctcctactgtagtgagccctctgaactggatgaaactgttgaagaatatgaagatgagaacaccctgtttgacatggtttgtgagtcttctgttacagatgaggatagtgactttgaaccccaaacccaaaggcctcaaagcattgctcgcaaaagacctggggtagtcccatcttccctccattcaagctcccagacgcagatggttgacgaatgcagcaatgatgtcatcatcaagaaaatcaaacaagaaatccccgaagattattacattgtggcaaatgcagaactgacaggaggagtagatggaccagccctgtccttgacacagatggcaaaacccaagcctcagactcacgctggtccctcctgtgtagggtctgctaaactgattccccatgtcacatctgccatcagcacggagctagacccacacggtatgtctgcatccccctctgtgatctccagaccaattgtccagaagactgctagggtatctctggcttcaccaaacagaggaccccctggtacacatggcaccaaccaacaggtggccatgcaaatgcctgtgagcacatcccatcctaacaaacagatcagtatccccttgtctgccctgcagctgcctggacaggatgagcaagttgcctctgaagagttcctgtcccatctgcccagccaggtctcctcctgtgaggtagccctttctccctcagttaacacagagccagaagtgagctccagtcagcagcagcccccagtcgctccagccataaccactgaggccacagcacagtgcataccagcttattccactaagctcaacaaatttcctgtatttaatattaatgatgacttgaatgatctgtgtaccagtgcagtaagcccaaatactaccaaagccacgcggtacgccttgaatgtgtggcgttattggtgcatgaccaacgggctcaaagaccacacagacatcaccaagatccctgcagtgaagttgaacgagctgctcgagaacttttatgtcaccgtcaagaagagcgacggctcggacttcctggccacctcgctccatgctattcgccgaggcctggaccgcatcctgaagaatgcaggtgtcggcttttccatcaccagcagcaccttcagctcctccaccaagaaactcaaggagaagctgtgggtgctgagtaaggcaggcatgtcgggcgcgcgttctcgcaacatcgtctacttctccctttctgacgaggaggagatgtggcaggcagggtgtctgggggatgacagccctatcactctcctgtccactgtggtcaagtacaacagccagtacctgaacatgcggacgctgcaggagcatgcggatctgatgtatggtgacatcgagctgctcaaagacccccaaaaccagccctactttgcccggacggacagcgtcaagcgggagagtcggagcggctccaccagagtgtgtcacgggaagatctaccatgagcattcccggggacacaaacagtgcccttactgcctcctctacaagtacatgtacatccaccggccgcccacccaaatggaggccaagtcccccttctacctgactgccaggaaggaggccacagacatgggcagcgtgtggtatgaggagcagaggatggggctgcgctctcttcggggaattgtcccaaacttagccaagaaggtcaagctggaaaactgtgagaacttcacctttgtctcgttcactcaggtctcccggaggcttggctcccacagctgctgccagtgagcccccactggggcccggccactgccctgtcacctgctcgggccagccagggttggagcagctggagctccttggaggcaggggctgaccaggtgtgacctcccggtctggcggctctcccctggtgtggcctgccctccctttgacttggggtttgctttttaaaatgaaactagatgagtctaaatcattcggatggtttatccaaatgtgcgtcaacttcgttagcttttagaatctaacacaatgtataattgttacatacaagagtgaggaaattcattttctctagtgcctttctagcacaggttttctcaaaacaaacaaacaaaaaaggaaactgttaagtagtcgttt

SEQ ID NO: 1392 - DNA, 2461 bp, Homo sapiens
ttttgttgttgcttttcctcattttggaagttgtttaggacggggcatcttggtgtgtcctgctctcgcctctgatgcttccttcccagtgggagtgggtgggaatactcagagacacagaattgtgcccacgctgatgtgggtgtcgcagccactgtccccaagaaaacaaacccacccacacatattcacgagcacccccgtgtctgcagtgttgctgccatgccgcgttcctgttgccttcgttatcccttccatgacctgcaggcccttgccaccctgaccctgtggcctcgccgcctcctgccctggctgggccctctgtttggatcctccttctctgagtctactctcgtcctccctcctctcctggctcccatcttgtgaggcccctactttgtcctcttccttcccctagcactccctttctgatgtcctctttcagtgattctcattctctgtccctgctgagcgtgggctgtaggagagcaggaggtgtctgtctggttaaggctgcttcctgggcactggagtcagcgtgccctgaatgagtaaatagacgagggatccccagcctttgatgggtcaaacagtaaagcagatgaaagatgtgtatgtttcatgggtgtggtttctgcttctgcccccatcacggagctgtgggtctctgtgggacgtgctgtcctgcctggccaggctctcaccctcaccagcagtgcgtgtggaccttctgctgtgtgcacagatgggaataaaaggtcactagcatggtgctggtcttaccttagacgtagagcttccaccgggccaatgtgtttctctatgtatgaggctgggtgcaaggcctgctggattcagctcatcacttaggcctgttctttgccaggttacctgtcctgctgccgattcctggatgacaatcagatcgtcaccagctctggagacaccacgtgtgccctgtgggacatcgagaccggccagcagacgaccacgtttaccggacacactggagatgtcatgagcctttctcttgctcctgacaccagactgttcgtctctggtgcttgtgatgcttcagccaaactctgggatgtgcgagaaggcatgtgccggcagaccttcactggccacgagtctgacatcaatgccatttgcttctttccaaatggcaatgcatttgccactggttcagacgacgccacctgcaggctgtttgaccttcgtgctgaccaggagctcatgacttactcccatgacaacatcatctgcgggatcacctctgtctccttctccaagagcgggcgcctcctccttgctgggtacgacgacttcaactgcaacgtctgggatgcactcaaagccgaccgggcaggtacgtggccatggggcctttctgtgtcttgtggacatttacgtggtatctttagagcaaacacagagtggttgcataagctgcagtgttttagtatcggtgggactgtggcatggcgtagcaggagtgacagtcgcaaactgatggcccagctctgaccctccaggcaagtggactccgaggagtaccagcagatcttcccacatgcgtcggggagggctctggggagagtcagtgggcaggagagggtcagctgtgcaggctccagggcccagccccgtgctttcccctctgaactctgcttcagggggaggagttccatgcagggacacctctgggtgccgttacagttaacatatcaaaggcaagcgtgttattgccaggtgtacaaaagatgagacttccttactaaaaatggtcatttgggcatttgaatttgagaactgttgacacttacagacttagattcatttgtctcagtacctgggaggacagaagggagcatggctccaggtcttggcccttaccggggcttcctgcttccggatgggtgccactcccacctcctggttaaacacatttctttttctccccagcctggggggaccagagtggagccatttccagccaagtctcacagtcacagtgctgttgaagggcggtggaagccagcccaggccttggcagagcacacgccggcccctgtactcagctgtgtggtggctgcaggaggtggaggagggtggctgaaatgggccttcggatccccctgggaggaagtggagtttctggctggtgatgatccaagccaaggttattgggagtgttgacagaaggccccctcatcacatgacagtgacagtgcagtgccagtggtctcagccaccatcgctactcctgtgttctgtgccttgtgctgggctctagggatcacagacaaaggaaaaacggctcatgcctctaagctcctgtgttacagattgctttgagattggggcggttttgattttttttttttttttttgagatggagtctcgctctgtcgcccagtgctctccagcctgggcgacagagcgagactccatctc

SEQ ID NO: 1393 - DNA, 2362 bp, Homo sapiens
attgagagattgtctgccagccctgcacaagagaaggaagctgcccctgggaagtctgagttgtgttcttctccccttggcaaaaggccattaaatgaactcatggaatctgaaggaaaaaccgtattgtctaaaatgatgggatcgcccaaatcagagtttactaagtggacacgaattaatgaaatcacttctgaaccagaccgtatcacagtttctggccattttcacagactatctagagaattggaaaaggaaaaagaagatactcaagggttcactttaggagaatcacctgaatcagaagatgatgactcaggtgatggaatggatgtagcagggcttgacattgaaaccagtttttcttcctcttctaccttggtagcattgtctgttggcagtaatccccagtcttcttctgggttagactgtggtaatgatacagatattactactaaagtattctctactgaaccgcatcattcagaacataaattgcaaactaaaaccttaaacacattacatctgcagtctgagccaccggagtgttctataggaggaaacaacttggagaatagcttgtgtgccttgagccctgaattgggagcatctaattttaatgatcagaagagcagtgggatagaatatacaaaagtagtaaaaggcttgaccaaaatacattcacttcctcggtcagtatttatgaaagctacaaaagatgggcaatgtgaaagtcaagatccaagaattgagctcacactaaataagccagatttcacatcattaataggttctcaggctgccttgatcaagagtggtttgggttttgttaaaagtacttcatggcaccatagtgatttattaaggaaaggtggcgaagaaagtctgagagccaaatcagaacatgaacagaagactagccatcagttacaaaaggcaatgccattcctacaaaatagaggaccaacacccaagcctgatcttcttagagaaaataacaatcctgtagaattcaagaccactgcatcggtgttgcctaatcaagtatcagttatcacaaaacagacaagacctgaaaaggttcagagtgccaaattggaacacttgaggccacatagggttgagcctaccttagtaacagaaaatagtggcaacaaaaccggtatgtcaactatagcaaaatgtgatggggaaagagatgatacaacacaaaacatcacggaggtggctgctgtgaaaagcatttcaccagaagtttctgcctctaggagaaaattagattttaattctccaggtggttcttcaccagtagaaaattctgattgttccacaaatagcagattatctttctctcctgaaaatatcctcatccaaaaccaagacattgtgagagaagctgcagtgcagggagatgggcagaagcaaaggcagcctcaggccacagatctggactccagtgggacacatggcagtgagatgcttccagccacagaagtgactgtgtcaggagggttttctgttgaagaaaccagctgtggagacacagggagatctggtggtgaggccctggctgttgcaaatgattctaccagcacaccacaaaatgctaatggactttggaaattgaaatctgcaactcccggtgatgctttgcctgagtgttttggcaccacagacactactttttcttcagcattttgcagaaaacatggagagacacaggatacctcccaaagtagcctgcctggtaccttacattgttacacaggcattcgagaggggggagacgacactgaggtagagagtgaggcatttagctgcagtgaggggagcgaacagcaagatgctcctgatggctcacagaaaaatttaggagacacagatgctgctgtagccgaggtgagaccttccttagaggtaggttatttgacgtcagctctgcaagattttaacataagtactttttctgagctggatagactttccacatcagaggttgtgatgtttcttgagagctgtcagttaggggattatagttcaggggactctgtttctgaatgttctagtaaaggaaccctaagtaaagaaatgaacaaagaattaaaggcaagtgaaataggagaaaaatacagaaagcaaccctgtgaggaagaaacacttggaacctgtgaagagtggattgaatcagaggaagatgattattcgttaaaaaatacaagtcagctcactcagtgttctttggaaactctgtctgaggttctgaccaagattaggcaagaacttcaaacaaattctgaagattgcaatggtaaagatactggcagtttattgctcttaaatgtaaataacaacatgaccactg

SEQ ID NO: 1394 - DNA, 3043 bp, Homo sapiens
atgtgaccgtgacgcgcgggcgggcggcgggggcgcgggccaggggcgcgggccagggtgccggcaggggcgtccggggcgctctgaccggcctcgcccgccccccgcagacacaagatggtgaaggagacccagtactatgacatcctgggcgtgaagcccagcgcgtccccggaggagatcaagaaggcctatcggaagctggcgctcaagtaccacccggacaagaacccggatgagggcgagaagtttaaactcatatcccaggcatatgaagtgctttcagatccaaagaaaagggatgtttatgaccaaggcggagagcaggcaattaaagaaggaggctcaggcagccccagcttctcttcacccatggacatctttgacatgttctttggtggtggtggacggatggctagagagagaagaggcaagaatgttgtacaccagttatctgtaactcttgaagatctatataatggagtcacgaagaaattggccctccagaaaaatgtaatttgtgagaaatgtgaaggtgttggtgggaagaagggatcggtggagaagtgcccgctgtgcaaggggcgggggatgcagatccacatccagcagatcgggccgggcatggtacagcagatccagaccgtgtgcatcgagtgcaagggccagggtgagcgcatcaaccccaaggaccgctgcgagagctgcagcggggccaaggtgatccgtgagaagaagattatcgaggtacatgttgaaaaaggtatgaaagatgggcaaaagatactatttcatggagaaggagatcaggagcctgagctggagcctggtgatgtcataattgtgcttgatcagaaggatcatagtgtctttcagagacgaggccatgacttgatcatgaaaatgaaaattcagctttctgaagctctttgtggcttcaagaagacgataaaaacattggacaatcgaattcttgttattacatccaaagcaggtgaggtgataaagcacggggacctgagatgcgtgcgcgatgaaggaatgcccatctacaaagcacccctggaaaaagggattctgatcatacagtttttagtaatctttcctgaaaaacactggctttctctggaaaagcttcctcagctggaagctttactccctcctcgacagaaagtgaggattacagatgacatggatcaggtggagctgaaggagttttgtcccaatgagcagaactggcgtcagcacagggaggcctacgaggaggacgaagacgggccccaggctggagtgcagtgccagacggcatgacgtggtgcggggcagcgtggccccaccggactagcacatgatgaatgtaaagttggcacaatgaaaatgacatcgctttaatggccttgtgtttgggatgtcctgtgtatgtgttcagcattcttaattgctgagtgtctttttggcttttcttttggttgtaacttaagttatagcttaatttatatttaaatgttttaagtataaatcacctctagtctgcatatggaatctgttcatttctattttcaggatatacttttgagatgtcagtgattgcaccaacactttgtgcttctagtggctttgccataattcagtgtcaccaataaggcacagcccagttagcagcttagcccccctagcaaaccccaaggcacaaagtgggcatcctgactcatctctaggtctgtggtttctcccctcttcccttggcagagttattgagggcatgatctcagggctgctaagataacatttctgaggattctagatgatcctcttaaagaataaaagcacatccgtggatcggacatggctgcatgtgcctgcttaacagggccaacttagttcctactgttctgtgcccttcagtggatggaacgtgagtgtctgatcatctctcttggaagttttctgaaccttccaagctctgtggtgaggacaaaccagtgtttgaatcatatgctgataactgtttgcctgtgaccctcacaccttgttcttcagggttttaatgattttctgttgacaacttttgcaatgctttcccaccaaagtgcttacttgtaaagaaaactaaatccttctgtgtccccggcagcctcagtgcagcaacagaagccaagggagaatgctgctggtttggcccatggcacagccagcttctctgaccagtaatccggggtgacttgagggtctgcaaagacatagaactccccagtgttttccacctcattctcccagattgagctcccttccaaaggatcgttcctctcattgcacagccatattacaaagggtttcctgctcaagtgatgttttggtaagaacttcgctgagttccactgtggattacagtttgtatggactactactgtaaattatagcttgtttggagggatattagtcattattttattcatgacaggtagactacaattcgaacttagggttacctcagtctttagccattactgcttatttcttttccccaagtcacaaaaaacttgtaagctgctgggttaaagcagaggccacctgtcagatctaccctacccttatttggttacatggcacctgagagtttcactcagaccagggatcttccttaggagggtcaaagtgcagatcagaccatgcaggtaaggtgaaccagctgcacggaccaggttcccgcaaaacattgccagctagtgaggcataatttgctcaaagtatagaaacagcccacctgtgcccactttgaccattggtgaggatagatataaaatcacttcttccaacgaagcctaggtgaaaatctatttataaatggaccacaactctggggtgtcgtttttgtgctgtgacttcctaattattgctaaagaactactgtttagttggtaatggtgtaaaattacattcagctccttcttgtcatataaaaggaatttggagggtgtcgcttaaaattttattccacctgtacatttgtcactttaaaattaaaattgagctggtatgagag

SEQ ID NO: 1395 - DNA, 3283 bp, Homo sapiens
ataatgccttgagggctttaacgggctgcacgaagcatgcatgtctcatacccaaagtagccacagcgcctgcattcccacaatagcggcagccccgagcagatgcttccagcgtgcttatctggctgtgcttttcactttgggacatagttctataatcatatctcatggatttattttctccacactataaagcctgaattgtgaagatctcatcatgccataaagggcagcatgagccaagttctgggggctgctaaggatttctttgccttttttccccccaccctttttggaaatgtgtatcaggaaaaggctttgcctttagagagaaattgtactgctcttgccaataatgtgtaatagtattaaatttaatggcagaccttgaagtgtataaaaacttaagtccagaaaaagttgaaagatgcatgagtgtgatgcagtccgggacacagatgatcaagctgaaacgtggaaccaaagggcttgtccgcctcttttacctggatgagcaccggacacgcctccgatggcgaccctctaggaagagtgagaaggcaaaaatacttattgattccatttacaaagtgactgagggccggcagtctgaaatattccacagacaagctgaggggaacttcgaccccagctgctgcttcaccatctaccatggcaaccacatggagtccctggacctcatcacctccaaccccgaggaggcccgcacctggatcacaggcctcaagtacctgatggctggcatcagtgatgaagactcccttgccaaaaggcagaggacccatgaccaatgggtgaagcagacctttgaggaagctgataagaatggtgacggcttgctgaatattgaagagatacatcagctgatgcataaactgaatgttaatctgccccgaagaaaagtcagacaaatgtttcaggaagccgacacagatgagaatcagggaactttgacatttgaagagttctgtgttttttacaaaatgatgtctttgagacgagacctttatttgttacttttgagctacagtgacaagaaagatcacctaactgtggaagaactggctcagtttttgaaggtggagcaaaagatgaataatgtgacaacggactattgtcttgacatcataaagaagtttgaagtttcagaagaaaataaggtgaaaaatgttcttggcatagaaggcttcacgaacttcatgcgtagtcctgcctgtgacatatttaacccattgcaccatgaagtgtaccaagacatggatcagcccctctgcaactactacattgcttcctctcacaatacatacctgactggagaccagctcctttctcagtccaaagtggatatgtatgcacgggtgctgcaagagggctgtcgctgtgtggaagttgactgttgggatggcccagatggagagccagtagtacatcatggttacactctcacttcaaaaattctcttcagagatgttgtggagaccatcaacaagcatgcctttgtgaagaatgagtttcctgttatattgtctatcgagaatcactgcagtatccagcagcaaaggaagattgctcagtacctgaaaggaatattcggagacaaactggacctgtcatctgttgatacaggggagtgcaagcagcttccaagccctcaaagtttgaaaggcaaaattctagtgaagggtaagaagttgccttatcaccttggggatgatgcagaggaaggggaagtttccgatgaggacagtgcagatgaaattgaagacgagtgcaaattcaagctccattatagtaatgggaccactgagcatcaggtggaatctttcataaggaaaaaactggagtcactgttagaagaatctcaaattcgagataaagaagatcctgatagtttcacagtgcgggcactactgaaggccacgcatgaaggcttaaatgcacacctgaagcagagtccagatgtaaaggaaagtggaaagaaatcacatggacgatccctcatgaccaactttggaaaacataagaaaactacaaaatcacggtctaaatcttacagtactgatgatgaggaagacacacagcagagtactggcaaggagggtggccagctgtacagattgggtcgccgaaggaaaaccatgaagctctgccgagaactctctgatttggttgtgtacacaaactccgtggccgctcaggacattgtggatgacggaaccacaggaaatgtgttatcattcagtgaaacaagagcacatcaggttgttcagcaaaaatcagagcagttcatgatttataatcaaaagcaacccacgaggatttacccctctgcctaccgcattgattccagtaacttcaaccctctcccctactggaacgcaggctgccagctagtggcactgaattatcaatctgaaggacgaatgatgcagttaaaccgagccaaattcaaggcaaatggcaattgtggctatgtcctcaaaccccagcaaatgtgcaaaggtactttcaaccctttctctggtgaccctcttcctgccaaccccaaaaagcagctcatcctgaaagttatcagtggacagcaactccccaaacctccagactccatgtttggagatcgaggcgagatcattgacccttttgttgaagttgaaattattggattgccagtagattgttgtaaagatcaaacccgtgtggtagatgacaatggatttaaccctgtgtgggaagaaacactgacatttacagtacacatgccagaaatagctttggttcggttccttgtgtgggatcacgatcccattggacgagactttgttggacaaagaactgtgaccttcagcagcttagtgcctggctaccggcatgtctatttggaaggactgacagaagcatccatatttgtacacataaccatcaatgaaatctatggaaagaacagacaactccagggtctgaagggactgttcaataagaatcctaggcacagttcttcagaaaacaattcccattatgtacggaagcgatccattggagatagaattccgcgacgcacagctagcgccccagccaaaggcaggaaaaagagcaaaatgggcttccaagaaatggtggagataaaggattctgtgtccgaggccacaagagatcaagatggcgtgctgaggaggaccacacgcagtttgcaagcacgccctgtctctatgcctgttgacagaaaccttctgggagctttgtcgctgcctgtatctgaaacagc

SEQ ID NO: 1396 - DNA, 2807 bp, Homo sapiens
agtgtaagtagtcgccatgtttctgtcgctatcactttcttgggggtgtcactgatcactggctattgcgactaccagacgctctggacacttggaacgctcctgagtttgcggctgggtccacttcctgaatgatactaggatccccgcctctggtttcttttggctgcccccgagctacctcagtctttttcaatgtcaggcggtccaagttccctgtggtgaaaatggagcccagtgagtcgtgcccatggcagcgcacctggttttgcagcctgggcaggtcacaggtgcatcttccacggggatttgagccagcgtgcacccccatagcgcgactgagattccaagtcacacccaggttttggcctcgcaaatccgcctctgctcccagctggcacctgagtatgcaggtcgcagcccgcgatttagaaacaccggcacccgggtgaacgcccacggctcctcagctttcgctgcaccgacgtctgcaccacgcccgtcaagctcagctgcatcctgactctgggttggaaacttcgtggtggatgatgcctgtaactacccagatgaaatcaagacgcaacagccctcatcgagggatgctcagagtcaaggaaacttttcttttgagctactgacagcttaactcctgtgaacaaaatttggagcatatttgtttctctctgcctgatttctccaaaatttggaaactatttgtgagtattcttaacttatagcaatatagttatttgcataagtacaataaggatctgttttcttttgcaaactcacggctgggctcagcttttaaaaagtcttatctgagattcattttatgaaacacagttccatcaaagtcaattttaaaagcctctgtgaaaaataattattattgctgcactttatacaaataattaggccaagtataataaagcaaattggttttgccatgatttgtctttagtaaagaatgggagactggagagagaaaaattatgtttcaagaactatggtacacctgttattagattctaatctcatcagttgtttttgagggttttcttctgcaatttagactgactgcttattcctgtgagccaaccagtgatctctggttgcagttcagaataaacaagacagataccaccttttgtcagaactcggagttacaagtgaccctcaccataattatgctttctgagctcctctctaccctgaatacaagagaccctaacagttaggcaggaaagcattgcccctattcagcctgaagaagttacagaatatggatcttcatccttccacaacccttaggattaagagttgccttgtaaagggaggggggaaatgtcagagacatttgaatcagaacaactccaccttgaatagggtctgggtaaaacaaggctgagaactgctgggttgcattcccagatggttaaggcattctaactcaccggatgagataggaggtcagaacaagatacagcttataaagaccttgccgataaaacaggttgtagtaagaaaagccggccaaaaccaagatagcaacaaaagtgacttctaattgtcctcactgctcattatatgctaattacagtgcattagcatgctaaaagacactcctacccacaccaaaacagtttacaaattccatagcaacatcagaaaattaccctatatagtctaaaaaggggaggaacccccagttctgggaattgcccactcttcctggaaaattcatgaataatccaccccttgtgatatgatttggctgtgtgtagcctagggacttgatatcctgcatcccagttgctctagccatggataaaaggggccaaggtacagctggggccatggcttgaaagggtgcaagctccaagcctaggcagcatccacatggtgttgagcctgcgggtgcacagaggtcaagaattgaggtttgggaacctccgcctagatttcagaggatgtagagaaatgcctggatgtccagtcagaagtttgcttcaggaacagcgccctcatggagaacctttgctagggcaatgaagaagggaaatgtgggcttgaaaccccacacagagtccccactgaggcaccgcctagtggggctgtgaggagagggccagcgtcctccagaccccagaatggtagatccaccaacagcttacactgtgcacctggaagagccatagacactcaacaccaggagtgaaagcagccacaaagacacagaggcagagctgcccaagaccatgggaacccacctcttgcagcataacttggatgtgagaaatggtgtccatggagataatttcagagctttaagatttggctgccctgctggatttctaacttgcatggggcctgtagcccctccatcttggccagtctgtcacatttggaatgggtgtatttacccgatacctgtacccccattgtatctgggaagtaactaagttgcttttgattttacaggctcctaggtggaaggaactcaccttgtcttaaatgagactttggactatggacttttaagtttatgctgaaatgagttaagaatttgggggactgtggggaaggtatgattggttttaaaatgtgagaacatgaaatttgggaggggttgggggcagaatgatatggtttggctgtgtccctacccaaatctcatcttgaattgtagctcccataattcccgcctgtcatgggagggatgcagtgggaggtaattaaatcatggggacgggtctttcccatgctgttctcatggtagtgaataaatctcaagagttctg

SEQ ID NO: 1397 - DNA, 3294 bp, Homo sapiens
aaatgagggaggctaggaaggtgtgggggtggggggcatatggaaaatcactctgtcttatactcagttttgctgtgaacctaaaactgctttaaacatcgatttaaaaactggtgatgaaggctgggcgcggtggctcacgcctgtaatccctagcactttgggaggccgaggcaggtggatcacctgaggtcaggagttcaagaccggcctgcctaacatggtgaaaccctgtctctactgcagatgcaaagattagctgggtgtggtggcgggcccctgttgtccgagctacttgggaggctgaggcaggagaatcacttgaacccgggaggcggaggttgcagtgaactgagatcacaccattgcactccagcctgggcaacaagagcaaaactcagtctcaaaaaaaaaaaagaaaaaaaaaattggtgataaactcaaaggacctttcttggatgtgcagtgtcataaattggaatgtacaccactttaatcattatgattttttaaatcttttttattgcctctgtattttatggttcctgattatctcttgaacatcttatcaaacataattctgagtcaatgaacactctggttgggggaaataacccctatctcacacatctgtggaatttatatttggggaccaggataccaggagagaataggcacagtaccacactattaggagcatgtggacccagtaactattattactaaacccaaaatgtctgatttcaggaaacagatctttaaattgctttaagatttttttcatttaaatagctttaatttttttttcctttatagtttatagtcagttaatattttcacgaggaaggaatgttggccattttttttcttccccccgctttttttttaacttgtttttaacctttggtgattttcctagagcaggggtgaacaaactacagcccacaggccaattcagcctgctatctgtttttgtaaataaagcattattggaccacagctgtattcattcattacatattgtctatgactgcttctgtgttacaagggcagaattggatagttgtgataaagattatacagcccataaaatcttgctggcctttcacagaaaaaattcatcaacctctgacctagatgaatagtattttgaagtatcctgatagctgataaaagccttctgctaataatgttgcagtctgctttaagatttggcacttgtaaatcactaaagttttgctctttgaattatagcaaattgatgtggtagagttgcttagcaagcagggaagatagtgtatgtttttagctaactacttacatatgtaaagcgactaacttatgtgtgggttttttcatgagtattttccttgttttttttttgtgtgtgtgtgtgtgtgtgtttgttattgttgttttgttttttaccaaattctaaagtaaagtgcattttagtatttgtggaatttgatgttaagaacacagaggtgcttctcccttagcagttgtagtctgggcttctgatgtggactttctttcttttcctccttttattattgtacacccaagacttcataaacctcagatcattatatattggtatgctggaaatatatggtttgtattcctggaatctctaaaggagtggtacaagaggttttactacagaagggattcatctttaaaaccttttagttgcaaatgtttagaaccatgttctgtttggagatttgttagtcttaagagatttgacttaacaagctgcatcctgtcagtaaagttgggtaatttccattgttggcccattctgggaatggagagacaaaacacacctgctctgcatgacttaaagcaaatataaggaagttagcatgaaatctggatgagaaagatatgattcattctgtaagaatggtcagctggcaagatttcttcctgagtttgagaactggagcaacactgtagctgtgatagttattggcaacttaatatgaggtaaagtaacttcttatcaataattagaaactgattttcatggctttgaataagcataggcatacttagtctttgccaaaagtaattcatttttatgccagtacctttggcatattttcagtcttctattgttctcttcccacttattttttcacttgtcacttgtgtttctttagatggtgagccaaagtctgtggtaggggtgatttccatttctgcatattacagagcaattagcatattgttaatattcagcaaaagtttttgctgtgcttccttagctggtgttttggttatctgatagtaattggagaaaattgttctccaattttctccaattaggagaataaggagagtgtcatattaagaagtacctgctttaaacatcatagaaaaactgtatacattataatagcaattgcttttccagtgtcttcattccatgatcctgagccaattcaacaacacggtttcagtttttgagagcctgaggcactaaccttggttgatataacattttctttcctctagatgttcaggcggttgcttatgaggaaccaaaacactggtgctctattgtctactatgagctcaacaatcgtgtgggtgaagcgttccatgcctcctccacaagtgtgttggtggatggtttcactgatccttccaacaataagaaccgtttctgccttgggctgctctccaatgttaaccggaattccactattgaaaacaccaggcggcatattggaaaaggagttcatctttattatgttggaggggaggtgtatgccgaatgccttagtgacagtagcatctttgtgcaaagtcggaactgcaactaccatcatggatttcatcctactactgtttgcaagatccctagtgggtgtagtctgaaaatttttaacaaccaagaatttgctcagttattggcacagtctgtgaaccatggatttgagacagtctatgagcttacaaaaatgtgtactatacgtatgagctttgtgaagggctggggagcagaataccaccgccaggatgttactagcaccccctgctggattgagatacatctgcacggccccctccagtggctggataaagttcttactcaaatgggttcacctcataatcctatttcatctgtatcttaaatggccccaggcatctgcctctggaaaactattgagccttgcatgtacttgaaggatggatgagtcagacacgattgagaactgacaaaggagccttgataatacttgacctctgtgaccaactgttggattcagaaatttaaac

SEQ ID NO: 1398 - DNA, 3701 bp, Homo sapiens
atttgactgtcttttatccaactgcccagaagcaaatgtgttaactcggcgatgccccttcatgcccgggttcttgcagagctctgaggacgcccagacccattttcctggctgggctgtggacccaggtgtgtggatcgctttacccagaagcttggaaagcgccaatattaacctgcttccaggtacatcacaaggtcaagagagtgtcttgcagccctcttgtttccgtgtatctacaccttcttctcttggccagaaggatatttacgttttggttcacagcatttgaagccaaaagttcagcccttcgaactggtttgctatacaaaacaaaacaaaacaaataaggtaatgaggattgcttattaaactgcttaacaaaatccccgactcttcctcagccctttctcggctccctcctccccaccaaaatgtcaccagctcttgaattacgtggattcgggttggaggagaacttgaaggaaacgtgattaaagggctatgcgagaacgctctctttgctgcccgcggtccggtgggcttcgaagccaatcgtgagaaggaccggttccctccgtgctgcttcctccccgtgcagtgctgggtgtgcgtgtgcgagtgtgagtgcaagtgcgcgcgcgcccgggtgcgagtgtgtgtgagtgtgagcgtgtgtctgtgtgtgcgtgcgcggccgccctgcctctgcccgctccccgggcgcggagccgcgggtttcatggggcgattgcagcgattcccccacccagagcgacctgcgggcagcggcggcagtggcaggagccgcctttccgattccctacgatgcgggtgctgagctatggcaaagggcagcgaagtgacgagcgagacccgcgtacgactgtgaaagccacctggagccacctcgccgggattgtacctgcaggcagaaagtcttcctacgaccgtcttttcccttagaggcaccagaatccctgtaaccattcatccaggtgttgagaagatatgtagcagccgagcacccatcttttgacaccgtcctctgaaatcagctttggagatgctttcactctgtccgtcttctgcagcagccaggcagagtgccgactccttcacagccgtgaggaactcttcaggctccagaagctcttaaacctgatctacaatggaaaaaattcttttttatctgtttctcattggcatagcagtgaaagctcagatctgtccaaagcgttgtgtctgtcagattttgtctcctaatcttgcaaccctttgtgccaagaaagggcttttatttgttccaccaaacattgacagaagaactgtggaactgcggttggcagacaattttgttacaaatattaaaaggaaagattttgccaatatgaccagcttggtggacctgactctatccaggaatacaataagttttattacacctcatgctttcgctgacctacgaaatttgagggctttgcatttgaatagcaacagattgactaaaattacaaatgatatgttcagtggtctttccaatcttcatcatttgatactgaacaacaatcagctgactttaatttcctctacagcgtttgatgatgtcttcgcccttgaggagctggatctgtcctataataatctagaaaccattccttgggatgctgttgagaagatggttagcttgcatacccttagtttggatcacaatatgattgataacattcctaaggggaccttctcccatttgcacaagatgactcggttagatgtgacatcaaataaattgcagaagctaccacctgaccctctctttcagcgagctcaggtactagcaacctcaggaatcataagcccatctacttttgcattaagttttggtggaaaccccttgcattgcaattgtgaattgttgtggttgaggcgtctgtccagagaagatgacttagagacctgtgcttctcctccacttttaactggccgctacttttggtcaattcctgaagaagagtttttgtgtgagcctcctctcattactcgtcatacacatgagatgagagtcctggagggacaaagggcaacactgaggtgcaaagccaggggagaccctgagcctgcaattcactggatttctcctgaagggaagcttatttcaaatgcaacaagatctctggtgtatgataacggaacacttgacattcttatcacaactgtaaaggatacaggtgcttttacctgcattgcttccaatcctgctggggaagcaacacaaatagtggatcttcatataattaagctccctcacttactaaatagtacaaaccatatccatgagcctgatcctggttcttcagatatctcaacttctaccaagtcaggttctaatacaagcagtagtaatggtgatactaaattgagtcaagataaaattgtggtggcagaagctacatcatcaacggcactacttaaatttaattttcaaagaaatatccctggaatacgtatgtttcaaatccagtacaatggtacttatgatgacacccttgtttacagaatgatacctcctacgagcaaaacttttctggtcaataatctggctgctggaactatgtatgacttgtgtgtcttggccatatatgatgatggcatcacttccctcactgccacaagagtcgtgggttgcatccagtttactacggaacaggattatgtgcgttgccatttcatgcagtcccagtttttgggaggcaccatgattattattattggtggaatcattgtagcatctgtgctggtactcatcattattctgatgatccggtataaggtttgcaacaataatgggcaacacaaggtcaccaaggttagcaatgtttattcccaaactaacggggctcaaatacaaggctgtagtgtaacgctgccccagtccgtgtccaaacaagctgtgggacacgaagagaatgcccagtgttgtaaagctaccagtgacaatgtgattcaatcttcagaaacttgttcgagtcaggactcctctaccactacctctgctttgcctccttcctggacttcaagcacttctgtgtcccaaaagcagaaaagaaagactggcacaaagccaagtacagaaccacagaatgaagccgtcacaaatgttgaatcccaaaacactaacaggaacaactcaactgccttgcagttagctagccgtcctcccgattctgtcacagaggggcccacgtctaaaagagcgcatataaagccaaatgctttgctgactaatgttgaccagattgtccaggaaacacagaggctggagttaatctgaagagcaccacttctcctctctctcctgaaaaaatttgccactgatatttttactggataaaattcaaaaatgtttcaattcacaaaggctaattgttgaactggtgtcgtagaagaaattgtctacaggagccaaggtgaaagtctctgatgacggcggaactggctccattagaccatggttcatcctcttttaaaaccaaatttttttttcttctggcctacaagtattttttttttaaaaaagaaaaaaagcctacattggcatcaagttctgtatcaatccatcttacattgccatccatgatttaacagactgtagaatcttgaataatctatatcactttaacaaataaatgttttactatgac

SEQ ID NO: 1399 - DNA, 3404 bp, Homo sapiens
atcgctctgattcattgttaaaataaagaggccatgaccctggcactcccaccccggcagcccctgtgcgtggaaacccagccaaggtctgatgatggaggagccttggccctggctgtcccaggggaggaggtgaaattcctcagctctccaccaagattggccacaaaagcctgatcccctggaacacagcaggcctcacatagacggtcagccattggatcataggaactgccctggcctgactcacccaatatggaggaggtgcctggggatgccctgtgtgaacactttgaggccaacatacttacccagaaccgctgtcaaaactgcttccaccctgaggaggcccatggagcaagataccaggagctcaggagcccttcaggtgctgaggtgccctactgcgacctgcctcgatgtccacctgcccctgaggacccactcagcgcctcaacctccggctgccagtctgtggtggacccaggcctcaggccagggcccaagaggggcccatccccctcagcagggctcccagaagagggtcccacagctgcccccaggagcaggagccgggagcttgaggcagtaccctatctggagggcctgaccacttccttgtgtggcagctgcaacgaggaccccggctctgaccccacctccagccctgactccgccacccctgatgataccagcaactcgtcctctgtggactgggacactgtttagaggcaggaggaggaggcccccagctgggacgagctcgcagtgatgatcccgaggaggcctcgggaggggccgagagctgacagctcccaaagggctccgtctctcctcaccaggtcccctgtgggaggagatgctgcaggccagaaaaaggaggacaccggcggtgggggccggaacgcaggacagcactgggcaaggctccggggagaaagcgggttgtccctggagcggcaccggtcaacactgacccaggcttcctccatgacaccacacagtggacctcgaagcaccacgtctcaggcttctcctgcccaaagggacactgctcaggctgcctctacacgtgaaatccccagagcctcctctccccatcgaatcacccaaagggacacctccagggcctcatccacccaacaggaaatctccagggcctcatccacccaacaggaaacctccagggcctcatccacccaagaggacacccctagggcctcatccacccaagaggacacccccagggcctcatctacacagtggaacacccccagagcttcctctccctcacgaagcacccaactggataaccccagaacctcttctacccagcaggacaacccccaaacttcttttcctacttgtactccccagcgggaaaaccccaggacaccctgtgtccagcaggacgatcccagagcctcctctcccaacagaaccactcaacgagagaattccagaacatcctgtgcccagcgggacaatcccaaagcctccagaacctcctctcccaatagagccacacgagacaaccccagaacatcctgcgcccagcgggacaatcccagagcctcctctcccagtagagctacacgagacaaccccacaacatcctgtgcccagcgggacaatcccagagcctccagaacctcctctcccaatagagccacacgagacaaccccagaacatcctgtgcccagcgggacaatcccagagcctcctctcccagtagagctacacgagacaaccccacaacatcctgtgcccagcgggacaatcccagagcctccagaacctcctctcccaatagagccacacgagacaaccccagaacatcctgcgcccagcgggacaatcccagagcctcctctcccaatagagctgcacgagacaaccccacaacatcctgtgcccagcgggacaatcccagagcctccagaacctcctctcccaatagagccacacgagacaaccccagaacatcctgtgcccagcgggacaatcccagagcctcctctcccaatagagctacacgagacaaccccacaacatcctgtgcccagcgggacaatcccagagcctccagaacctcctctcccaatagagccacacgagataaccccagaacatcctgtgcccagtgggacaatcccagagcctcctctcccaacagaaccacccaacaagacagccccagaacatcctgtgcccgacgggacgatcccagagcctcctctcctaacagaaccatccaacaagagaaccccagaacatcctgtgccctacgggacaatcccagagcctcctctcccagcagaaccatccaacaagagaaccccagaacatcctgtgcccaacgggacgatcccagagcctcctctcctaacagaaccacccaccacacacacacacacacacacacacacacacagacacacagacacatacgcacacacgtgcacacatgtacacacggatacacacacacacacacacacacacacactgcatatctgagcacgcccctcgcactgggtctcaccttgcaccttcttcaggattttatatgtgaagagatttttatatagattttttggtgatgctgccaacttactgatttagtgtatgatggtgtttttgaggtgctccagtggcttctgtttctatcagctgtccctcctgttcagctactgacggggtggtgcgtaacggcaaaagcaccgccggacatcagcgctatctctgctctcactgccgtaaaacatggcaactgcagttcacttacaccgcttctcaacccggtacgcaccagaaaatcattgatatggccatgaatggcgttggatgccgggcaacagcccgcattatgggcgttggcctcaacacgattttacgtcacttaaaaaactcaggccgcagtcggtaacctcgcgcatacagccgggcagtgacgtcatcgtctgcgcggaaatggacgaacagtggggctatgtcggggctaaatcgcgccagcgctggctgttttacgcgtatgacagtctccggaagacggttgttgcgcacgtattcggtgaacgcactatggcgacgctggggcgtcttatgagcctgctgtcaccctttgacgtggtgatatggatgacggatggctggccgctgtatgaatcccgcctgaagggaaagctgcacgtaatcagcaagcgatatacgcagcgaattgagcggcataacctgaatctgaggcagcacctggcacggctgggacggaagtcgctgtcgttctcaaaatcggtggagctgcatgacaaagtcatcgggcattatctgaacataaaacactatcaataagttggagtcattaccgatttttttcctttttttccaaaacactttatacttt

SEQ ID NO: 1400 - DNA, 2535 bp, Homo sapiens
agtcctctcgcagctgcgccaggacagccggcgcgcggccgtgcccacaagttgccggcagctgagcgccgcgcctcctcctgctcgcagccccctacgcccacccggcggcggtggccagcgccaggacgcacatcccgcggacaccgaccccagatgtaaagcgggaccccagcccctcgccccccggcgatcgacagtctcgccagcgtctcctctgccaaaacccagggctggaagatgtggcagccggccacggagcgcctgcagcactttcagaccatgctgaagtctaaattgaatgtcttaacactgaaaaaggaacctctcccagcggtcatcttccatgagccggaggccattgagctgtgcacgaccacaccgctgatgaagacaaggactcacagtggctgcaaggttacctacctgggcaaagtctccaccactggcatgcagtttttgtcaggctgcacagaaaagccagtcattgagctctggaagaagcacacgctagcccgagaggatgtctttccggccaatgccctcctggaaatccggccattccaagtttggctccatcatctcgaccacaaaggggaggccacagtgcacatggataccttccaggtggcccgcatcgcctactgcaccgccgaccacaacgtgagccccaacatcttcgcctgggtctacagggagatcaatgatgacctgtcctaccagatggactgccacgccgtggagtgcgagagcaagctcgaggccaagaaactggcccacgccatgatggaggccttcaggaagactttccacagtatgaagagcgacgggcggatccacagcaacagctcctccgaagaggtttcccaggaattggaatccgatgatggctgaatgaacttgagacgcttcagcaaaggcagcattggtcacggagttcaagggaatagatgagtaagcaacgtttcaaatttgggatgaaaagactgccaaactattggctgaccaaggtttttaaattcagaagagcaattctaaatctaaagaaatgtatcattaaagtaattacgttacattgaaacctgctgctgctgtgactgtgaggagggtgggagtgtggatggggaggaaggttctaggctctcttcttatttttctcatttcccaatgcctctctgtgggagagctccatgccagttttcaccacgctcaggcaaatactctgcagctgttattggatgggccattccgatctgccttatgaaattccacaagagtgttaggggcacctatgggatctctagtggggtgggcagggtgctgatggggacgctggccgcagggaggaaggaacatctcgggagggccctctgttcctctcccacggcagatgccctcctctgtatgcaaatcagcacagcctttattgagctttacaactaacaacctgatagttggcagttaattcacagttacagataatgcttttatttacataaatataccaagtagtaccctcttattgtattcacttcatctattttcttagaatacttgcaattactaatgaccccttccctttccctcctgctgccctgtccaccctctttccccttctaacatccttagagggatgaaatctcagcatatgttgcaggacaccaaaaggaagaaaacaatcaagcaaataaaataaacagtcaaacaaaccaggagtttaaaacaacaaccccaacaacagaagccttggcaaagaggaatgagtgatcagcaagtgaacacactctatgtcaactctccttttatccagctgagatttatggtaacttatttaattaatggtcctgtctgatgcatccttgatggcaagcttcaaatctgatttggtatcaccgaggaaaccttgcccccatcactcagcattgcacttagatacagaatgagttagataaacttggcttgtctagagacccatgacatcttaacctaaagggaaatcttattgcgttatcataaaattgatgatatcttagggtcagaattgcccttttttttttattttgaatgggaagttctcactaaaacaatcctgagatttcttaatttcatggttctttaaatattataaacacagagtcaacatagaatgaaattgtatttgttaaaatacacacattggaggacaagagcagatgactacttttcgaagtaatgctgctccttcctaaaagtctgttttcaatcctggtaatattaggggcactgcggcacctaaggagccttaaatgagagctaatccaatctagagagcgatggtgtcagcatttcggtctgcatatctgtgtgtccgtatctgcgtttgtgtgcgtgtacgtgtgcccctgtgtgtgggcccagttttcaggcatgtagaataagcatggagtcatattgaggaggactcacttcttgaagatatgcttgttgctttacaacatatgtaagctattctttagcataaatgcattcattctttaataaaaatatgtttgcatt

SEQ ID NO: 1401 - DNA, 4369 bp, Homo sapiens
ccttccagactacgaggtgtgaatttcaaacttccgtaatggagttagcccacagtttattgctaaatgaagaagctttggctcaaatcaccgaagcaaaaagaccagttttcatctttgaatggttgcgatttcttgataaagtcttggttgctgccaacaagaccgatgtaaaggaaaaacagaaaaaacttgttgaacaattaactggattaataagtagttcacctggaccacctacacgaaaattattagctaaaaatctcgcagccctttatagcattggggatacttttacagtttttcagacacttgataaatgcaatgacattatcagaaataaagatgacactgcggcctacttaccaacaaaattggctgcggtggcttgtgtcggagcattttatgaaaaaatggggagaatgttgggcagcgcatttccagaaacggtaaataatctattgaaatctctgaaaagtgcagagtctcaagggcgaagtgaaatcttaatgagtctacagaaagttctaagtggactgggtggtgcagcagcttcctcccatcgtgatatttacaagaatgccaggtctctcttgactgataggtcaatggctgttcgatgtgcagtggccaagtgtctactagaactacagaatgaagctgtatttatgtggactgctgaactagaaaatatagccactctctgctttaaggctttggaaaactcaaattatggggtacgagtggcagtgtctaaacttttaggaacagtcatggccacagcattaatgccaaaacaggcaacagtaatgcgtcagaatgtgaagcgagcaacatttgatgaagtcttagaactcatggccacaggatttctgcgtggagggtcaggtttcttaaagagcggtggagaaatgttaaaagttggagggtccgttaatcgtgaagtgagagttggagttacgcaggcgtatgttgtttttgtgacaacattgggtggtcagtggttggagcgcagctttgccacgttcctgtcccatgtacttgatctggtttcccatcctcgggcaacacaaacacatgtggaggctgtgtactccagacgatgtgtttcctttatcctaagagctactgtgggcagtttgctaggtgaaaaagcccagattgcagctgccaaagaaatctgccaagctattggaaaacaaatgaaagccgtagaagcagtagtgaatgacacaagtggagaaaacaaatctggcgcagcagacattgcagcaagccagcatgtgatggtctgtgccctccaggaactcgggagcctggtgcagagcttgaatgccaccgcatcccctcttattcaagaagcatctatagggcttttggagattgtgacttcagtgctgcttcatccaagcatggctgcccgacttgctgctgcatggtgtttgcgctgtgtggctgtggcattacctttccagctgacaccatttctagacaggtgtgcagaacggctcaacaacttgaagacctcaccagaagctgtcagtggatatagttttgcaatggctgctttgttaggtggagtacatcagtgtcctttgggcattcctcatgccaaaggaaagatggtagttagtattgctgaagatcttttacgaactgctgcccaaaatagcaggctatctttacagcgcacccaagctggctggcttttacttggagcacttatgactttaggaccatctgtcgttcgttaccatctgcccaagatgttgttattgtggcgaaatgttttcccacgttccttaaaggaattggaagctgagaaggcccgaggcgattcttttacctggcaggtaactttggaaggtcgtgctggagctctatgtgccatgaggagcttcgttgcacattgtcctgagctactaactgaagatgtgattcgaaaattgatgacccctattgaatgtgccatgactatgatgtcacacattccatctgtaatgaaagcccatggagctcatctgaaagctagtgctgcaatggtccgtttaagactttatgatatcttggctttgttacctccaaaaacttatgaaggatcttttaatgcacttcttagggaactggtagcggaattcactttgactgacaactcagccaacacaactacttccctcctcagatccctctgccattatgatgatagtgttcttcttggttcttggcttcaggaaactgatcataaatcaattgaagaccagctccagccaaacagtgcctctggaagtggggctctggagcatgatccttcctctatttatttacgcatacctgctggagaagcagtacctggtcccctccctctcggagtctcagtcattgatgcttctgtggccctttttggtgtagtgtttcctcatgtttcttataaacaccgattacaaatgttggatcactttgctgaatgtgttaaacaagctaaaggtgtccgccagcaggctgtgcagcttaacatatttactgctgttcttagtgcactaaagggcttagctgaaaacaaaagtactttaggacctgaggaagttcgtaaatctgccctgacactggttatgggtcctctggacaacccaaaccccatcttacgttgtgcagcgggggaagctcttggaagaatggctcaggtggttggagaagcaacttttattgctagaatggcccaatatagctttgacaagttgaaatcggctcgagatgttgtatctaggactggtcattcattggctcttggttgtttgcatcgttatgttggtggaataggctcaggacaacatctgaagaccagtgtcagcattttattggctctagcacaagatgggacatcccctgaagtccagacttggtctcttcattcacttgctttgatagtggattctagtggtccgatgtatcgtggctatgtggaaccaacattatctctagttcttaccttgctgttgacagttccgccttcacatacagaagttcatcagtgtttgggtcgatgcttgggtgctataataactactgttggccctgaactacaagggaatggagcaacaacttctacaattcgttcctcttgtttggtgggttgtgcaataacacaagaccattcagattctcttgttcaggcagctgccatatcttgccttcagcagcttcacatgtttgcaccacgacatgtcaatctatctagccttgttcctagcctttgtgttcacttatgtagttcccatttgttacttcgacgagcagctgtggcatgtcttcggcaacttgcacaaagagaagcagcggaagtatgtgaatatgccatgagcctggcaaaaaatacaggggacaaagagagcagtagtgccaatgtcagtccttttgcccctggggttagttctcgaactgatatccattgccggcaccaaggtgttaatataacagaaactggtcttgagggacttctttttggaatgctagaccgggagacagatcgaaaattatgttctgatattcatgacactttgggacatatgctttcttcgctggcagtagaaaaactttctcattggctaatgctttgtaaagatgtcctggcagcttctagtgatatgagtactgcaactctcttaagtagtggaaaagatgaagaagctgaaaagaaagatgagatggatgatgataccatgtttaccacgttaggtgaagaagataaatcaaagccctttgtggcccctcgctgggccactcgagtatttgctgccgattgcctgtgtcgaatcatcaatttgtgtgagaatgcagaccaggctcactttgatcttgccttggcacgttctgctaaacttcgaaaccctacaaatgacctcttggtacttcatctctctgacctcattcgcatggcattcatggctgcaactgatcatagcaaccagctgcgaatggctgggctccaggcgcttgaagacattatcaagaagtttgcgtctgtgcctgagccagaatttccaggtcatgtgatactggagcagtatcaggctaatgtgggagctgctctaagaccagccttttcacaagatacaccatcagatataatagcgaaagcttgccaggtatgtagtacatggataggaagtggagttgtcagtgatctcaatgatctccgtcgagtacacaatcttcttgtttcttctctggacaaagttcaggctggaaaaggatcttctagccagctgtaccgagagagtgccacgaccatggaaaaactggctgttctcaaagcttgggcagaggtatatgtggtcgctatgaatattaaaaaggaagcagagtcaaaccc

SEQ ID NO: 1402 - DNA, 3525 bp, Homo sapiens
tttaaaaaatgcagtttttcctgatgccacacacccattccaggtgggccctgaggtgtgcacagcagggctgagagctgactcaaagcctgtcctgtccccactccccacaaggaggtgaagctgtctctgatggcagtgccgctgtcactgcctcggacgctggagcagagtagctcatggcaggctgcagaggaggggactccacaaggacaccaggaggcacagggtgcaccctgcagggcttggggcatggtccaatgaccctttcatggggcctgccagctgcaccagagcacacctgcccccataccagactcgtgcctggggtcctgcagggccactgcctctgaccagcccactgttggtgggatctgccgtccttgcagtgggagcttggtgccccccagggctggtgtgggaagagagggggattggattccttcctccttccccatcctcagacatgggcccaggcaaggggtgcctttcgggcctgggagccttctccacacttgcacacaggaacctgaggccagttctttgcttgcagctgctgggacagcaggctggggggcaggacttgcccaaggggcctcctgccctgtagaggcagccgtgctcttgtgtcacgtgtgggaagctacgggaccgaagccaggccttttcctccctccacaccccgaccacttctgccttcacccagggcaccccccaggctggcccacccctgagctgtgctccaccctgggtctgccatcctgcccaggagagcctgagggtgccctcctggctcccagtgctgtcccagcccctctccctcacactggcctttccccacaggtgagcacctgcggatctgtccccagggctacacctgctgcaccagcgagatggaggagaacctggccaaccgcagccatgccgagctggagaccgcgctccgggacagcagccgcgtcctgcaggccatgcttgccacccagctgcgcagcttcgatgaccacttccagcacctgttgaacgactcggagcggacgctgcaggccaccttccccggcgccttcggagagctgtacacgcagaacgcgagggccttccgggacctgtactcagagctgcgcctgtactaccgcggtgccaacctgcacctggaggagacgctggccgagttctgggcccgcctgctcgagcgcctcttcaagcagctgcacccccagctgctgctgcctgatgactacctggactgcctgggcaagcaggccgaggcgctgcggcccttcggggaggccccgagagagctgcgcctgcgggccacccgtgccttcgtggctgctcgctcctttgtgcagggcctgggcgtggccagcgacgtggtccggaaagtggctcaggtccccctgggcccggagtgctcgagagctgtcatgaagctggtctactgtgctcactgcctgggagtccccggcgccaggccctgccctgactattgccgaaatgtgctcaagggctgccttgccaaccaggccgacctggacgccgagtggaggaacctcctgggtgagcccccacccgcgagagcggcctggaactgtcttggggagtgcacgactgggggtcctggggggcgggtggtccctagcttagagcttggacccagggacctgatcagggatgccctgacccgggccagatctgggtggtgctgcagggttgaggggccagggtgccttttgaatgtcctgagtgatgtgtgacttggggcagctgccagggagggagccctgtggggtcatagtttcttgtccttccccacttagcaagcacctcggtgtgcatacatgccaacacgtgtgactcatcgaggaccggcacttgtttaagctaacacatacatgcaccgtcacatgacaggctgacacatgcgaactggcgtgctcacttgctgacacacagtgggccagtgcccaccagtacagcgtgtgctcctgggcgcatgtgatgacatgagctgggctgacccgcatcaatgccaacacgtgtgtggtaatatgtacatgcttatccagatccactaacatgtacacatgcttacatgaggggggacagcatgcatctgtgccaacacgtgctagcatgtgctgacacggggccaacaggtgtgtgctaacgtgatgggagctgacaaaatgcatgagctttacttgtacatgtgctcaccgtgcacgcaacacacacatgaactaaggtgtacatggggggggcatgaggtaagccagcatgcatacacaccagctcacacgggctcatgtgcacacaagctggaccaaggtgagccagcgtatgtacatgtcaacacctgcatgagccagcgtggacatacgagacacggcaggccagcaagcatgcagaatggcctctgtgtatgtgcgtgttcacctgtgcccgtggcacaggtgcacacgtgggtgtgggccaagctgagtgcacgtggcctgcacaggtcacacgggccaacctgagtgcacacgtgggatctcccatgctgacccgtgctgtcaagaccgcattaacatgcacacgtggtgacgcctgcgtgtgcgtgtcaacgcctgtgtgcgcgcgttaacgcctgtgtgtccgcgtgttaacgcctgtcctagactccatggtgctcatcaccgacaagttctggggtacatcgggtgtggagagtgtcatcggcagcgtgcacacgtggctggcggaggccatcaacgccctccaggacaacagggacacgctcacggccaaggtcatccagggctgcgggaaccccaaggtcaacccccagggccccgggcctgaggagaagcggcgccggggcaagctggccccgcgggagaggccaccttcaggcacgctggagaagctggtctccgaagccaaggcccagctccgcgacgtccaggacttctggatcagcctcccagggacactgtgcagtgagaagatggccctgagcactgccagtgatgactgctgctggaacgggatggccagaggccggtacctccccgaggtcatgggtgacggcctggccaaccagatcaacaaccccgaggtggaggtggacatcaccaagccggacatgaccatccggcagcagatcatgcagctgaagatcatgaccaaccggctgcgcagcgcctacaacggcaacgacgtggacttccaggacgccagtgacgacggcagcggctcgggcagcggtgatggctgtctggatgacctctgcagccggaaggtcagcaggaagagctccagctcccggacgcccttgacccatgccctcccaggcctgtcagagcaggaaggacagaagacctcggctgccagctgcccccagcccccgacctacctcctgcccctcctcctcttcctggcccttacagtagccaggccccggtggcggtaactgccccaaggccccagggacagaggccaaggactgactttgccaaaaatacaacacagacgatattt

SEQ ID NO: 1403 - DNA, 2888 bp, Homo sapiens
gaagctcttctagttcatctgctggccggctctcagtccccgtggcgccccctttcctcttgtcccagagcgctctcgactccaccatgccaaggggattcctggtgaagcgaactaaacggacaggcggcttgtaccgagttcgccttgcggagcgtgtcttccctctgctggggccccagggggcgccgcccttcttggaggaggctcccagcgcctccttgcccggcgcggagcgggcgacaccccccacccgagaggaaccaggaaaggggttgacggcggaggcggcccgggaacagtcggggtcgccatgtcgggcggctggggtgagcccggggacgggcgggcgggaaggcgcggagtggcgggcgggtggcagggaaggtcccgggcccagccccagccccagccccagtccagcgaagccggcaggcgcagagctgcgtcgggcgttcctggagcgctgcctcagctcgcccgtctccgccgagtctttccccgggggcgccgccgccgtggccgctttctcctgctccgtggcgccagcagccgcaccgaccccgggggagcagtttctgctgccgcttcgggcgccgttcccagagcccgcgcttcagccggaccctgcgcccctctcggccgcccttcagagtctgaagcgggcggccggcggcgagcgccgcggcaaggcacccacgggctgcgcgtctggacccgcggccgcgggaatcaagaagccaaaggccatgaggaagttgagctttgccgatgaggtgaccacatcccctgtcctgggcctgaagatcaaggaggaggagcccggagcgccgtcccggggcttggggggcagccgcacgccactgggggagttcatctgccagctgtgcaaggagcagtacgcagaccccttcgcgctggcccagcaccgctgctcccgcatcgtgcgcgtagagtaccgctgccctgagtgcgacaaggtgttcagctgtcctgcgaacctggcctcccatcgccgctggcataagccgcgtcctgcggctgcaaacgccgccacagtctcctccgccgacgagaagccgccttcttcgtcgtcttcgtcctcccgggactccggggccattgcatcttttctggcggagggaaaggagaacagccgaatagagcggactgcggatcagcacccgcaggccagggacagctccggggcggatcagcacccggacagcgccccgaggcagggcctccaggtgctgacgcatccagagccaccgctgcctcagggcccctacacggagggggtgttggggcgccgggtacctgtgccgggcagtaccagtggtggcaggggatccgagattttcgtgtgcccatattgccacaaaaagtttcgtcgccaagcctatctgcgcaagcacctgagcactcacgaggcgggctcggcccgtgcgctagcgccgggctttggctccgaacgcggtgccccacttgccttcgcttgcccattgtgcggagcgcacttccctacagcagatatcagggagaagcaccggctgtggcatgctgtccgcgaggagctgctcctgcccgctctggcgggggctcctcccgaaacgtcgggccctagcgggccatctgacgggagtgcccagcaaattttctcgtgcaagcactgcccgtccactttttttagctctccagggctgacccggcacatcaataagtgccacccctcagaaagccggcaagtgctgctgctgcagatgccactgcggcctggctgctgagggacgagagaccaggatgatttcgaggttggccttagaggaaacagatcatgggaatttctgtggggctttcttcaacttgcaagtttactttcattccttcctatgttttaatcccctaaaattctccctgtagtcaatgttccaccagaggagcggacagtgaaatgtaatatccctctctagagcaggtatgtatatggtataaaccttgagatcaaagactgtcagctttaaatccttctcactttccccactaaaataggatttttccccttaaaactctggagaccctaacgaatcctatatgatttgtaattcctatggaaagtcgcggtgaatgcgtgcatgtctcaatgtccacaaaggattctggctaccctttggtagccaatgttttttttgtcttgtcatcacaggcgcctatacagcttctgtctcaatagggtcagatattttgcactgtatattctgtgaattaaaagttatgtgattggtgtcaaacttaaggagattcaagacctggcagaaaatgtaagaggatttttgctgcttttggggtgcatggggatctcccctgtaaactttcctttgcccaattatatgtacatgtccattcttaagttggtgtttggaggtggggaggatgctactttactggagttgagacaccccctaaaattctcaccctcagctattttgtgggcagtattcaggaagagctacttcaaacctttctttaaatggctttttggaaatacagaagtcgtttcctcaagtttgactgttttaatggggtttcacccaaattgtttaatgcttctgctgtaaatgtcatactgtgtattcattatgaaaatatgtacagcttaaggaagatgttaacacctgtaatccactaaggaactgaatggcaatttgctcaatattcagtattttcttttcagcggcaacttgtttttgatttttttaaaaaaccatttcagtgtacattgtgtactaattccctactagccagtttgggacattggctgagcactgcctgacagaaagcccgtatttgtaagatgcttaccaccaaataaatgtacatagactgtg

SEQ ID NO: 1404 - DNA, 4687 bp, Homo sapiens
gaaatgacatttcctttttaaatagctggagccggggccccatcgagaaatggccgcgtcggcagatttaagtaagtcttccccaacaccgaatgggattccatcttcagacccagccagcgatgccatggaccccttccatgcttgcagtattcttaagcaactcaaaacaatgtacgatgaaggacagttgacagacattgtagtggaagtggatcacgggaaaacattttcctgtcatagaaacgttcttgctgcaatcagcccttacttcagatccatgttcactagcggccttacagaaagtactcaaaaagaagttcgaatagttggtgttgaagctgaatcgatggatttagtgttgaactatgcctacacttccagagttattcttacagaggccaatgttcaagccttgttcactgcagctagcatcttccagattccttccatccaagaccaatgtgctaagtatatgatcagtcatttggacccacagaattctattggggtctttatctttgctgatcattatggtcatcaggaactcggagatcgatcaaaagaatacattcgtaaaaagtttctgtgtgtcaccaaagaacaagagtttctccagttgacaaaagaccaactgataagtatactagacagtgacgatttaaatgtagaccgagaagagcatgtttatgaaagcattataaggtggtttgagcatgaacagaatgaaagagaagtgcaccttccagaaatttttgctaaatgcatacgttttcctctgatggaagatacctttatagagaaaattccacctcagtttgcacaggctatagccaaaagctgtgtagaaaagggaccatccaacaccaatggctgtacacagaggcttggaatgactgcttctgaaatgatcatatgttttgatgctgcccacaaacactcaggaaagaagcaaacagtgccttgtctagatatagtcacaggaagggtgtttaaactatgcaaaccaccaaatgacctgagagaagttgggattcttgtatcaccagataatgacatttacattgcaggagggtacaggccaagcagcagtgaggtctccatcgaccataaggcagaaaatgatttctggatgtatgatcattccaccaatagatggctatccaaaccatccttgcttcgagccagaataggctgcaaacttgtctattgctgtggtaaaatgtatgcaatcggaggtcgtgtttatgaaggtgatgggagaaactcactaaaatctgttgagtgctacgacagtagagagaattgttggacgactgtttgcgcgatgccagttgcaatggaatttcataatgctgtggagtacaaagagaagatctatgttttacagggagaattttttctcttctatgagcctcaaaaagactactggggtttcttaacccccatgactgtgcctagaatccaaggcttagcagctgtatacaaggactctatctactacatagctggaacctgtggaaatcatcaacgtatgtttactgtagaagcctatgatattgagctaaataaatggactcgtaagaaagactttccatgtgatcagtccataaatccataccttaaactggtacttttccagaacaaactccatttatttgttcgagctactcaagtgactgttgaagaacacgtcttcagaaccagcagaaaaaattccctttaccaatatgatgacattgctgaccagtggatgaaagtgtatgagaccccagatcggctctgggaccttggccggcattttgaatgtgctgttgctaaactgtatcctcagtgtcttcagaaagtactctaaatgagtagcaggccttagtgcatcactggcatctcattcttaggaaacttgtctttgatacaaaagagtgctgacagtatttcagaaagctgagagagttttatacatggaaaatgggtatgcttaaagattgcagggtagggagggattttccttcatccttgtgacatttcatttcagtaaggaaaagataacaaagtgcaattatcagcatttttttttcctggcataaaattaatcatttcattttataattttgtgataaatagtaactgaggtaccagatgaatcaggacaactatgcactcttataagagcatttagggtattattgggtaaagacgtctaaacttgtttgatgtgacttttaattttaaatacgggtaacaatctgaggcaatatcactaggactttagctgtgacctctctaacacagagaagcactaacttagatcctcattcttaatatttatatgtatctatttttgtgtactgttttcaagtgtactgagatttaaatgtgttctattattagagtagatcgaagaaaaaattagtctcagaaagagcttttagtctgattgtttccatttcccatgtaattttaagttaagctaaagttttaaagtggcagttttctgtcgatgactttttcaagtgctaacactgtctcttttgtgaaaatctggaaaagtgctcatattcacaggtggctggtgctagtctaacttaattcatgtgtataactagatggatttaaatggtctgagcctatgcctatctttcaaattggtgtggatttcatggccatagtactttacctgttgaactcttgtgatttcacaagattctctacttatgtgataggagggtatggccagttattcatctaactggactcaatcttagaatagtaggaacattatacccagtttgcactaacatgggccatttgtagcccaaccttctcttccatctacctgtccattcattattggtacaaggaaaggtaacttatttctcttctgcacagagcataatgtgaagttttatacctacttttaaaattctgctttccagaaacaaaattcctgcagtggtctaatttaatgtctttaagtttcatattacaattaaaacctcattttttttttccatttttgcacttaacagtgatgaatacttttacgttggaatcctccttctagctgaaggtgattgaaaaggaaaagagtgagtgaacagaaccatagctttctaggtactaaagcattttttgcatttaactgatgaaatttctaacaatcatcagttaggaatattaacatgaaggataaaccaacttatttgtatacctaaggcaggcatttggatcagtaacatgttttactaagcctagagtaattcgtaaagggtataagcataggacagattttgccctcaatcacaatatttgtattcacttgaaagcaaactggcatggttcgtattttaaaaatcttgcacaaattgtaatgtgatactgtgaaacaaattgaaaacattgcctctttgcatcacatacctcgtttttcagaaactttccaaactgctttacatagacctctacaagtagggaatgttttctgaagcagaagttaaaatggacagcatttctagaattaacattttaaaatctagtcttagctagatatgtggtttcttcttattggtgttgatagtatgtctgtaatctctgtataaactttgtcaacatttttacctccccagttttatcttctgttttgtttttgtttttatcatcatgatgttttggagttattactgtgtattttagaaatcattctttacagttttgcattgctgaggagagagaaaaaacaatttttttgcaagagatgttcatgtaatttatttttgaaagctttgttgaataagatttcctgccgctttttgacaatcttgtgtatttagaaaaatgtattacttgaaaacatgacatagaacattgagttagcaatttacatgggctgtatgttatataagagaatgacatactgtggctaattcaacagtagatttattcttttagcctgcacaacagttgatcttttggctatgacaatttgtatggagggtacgatctaagttaagtgtgtcaaaagcaaggcttaggatttgttatgggagtagaatatatattgaattttgtatgaagaactatttgtttaaattatatagctgggatattttgccactgttaaaatggattcagaagaggtcctagaaaagtaagattagtgacatgtgtgggtttatatttagatatttaaggtgcattttcatagtgtggtaagaccttaagtaaaaggcacaatgggtactacagaattaaaatgtaggtctaacataatgccagttccactttaactttgtttttgcatttgaagaatgtatgtagcactttcctatatatttgtcacacattgaaaactggactgggtataactatgttataggaaagtagaaattgtattctttattttccatctttgttttctgttctacaaagttgatgcttaagcatcaagctgattttattggtcatgagaacaaatggatgtgatcatgaaggaatcagattccctatgtaaagcagtttaaaatggaattcaatgttcagtgctcaggtatgtagtaagtactgtagtcctgtgggggcaaatgtgtagatatttttaaacattttgccataattgcacaattttttgcatttttacctgatgtcattgtttcttataataaaaccttttctgattgaaaaaaaattt

SEQ ID NO: 1405 - DNA, 2707 bp, Homo sapiens
ttcagggtccctacatggatgtgggttggaagacaggacaggcacacaaccatagatactgatggacatgggccatttacagaactgagggcaagagagcaattttggccactgaggcaagttcctgggttagctgcaccgaggagggtgctgacctctgcccctcgggtccacaggtctgggcccctgctgctgacatcccccacatgtcagtctgcctgctagtgggattgactaactcatcaacgtggagtttaatgcccaaccaagtgcagaccacgctcctgttttgcgtcaccctctgcgaagcttcctgcaaacttgactccctgcccagtgcccccagccccaaggtgggacatatcccctgggcaccccctctggtcctgctaaagcccagcccctctgcaggtcacaacccctcctctgtcctaccccttctgctgcctgcaatttcctgaactccttggtaggcagtctcctcaccctgtcctcccagtgtctccccaccctgtcttccctgcttgctctgagggtccctaggagggaggtattaacaccctggaggcagtacacaggtggggcgccctcccctgacacacaggttcttctggactgggtcctgaggctggtggtgcatagggggtcacgactgcccttcccccaggtctgagggttctgcccctctgcctcagctgctgcccacttttttgccttcccatgaagcccagctggccacacctggggatgagtgtttaccggtagcctgaggacgcacagtggaaacctggcaacctggggcctccctgtgtctggcagcctggcaactgtcacgcggcgcccagcgctggcttctggggcactgcagtccagggagggtgtggctatcttcccacagggctcttctcttccctcaggctggtctccaggaggtaaggcccgccctgcaggcaacaccggtgcttgggctcctgctgagcagttctttcctgcgagtaacagaaccagggagggaggtgggctgtggcctcccctgcccctacagtcgtctcctgcagctcccaccatgctggactcatcagcagcagagcaagtgacccgactgacgctgaagctcttgggacagaaagcctcttagtcattcctggagcacacagggcctttgcgtggagccaccgtctctgtcacggtctctcttcctcacagaagctggagcaagaacggcagaacgtggaagggggacctgagggcctccacctcgagccaggaaatgaggaccggccggacgatgccctgcagactgctctgaagagaaggagggaccttctgcagagactccgggaggccaccctcatgcacataaccctggaagggtcttccagtcatggccatcctgcccggagaggcgcctgtacctggcccaggctggcctgagcctgatgctgggggtgcctctgtggcgttggggctccccgtccccgtgtgcagcagctctgcatcggccttgcaggaacaacacctcctggacgagctctctcgggcccaggtctggagcgggccaagcagaggagccctcgggtcagccctgcccccagagctgccccccacgggcatcctacccactgcctccccatccccgctggccccagacccgccaaggatcatcctgcctacggtcccccagcctcctgccaccatcattcagcagctccctcagcagccactcatagcacagattcctcctccccaggccttccctactcaacggtcaggaagtattaaggaagacatggtggagctgctgctgctgcagaacgcacaggtgcaccagttggtcctgcagaactggatgctcaaggccctgcccccagccctgcaggacccgccacatgtgcccccgagggtcccacgagctgccaggccaaggctgcctgccgtgcaccaccaccaccaccaccaccatgctgtgtggccacctggggctgccactgtcctccagcccgcccccagcctgtggacgcctggcccaccctgagtgtgagtcacagagaccctggccggggcaccctccacccccaggcttcctcagggctgtgggctgtggcgggactatggaagggagcagggagagaccctgccaccacccggagtggctacgcgagtgtggactgcaggctcctcctggggaagctgggcaggctcgctttctggtcacggggccattccagggggcatcccttgctccgggtcccctgcagtgaggggcctgtgaaccccaccagggcaacagcccctcccagggacccctcctttcctgtagggcggcgccggcccacctgggagcctcagatccccctcttccatcacggaggtaaagttgaggccgtggacgccaccagcctgatgaaataaagatttcatccagaaagagtttaagaaaatctcagctcaggagccagaacagaaaagatcaatagctttagccacatggaagtgtgaacatcctgatggggaaaataccacaaagtctaatttaataactagggacacctgtgtgccacagctgtggcacagactcccactaaagaagtaggggtgcatggctcatgcctgtaatcccagcactttaagaggctgaggcaggaggatcacttgagctcaggaattcgagaccagcctgggtcacatagcaagaccccgtctctac

SEQ ID NO: 1406 - DNA, 2529 bp, Homo sapiens
ccccaatacaggtcccacattctctgacctcaccgtctctgcaggcacctccctctcctctggctttgtcctctctgcaggccacaacttctttgggctcacccactctgcaggccacacattctttcctgacaatgtcccctaggcaaacccaagcttctttgatctcaccttctcggccggcctctactccccctgattcaccccctctgcaggcccctctttcccttcctgcctcaccccctctgcagacttctctctctcctgctgtctcacccctaagctcacccctgaccatacaccctctgcaggcgctatcttctctggcctcccactctcctcaggcacctctctcttccctgatcatgccccctctggagacccaatcttccctagccccaccctctctgcagacacctcctgcttccctgaccacaccccctctggagaacctaccttctctagccccgcctcctctgcagacagcttctgctcccctgaccacaccccatctggagactccaccttgtccagccccatgccctctgcaagcaccaccttcgccattgaccacgccccctccggagacgccctctcccatagccacgcctcctccacaggccccacctgctctggcctcaccccctttgcagggcctgccctctccccctctgtctcctttggccacgccccctccacaggccccacctgccctggccttgcctcctctgcaggcccctccctctccccctgcctcaccccctctgtctcctttggccacaccctctccacaggccccaaatgctctggcagtgcaccttctgcaggcccctttctctccccctccctcacccccagtgcaggcccctttctctccccctgcctcacccccagtgtctccttcggccacgcccccttcacaggccccaccctctctagccgcacctcctctgcaggtcccaccctctccccctgcctctcccccaatgtctccttcagccacgccccctccacaggccccaccccctctcgctgcgcctcctctgcaggtcccaccctctccccctgcctctcccccaatgtctccttcggccacgccccctccacgggtcccaccccttcttgccgctcctcctctgcaggtcccgccctctccccctgcctcactcccaatgtctcctttggctaagccccctccacaggccccacctgctctggccacacctcctctgcaggcccttccctctccgcctgcctcattccctgggcaggcccctttctcaccctctgcctcactcccaatgtctcctttggccacgcctcctccacaggccccacctgttctggcagcgccccttctgcaggtccctccctctccccctgcctcacccaccctgcaggccccacgccgccccccgaccccgggtccggatacctccgtctcgggcccacggctgaccctggcgttggcccccggcccgccgccgccgccctcgcgcagcccgtccagcacgctgagcggcccagacctggccggccacagcagcagcgccacgagcacgccagaggagctgcgtggctacgacagcgggcccgagggcggtgccgcagcctccccgccccccgacgcagagctcgccgcttgccacccggctgcctggagtcgaggccccgctccgccgctggctttccgcggagccccaggtgcgcccctgccgtggcctcccgctaccggaccgggctctgctgacggtctgtgcaccatctacgagactgaagggcccgagtcggcgacccccgcccctggcgcactggatccggggcccagtcccggcacgagcggtgggaaggcggcggctggggccggggccggggcgtcctcgcggagcccgaagcaggcgcgcctgggcgagctgccactgggggcgctgcaggcgagcgtcgtgcagcacctgctgagccggacgctgctgctggcggctgccgagggtgccgcgggcggcagcggcgggggcccaggaggtgcggagggtggtggcgtcacagggggcgcccgggctgcactcagcgacgccgaactcggccgctgggccgaactactgtctcccctggacgagtcccgtgccagcatcacctcggtcaccagcttctctccgggcgacgtggcctccccgcagggtgactggaccgtggtggaggtggagaccttccactgagccagaccacagccccgcctgctacaccccacccctgccttaggatccgcccctccgggtacgccgtttgttttagaccccgcctccactgccctggagccccgctgggtggattagtcttagctccctagagcctgagcctttggcctcggaggctcgggacctacccatagctttgacctaggcccgcccctcgagctccgcccctttggcctaggacacgccccgtttccccgagtcccgccccgtgtgcagtgtattgcccaccccgcacagcctgagtttgcaataaaactgggacactgggacttgc

SEQ ID NO: 1407 - DNA, 2621 bp, Homo sapiens
gcagctcgctggctgctcgcgctcgggcaggcgggctgaggaggctgccgcgcccccgccgccgccgccgcgggggaagcctgggagccagatcggcgtcgcctcggcctccgtaacccccgcctagccgggccatggcggaacgcggaggggcgggcggtggtcccggaggcgccgggggcggcagcggccagcggggatccggggtcgcccagtcccctcagcagccgccgccgcagcagcagcagcagcagccgccgcagcagccgacgccccccaagctggcccaggccacctcgtcgtcctcgtccacctcggcggcggctgcctcctcctcgtcctcgtctacctccacctccatggccgtggcggtggcctcgggctccgcgcctcccggtggcccggggccaggccgcacccccgccccggtgcagatgaacctgtacgccacctgggaggtggaccggagctcgtccagctgcgtgcctaggctattcagcttgaccctgaagaaactcgtcatgctaaaagaaatggacaaagatcttaactcagtggtcatcgctgtgaagctgcagggttcaaaaagaattcttcgctccaacgagatcgtccttccagctagtggactggtggaaacagaggtgatgcagcatcctaatgaaggcgcactggtgcttggcctacacagcaacgtgaaggatgtctctgtgcctgtggcagaaataaagatctactccctgtccagccaacccattgaccatgaaggaatcaaatccaagctttctgatcgttctcctgatattgacaattattctgaggaagaggaagagagtttttcatcagaacaggaaggcagtgatgatccattgcatgggcaggacttgttctacgaagacgaagatctccggaaagtgaagaagacccggaggaaactaacctcaacctctgccatcacaaggcaacctaacatcaaacagaagtttgtggccctcctgaagcggtttaaagtttcagatgaggtgggctttgggctggagcatgtgtcccgcgagcagatccgggaagtggaagaggacttggatgaattgtatgacagtctggagatgtacaaccccagcgacagtggccctgagatggaggagacagaaagcatcctcagcacgccaaagcccaagctcaagcctttctttgaggggatgtcgcagtccagctcccagacggagattggcagcctcaacagcaaaggcagcctcggaaaagacaccaccagccctatggaattggctgctctagaaaaaattaaatctacttggattaaaaaccaagatgacagcttgactgaaacagacactctggaaatcactgaccaggacatgtttggagatgccagcacgagtctggttgtgccggagaaagtcaaaactcccatgaagtccagtaaaacggatctccagggctctgcctcccccagcaaagtggagggggtgcacacaccccggcagaagaggagcacgcccctgaaggagcggcagctctccaagcccctaagtgagaggaccaacagttccgacagcgagcgctccccagatctgggccacagcacgcagattccaagaaaggtggtgtatgaccagctcaatcagatcctggtgtcagatgcagccctcccagaaaatgtcattctggtgaacaccactgactggcagggccagtacgtggctgagctgctccaggaccagcggaagcctgtggtgtgcacctgctccaccgtggaggtccaggccgtgctgtccgccctgctcacccggatccagcgctactgcaactgcaactcttccatgccgaggccagtgaaggtggctgctgtgggaggccagagctacctgagctccatcctcaggttctttgtcaagtccctggccaacaagacctccgactggcttggctacatgcgcttcctcatcatccccctcggttctcaccctgtggccaaatacttggggtcagtcgacagtaaatacagtagttccttcctggattctggttggagagatctgttcagtcgctcggagccaccagtgtcagagcaactggacgtggcagggcgggtgatgcagtacgtcaacggggcagccacgacacaccagcttcccgtggccgaagccatgctgacttgccggcataagttccctgatgaagactcctatcagaagtttattcccttcattggcgtggtgaaggtgggtctggttgaagactctccctccacagcaggcgatggggacgattcttctgtggtcagccttactgtgccctccacatcaccaccctccagctcgggcctgagccgtgacgccacggccacccctccctcctccccatctatgagcagcgccctggccatcgtggggagccctaatagcccatatggggacgtgattggcctccaggtggactactggctgggccaccccggggagcggaggagggaaggcgacaagagggacgccagctcgaagaacaccctcaagagtgtcttccgctcagtgcaggtgtcccgcctgccccatagtggggaggcccagctttctggcaccatggccatgactgtggtcacc

SEQ ID NO: 1408 - DNA, 2703 bp, Homo sapiens
tctgcgctggccagtgggattagcgcgtgccttatctgctgccactcacctgtcctgccccatttgcaccctgggtttggctgctgtccctggttgaggcaggagtggacttgatttcaaggtcatggtgtcctctgtcctgatggctaaatgccgtgtgatgtctgagtgtgtctgggtttctcaggccccacttgccctttgctttcccagccccggcgttttaggtccccacagagcagggcgcagtgcggcacttgaacagctattccttcatctgttgagtgtctatgatgtgccagcctctgtccccgacctctggtgttcttcatttgcacttttcccacatgaccacctgaagcaggtccccaggtctcttgcctaaggaatgggtgatgcatatttgccaccagggcccttggcagccttggctgggactctgtggttacctggcccctgttgcccagaacctgaaggctcagaagaccatgggtgattatgctcatcccaatagactggctgctggcagcagaagccctgcctcatctccctgcctctacctcctgtggctgtctgagaaggcgatgtatgcagtaggtgctcagtacatgactatactggactaagtctgctgggtgtgttcctctgcttagttttcttttcctcctttatgattcacaactgccctgaaggggtggcatcggcccctttacacgtaaggctgttgagtcccaggtggtcccagggtggctggggtgctccctctgtgactctctagcttcaaagccaaggccttcccaacataccttgcaccacatccctccccactcccatgggacgcccgctgcttcccagaccccatcccttccatctcctcccagggcaggtgcagatcacacctctgccaggaagcctcctgggtcactctcatttgcaacagacctcaccgccctgtttccagtgccttttgtagccaggctgcaatggcgtctaacagtaacggagtgatccatgagctagactctgcttcacactcctaatgctcatattgtctcatttaatcttcataaacacctcaggaggtaggcgcccttatagctccattttacatagaggggaaactgaggcagagagccttggcagcctgctcttggctgtggcaccagaggtccttggtttcttggagaagtgggtttgtgtgggagcactcaccccaggcgccatcgctgttgaaccattccacttcttcaaatccttttcctttgttgattcaaaacccttgctctgctgccttgagccacacagaatgtgcagcgccctccttccccatccccaaggccttcagagacatggcaggcacaggtaccccggaagcctccccagtgtacagcttctttttctcttgtgtctttctgagtcctggtttccacgctcccttcccccaggtgctctcttttgagggtctgggttgggctgtcttctctttgggtgtgaaacctgtgactgggtgtcctggcaaggtccattggtgtggcccttccaagcataggccccctcgacctgaactggtgacccgaggaggggaacaaggccatggagaccccctgagccaagaatgtcattagaggagaccaaggaacaaattctgaagttggaggagaagcttttggctctacaggaagagaagcaccagcttttcctgcagctcaagaaagttttacatgaggaagaaaaacggaggcgaaaggaacagagtgacctgaccaccctaacatcagctgcataccagcagagcctgactgttcacacaggaactcatctcctcagcatgcaggggagccctggaggacacaatcgcccaggcaccctcatggcagctgacagagccaaacaaatgtttggaccccaagtgcttacggtgagagtaggattggatgcctagcccctagtacttccatccatgcatccttgccaccagtattcaagtcacaaacatatcaagcacttaagtttagggggaaacggggcatacagatacacacaagtcactgggtttcagctttcaaggagtttgtaggcgagttctcattctccttccttagacccggcactacgtgggctcagcagctgcttttgcagggacaccagagcatggacaattccaaggcagtcctggtggtgcctatgggactgctcagcccccacctcactatgggcccacacagccagcttatagtcctagtcagcagctcagagctccttcggcattccctgcagtgcagtacctatctcagccacagccacagccctatgctgtgcatggccactttcagcccactcagacaggtttcctccagcctggtggtgccctgtccttgcaaaagcagatggaacatgctaaccagcagactggcttttccgactcatcctctctgcgccccatgcacccccaggctctgcatccagcccctggactccttgcttccccccagctccctgtgcagatgcagccagcaggaaagtcgggctttgcagctaccagccaacctggccctcggctccccttcatccaacacagccagaacccgcgattctaccacaagtgaccatcagattatatcttcaacaccacaccccccaccccatcgtgggtgagggtatcccctgtgtgtcccaggccaataaaatctacctgccactgcc

SEQ ID NO: 1409 - DNA, 3265 bp, Homo sapiens
atatcaatgagtgcctgcagagtccttgcaagaatggtgccatctgccagaattttccaggaagcttcaactgtgtttgcaaaactggatacacagggaaaatgtgtgaatcttcagtcaattactgtgaatgcaacccctgctttaatggtggttcctgccaaagtggtgtggattcttattattgtcattgtccatttggtgtctttggaaaacactgcgagttgaacagttatggatttgaggagttatcatacatggaatttccaagcttggaccccaataacaactatatttatgtcaaatttgccacgattaaaagtcatgccttattgctttacaactatgacaaccagacaggcgaccgggctgagtttttggcccttgaaattgccgaagaaagactaagattctcttataatttaggcagtggtacatataagctcaccaccatgaagaaggtgtcagatggacattttcacactgtgattgccaggagagcaggaatggcagcctccttaactgtggactcctgttctgagaaccaagagccaggatattgtactgtcagtaatgtggcagtttcagatgactggactcttgatgttcagccaaatagagttacagttggaggtatcagatctctagaaccaatccttcagagaagaggacacgtggaaagccatgattttgttgggtgtataatggagtttgcagtcaatggaaggcctctggaacccagccaagctttggcagcacaaggcatcctagatcaatgccctaggctggaaggcgcttgtactcgcagcccatgccaacatggtggcacatgtatggattactggtcatggcagcagtgtcattgcaaagagggactcactgggaaatactgtgaaaaatctgttactcctgacactgccttatcattagaaggcaaagggcgcttggactaccacatgagtcagaatgagaagcgggaatatttgttaaggcaaagcttacgaggtgccatgttggagccttttggtgtgaacagtctggaagtaaaatttaggaccagaagcgagaatggcgttttaatccatatccaagaaagcagcaattacactactgtaaagattaagaatggcaaagtatattttacatccgatgcaggaattgctgggaaagtggagagaaatattcctgaagtatatgttgcagacggccactggcacacttttctaattgggaaaaatggaacagcaacagtattgtctgttgacagaatatataacagagatattatccaccctactcaggacttcggtggccttgatgtgcttactatatcacttggaggaattccacccaatcaagcacatcgagatgcccaaacaggttttgatggctgcattgcttctatgtggtatggtggagaaagtcttcctttcagcgggaagcatagcttggcctccatctcaaaaacagatccctcagtgaagattggctgccgtggcccgaacatttgtgccagcaacccctgctggggtggtttgctgtgcattaatcagtggtatgcctacaggtgtgtccctcctggggactgtgcctcccacccgtgccagaatggtggcagctgtgagccaggcctgcactccggcttcacctgtagctgcccagactcgcacacgggaaggacctgtgagatggtggtggcctgtcttggcgtcctctgtcctcaggggaaggtgtgcaaagctggaagtcctgcggggcatgtctgtgttctgagtcagggccctgaagagatctctctgcctttgtgggctgtgcctgccatcgtgggcagctgcgcaaccgtcttggccctcctggtccttagcctgatcctgtgtaaccagtgcagggggaagaaggccaaaaatcccaaagaggagaagaaaccgaaggagaagaagaaaaagggaagtgagaacgttgcttttgatgaccctgacaatatccctccctatggggatgacatgactgtgaggaagcagcctgaagggaacccaaaaccagatatcattgaaagggaaaacccctaccttatctatgatgaaactgatattcctcacaactcagaaaccatccccagcgcccctttggcatctccagagcaggagatagagcactatgacattgacaacgccagcagcatcgccccttcggatgcagacatcattcaacactacaagcagttccgcagccacacaccaaaattttcaatccagaggcacagtcccctaggctttgcaaggcaatcccccatgcccttaggagcaagcagtttgacttaccagccttcatatggtcaaggtttgagaaccagctccctaagccactcagcatgcccaactcccaaccctctgtctcgacacagtccagcccctttctccaaatcttctacgttctatagaaacagcccagcaagggaattgcatcttcctataagggatggtaatactttggaaatgcatggtgacacctgccaacctggcattttcaactatgccacaaggctgggaaggagaagcaagagtcctcaggccatggcatcacatggttctagaccagggagtcgcctaaagcagccgattgggcagattccactggaatcttctcctccagtcggactttctattgaagaagtggagaggctcaacacacctcgccctagaaacccaagtatctgcagtgcagaccatgggaggtcttcttcagaggaggactgcagaaggccactgtctagaacaaggaatccagcggatggcattccagctccagaatcctcttctgatagtgactcccatgaatctttcacttgctcagaaatggaatatgacagggagaagccaatggtatatacttccaggatgcccaaattatctcaagtcaatgaatctgatgcagatgatgaagataattatggagccagactgaagcctcgaaggtaccacggtcgcagggccgagggaggacctgtgggcacccaggcagcagcaccaggcactgctgacaacacactgcccatgaagctagggcagcaagcagggactttcaactgggacaaccttttgaactggggccctggctttggccattatgtagatgtttttaaagatttggcatctcttccagaaaaagcagcagcaaatgaagaaggcaaagctgggacaactaaaccagtccccaaagatggggaagcagaacagtatgtgtgaagtttatgtactggcactat

SEQ ID NO: 1410 - DNA, 2614 bp, Homo sapiens
agaagaggaaggggagagtcggcggtcggagcggggtgacgaggacctcatgcacgaggcggcgaaggaccgatggcagagaaccgagtgcggcgcgaggcggtggccgcggccagcgggtgggtgcgtctgggcgcaggcgggcaccggggcccagggtctggtcctcctccttgtggcgggtccagggcgcggccgcctcgcccagcccctaggcgcactcgtcccggcgcggaggcggcggcgacaaggcagtcgctgggtgccgcgtctgccggcggagacgcagaccgacgtgcaagaggcgaccgcggctgcctcggctcccagctctgttaactgcgcggagtactttcgactttggagataggagggcgatcgcctcccccacccaccgcctccgcccaccacccaccgcctccgcccctccgagcaacttttcccggtgcctgcgagctccccctccgcgccgagccgaacgtcccggcccgccgcgcttcgtgccgccgcgcgcgcagggaaggccgcttctccttcaaagctggcacggccgcgagtccggaacaatagtcggggtgtcccgaatgccaggagcacggccactgcccgccgggctgtgggtggcacaggaatgggggttgcgtggtggatgcagagcggggtgcatccctggatggcatcgctggagcgctcgccgctccggcgacatcgcgagcggtgcaaaccgggccgcctggagcccgtgacgcggtggcggcgagggcggtggggctgcctgtcctcgggctacaggactggggctcctggggaccccaagctgctcgagcccagggctgctggcgccaacagagctgtgccctgaggacccggcctccccgcccggggggaggccgcacaggagcgtccccagcaggtcccgcgaaggcgtaacagagccacaaacttttgccgactcccgcggccgcggccgccggcagcccgactccggccgcggtgctcatttaaggtggcgcgggcactagccgagcaggctggcctctggccgcgcttttgtccctgcgattccgcttgggcgcgctgcctccttaaggaaaagcacgtgggcaggggccgcagcccccgcgagatacccggggcgtcggcggacattagccgctaggaccttaggcgagaaaatgtggacgcatccccgccggccctgaggccaaagaagtccgaggcgacctgggagtcggtcggatcccagccgagaaaagaaacaagcaggatagcaattcttaggggagccaccctgggagttttaggcagcgtttgcctttccctggttttcttcaccaagccccatcctccccccgcataccacccccagtcaaaggagtgggagaaaatgcacagttcgaagtcggtgagagcaaaaatgggtctagtaaatcaacccgtggtggtagctaaaaggtttggggctgcaaagaaacaaactgtaagttttgagcaacaaactttttcttcaatctgtaatatgtcgaaatgggaagggggtgttgcaaaagccaactaccactgtcaaacttagcccgtttacaacatggggaaaggcgtatttcttactaatatctcaacaacgataacaatgctgtatccttccttaccttgatgttgaactgcgaatcctcctccggatcaatgtccaggaacttagaagaattggtgatattaggagttcagtacttctggaaaaaaatgcaaatggtttagccaggatctttcctgtctgattcgtcactattattatatctgatgatgcgaatggttggagcgattcaatcctaagtcattaatgagctattttataaacaccactgtctgaagatcttcatttacattttgctaaggatcactccgctaacctcacaggcttgtgtcaacagcatgatttgcaggacttcagttacactcttataaacaacacggctgtattgttaatcggttaatattttataaagtgtaaatattttattatgttttgaagggaactattgattctaaattattaaacccctgagaaggactatttaaatgaaatatacaattaagtacaattaaatgtacattgtggttagtttgttttcagattctgcacccttttaaattcattgcttttctctttactggagtttcctcttgtccatttctgatactgaaaaaaatctatcatgttaggaaaagcctaaattatttaaagttgcattaaacttagaggaaaatgtcaaatacgattaattatgaccagaaatgtattttggatgtttgtagagttgtatttcatatcacattttacaaatttcttccgatttaaaggagagttctaggaagttttgtgatctatgtccggtgtgggtttttgtcctctcgagttttgtctctaataaaggccttttttgtttcaaattacatacgctttttactgcacaatttttgtattgaccttatttcaactgaagcgattatttccagcaggtttaatttcgacaataagatatattttaatagttttacctttcgctagaattttgtattgtttaaaacagtaaatgaataaatttgctgatgattc

SEQ ID NO: 1411 - DNA, 2920 bp, Homo sapiens
ggctcgcggagtgcctgcgagcggtgctcatggcgctctatgaggtcttctctcacccggtcgagcgcagttaccgcgcggggctctgctccaaagccgcgctgttcctgctgctggccgctgcgctcacgtacatcccgccgctgctggtggccttccggagccacggtgagcctgccccggccgctgtgccacgaggctccccgggcgcgctcggccagggccggcctccctaaccgcctccctaccgccctctttaactcagggttttggctgaagcggagcagctacgaggagcagccgaccgtgcgcttccaacaccaggtgctgctcgtggccctgctcggacccgaaagcgacgggttcctcgcctggagcacgttccccgccttcaaccggctgcaaggggatcgcctgcgcgtcccgctcgtttcgactagagaagaagacaggaaccaggatgggaagacggacatgttacattttaagctggagcttcccctgcagtccacggagcacgttctcggtgtgcagctcatcctgactttctcctatcgattacacaggatggcgaccctcgtgatgcagagcatggcgtttctccagtcctcctttcctgtcccgggatcccagttatacgtgaacggagacctgaggctgcagcagaagcagccgctgagctgtggtggcctagatgcccgatacaacatatccgtgatcaacgggaccagcccctttgcctatgactacgacctcacccatattgttgctgcctaccaggagaggaacgttaccaccgtcctgaatgatcccaaccccatctggctggtgggcagggccgcagatgctccatttgtgattaatgctatcatccgataccctgtggaagtcatttcttatcagccaggattctgggagatggtaaagttcgcctgggtacagtatgtcagcatcctgcttatcttcctctgggtgtttgaaagaatcaagatcttcgtgtttcagaatcaggtggtgaccaccattcctgtgacagtgacgccccggggagacttgtgtaaggagcacttatcctagaaaggccatttctgtagactcagcaggaccgtggctgcctcattgtcatcttctgggaacatcttaggaccttttgaaagagcccagcggacacctgcgggcttgtgtgcttttccctcagagacaacggttctttccggttttgctctacacagttccgtatcttcagagctcctgcagaattgtcagggactagtttgtggaaaggtctgagagttcctggaggctataattagctttttgggttttccttctttgccttagtgttgaatttcaggagaaaattgcagtcagttcagacatcttggaaagagtcccatctctggtcaagcagagacttttcctctgttgaactgaggaacacactgtgcatttcttccttctgttgtgagccactcttactcttttcagggctctcttgtgacaaacatgccaatcactagcactttgcacccctgggcttctccatttcccattcacagctttgatttccagagctgaggcctttaactggagacctggaggggcagggcccaagggcaagggccgcattagcacaggcaatcagggagggccgctgaaggacacttggaccgtccacctgccccagcccaacagtcagtcatctgtcatcagctcagctgagcagccctggatctttgccgtactgtgactgggctctttgccctatttttccctctgtctgtgcccctggatggcaggctgaagtcagaggggctgtttcattctcagccccctcagcagcactgggggaagaaagcattgtcacaacaggttctttctggccctcacccaacagcctgggcacttggccctcctcctccttgacagccctcccccttcctgcaaaggacaggggcgacaggggttggtgttgggattggctcccgctgcctgacaaccacaagtttatttggaaggctagcgggaagcccagcggctggcgtttcccttgactaaggaacagggtgcccatcagagtggggcgggcagctttgggaaggacacaagaagcagtaagagtgtaaagaggatgctggcctgggcaggccagtccagcctggccactagcagaataccaagcagtccagtggattaccctcgtggctaagcaagtgtctgcaggagcagagatggctggaaggggcctctgcacacggaagatggcttgttcagcccattcacctcctgaggatgtgggcagtctcctccaagaacacatggagctgcttcctgatcccaagcaggtcattgccactggaaggacatggccccggtgatccatgcttcatgcccacccagaaacacacccctcagtgtgtgcctcagtttactttggagatcagttgtcgtttttagtgctcctttaggcttactaaaacagttttggaaacaaagctattttgaagtattcaagcagaggaattccctaacactgacccccttgtctttttttaatattcaggctgttttatatgcctaaatttttttcttaagatctaaacgaaaaatagtttcttgtttaaattcacataaggcaatgagatatggaaagatgacaagatacgtataaacattggtttgcattttattaaattattctaatgcaaatcttgtataaagaacccatgatgttttgtaactttctaattaaaatgttcaaaatgaggccgagcatggtggttcattcctgtaatctcaacactttgggaggccaaggtgggaggatcacttgagcccaggagcttgaggctgcagtgtgctatgattgcaccactgtactgtagcctgggtgacagagtgagaccctatctgttaaaat

SEQ ID NO: 1412 - DNA, 2731 bp, Homo sapiens
ttttctgacaaattattgacaccaaattgaataattcatgacctgcatgcttcagcttctttctccctggtttccaggtgctattccctcaagaaatgcaaattaaatatgtcggtcttaataaatcaggagggaagcatagtctgtgtctgttttaaatgacaacaacaacaaaacagctttggggtttaagaagtggaagacacatttttatttttttgagacacaatctcactctttcgcccaggctggagtgcagtggcgtgatctcaggtcactgcaacctcccgctcctgggttcaagcgattctcttgcctcagcctcccaagtagctgggattacaggcgcgtgccaccatgcccggctgatttttgtatttttagtagagatggggttttgccatgttgcccaggctggtctcgaactcctgatgtcaagtgatcaccgacctcagcatcccaaagtgctgggattacaggcattagccaccacgcccaggtgagaagacagattttaagagaaggagcagggctggtatctgaataggtatttggatgttaggggaaaaccctttttggcctctgtggtagagcgatcggaaggtaaaagtgctgtttacaagaataatccattggagatctggggattggggacgacttataggatagagtcctcttgttgagaatttcccgaatgaatctcatgtaggttctgtcacagtaagatggaggaaaactttgatggggtaagtatcacaagtggctgtcctatagggggaaatcctagcctgcagtaatgtcagtgtctcagtattcagccagcgagccactgagctgctccaggggtttaaaatagaatgcatagaatacaatgtatacaactggtgatgctttccaggatcaaaatagagcccttgtctgatcccattgacattgtaaggtttcgatctctcatacctgccacagacaagtacattgtaggcattcaacttttaaggttttatacatgcaaactttatgttttcctgccacactacacttggtgtccacagaagtgtagtttgtatgttgcctcttcttcctctttcaaccagaacacttagatctgtgatcataggatgtaagcctgtgattctttactttttctaataagaaatacaattttcaagatccaaaaattattagattcttggctgggcgttgtggctcatgcctgtaatctcagcattttggaaggctgaggcaggcagatcacttggggtcgggagtttgagaccagcctgggcagcacaataaaacaccatgtctactaaaaatacaagggttggccgggtgtggtggcatgcgcctgtggtcccagctacttggggggctgaggagggagaatcgtttgaaccaaggaggcagaggttgtggtgagccaagattgtgccactgcactccagggcaacagagagagaccctgtctcaaaacaaaaacccccaaattattagattcccttccaacaacttgatagccatattattagtatttttgattaaagaatacataacaaaaagctgctatgatttcagtaatgcttttaagttaatttattagtcacaccagaatctacatccaattgaaatatatacaaatatttgaaagatatttattcaggctgaagattatggtatatagattccttctgataacctcatggcctcacaggttcaaaacccgtgtttgtgaatcactcatacagattggggctaagatgcgtgtccagaaaaccacctattatgcatgaaaatttgtaggcttatttgaaggcaattgtatcaacacattttgaaagccaagacacaagtattttaagtttctgtttaaccaagtctcgagataagcagagtaaataaactctttagaagcaagactcagttggtatgtacaaagtgggattgctttgtatatattccgcttagtttgagtcagagctagtaatctgatgctcttaaatgtcttcataaacttgggcagtgatgtttcctttctgtgattatgtgtcacagatttttatatgtggactataattagtatagtacaatggctgaaacttttcctatagttggatatatcttctgagacttccagtgattgtataatgttgagtagctccagaagattatttgaatagtaaaaacaaaagacatctctacctatgtgagtttattatttagttagaaacacagaactaactatttaaaacaggtagagaaagattaagatgaatgtgatgtagtggagaaagctttggagactttggagtcagaactcaaatggctctaggtcccaaatccagactctcattttgattctcagaacaattctgtggaaagagaagatacaataggcaatatccctttttacagataggtaaacagaaatagcatctcaaaacctcatttgcactgggtgaggtggctcacgcctgtaatcccagcactttgggaggctgaggcgggtggatcacttgaggtcaggagtttgagaccagcctggccaacatggtgaaaccccgtctctaccaaaaacacaaaaattagccgggcatggtggtgcatgcctgtgatcccagctacttgggagactgaggcaggagaattgcttgagcccgggaggtggaggttgcagtgagctgagatcatgccactgcactccagcctgggcaacagagtgagactccgtctc

SEQ ID NO: 1413 - DNA, 2549 bp, Homo sapiens
ctccgtgggcagaactgcatcctgtggtcctgcctgattcgatgatttgaaaaggcagaaacatggccgctgccattggcctggccagtgaaaacgggctccctgggaaattcacccagcctgacctgaagcagttgctgagaggcagaggagcagctccaggtgttttggcagggaagcagctggcagctgtgcgggagccccttgcctcccgtgttcttactgaggagtgtgtggggcagctcgggacaggtttcactttggacagtggttggaggctgcttactctggcagagtcatctcaaagagccttggtgtatgtgcaaaacggggccatctgcatgggcgttgggaagatcacagaacctggacccttaggatgacccaagggtcagttgcatactgtttgtttttgtggagtcaatgtcccatgacggttttcgcgatgctttgctagtaggagcagtggcgtgtgaggctcccggttaaataccatgagattctaagcggaattctgggtctcctggtatgcacaggtaaaattacagtagacctgtcccactctttgccagaacctcgtacttgtctgcagtttgactggaataaggggtgtttgtgttccacctccctccaacgtgtgttgagacatttatttatttatttatttatttacgttgctcttgttacccaggctggagtgcagtggtgcaatctcagctgctcaccgcaacctctgcctccctggttcaagtgattcttctgcctcagactcccgagtagctgggactacaggcacgcgccaccaggcctggctaattttgtatttttagtagagacggggtttctccgtgttggtcaggcgggcctggaactccgaacctcaggtgatccgcccgcctcagcctcttaaagtgctgggattacaggcgtgagccactgtgcctggccccaagacattgattttatttgagatgaggtctcactttgtcacccagactggagtgcagtggtacaatcttggctcactgcaactccttcctccggggctcccaccacagcctcctgagtgactgggaccaggggcacgcgccaccacacccagctaatctttggtagttttggtagagatggggtttcaccgtgttacctaggctgctgtcacacttctggcctcaagcaatccgctcgccttggccccccaaggtgttgggattacaggcgtgagccactgcgcccagctgtgtcgagacatttaatatttgtcaatctgatggattgaaatggtaggtcatttgggctttccctgcaagctccaccttccgggttcacgccattctcctgcctcagcctcctgagtagctgggactacaggcgcccgccaccacacccggctaattttttgtatttttagtagagacgggggtttcaccgtgtcagccaggatgatctcgatctcctgacctcgtgatctgcccgcctcggcctcccacagtgctgggattacaggctgagccactgcgcccggccgggttttctgtaatttctagtgaggttggacatctgttccagttacctactgctacgtaaaagtcgcggtcacctcaagtcagacaccattcttaaaacagttaacacaaccattttattatatctcacagcgttgtgggttaggaatctggacagtgagggcagggttaatcttcagttctgtgccaccagctgggatcacttgagggtgcttggctggcatacgggttagtctggggaccactgccccctttccggcatcctctgtgggttccagcatttttctttttttttctttttgggattaagtctcgctctgtcacccaggctaaagtgcatttgtgcgatctcggctcactgcaacctctgcctcctgggtttaagtgatcctcatgcctcagcctcccaagtagctgggattacaggcgtgtgccaccatgcctggctaatttttgtattttttttttgagatggagtttcactcttgttgctcaggctggagtgcagtggcgcgatctcggctcactgcaacctccgcctcccaggttcaagcgattctcctgcctcagcctccctggtagctgggattacaggcatgtgccaccatgcccagctaatttcgtatttctagtagagatggggtttctccatgtcggtcaggctggtctggaactcctgacctcaggtgatctgcctgccttggcctcccgaagtgctgggattacaggcatgagccaccgtgcccggccttttttgtatttttagtagagatggggtttcaccatgtcagcctggacagcatggcaaaaccctgtctctataagaaaaacaaaaaacaaaaaacaaaacccaggtgtggtggcacgtgcctgtagtcctagctacttgcggggctgagatgggtggatcgcttgaacacaggaggttgaggctgcagtgagccgagatcgtgccactgcacactagcctgggcggcgggagtgagaccgtgtctcaaaaacaacaacaacaacaacaacaac

SEQ ID NO: 1414 - DNA, 2278 bp, Homo sapiens
acagacatcatcccttgtataccatcgtagacttcatactggagagaaaccttacaaatgtgaagaatgtgatgaagctttcagtttcaaatcaaaccttgaaagacataggataattcatactggagagaaactttacaagtgtaatgaatgtggcaagacctttagtcggaagtcatcccttacacgccattgtagacttcatactggagagaaaccttaccagtgtaatgagtgtggcaaagcctttcgtgggcagtcagcacttatttaccatcaagcaatccatggtatagggaaactttacaaatgtaatgattgtcaccaagtctttagtaatgctacaaccattgcaaatcattggagaatccataatgaagagagatcgtacaagtgtaatagatgtggcaaatttttcagacatcgttcataccttgcagttcattggcgaactcatagtggagagaaaccttacaaatgtgaagaatgtgatgaagctttcagtttcaaatcaaaccttcaaagacataggagaattcatactggagagaaaccttacaggtgtaatgaatgtggcaagacctttagtcggaagtcataccttacatgccatcgtagacttcatactggagagaaaccttacaagtgtaatgagtgtggcaagaccttcggtcgaaattcagcccttataattcacaaggcaattcatactggagagaaaccttacaagtgtaatgagtgtggcaaggccttcagtcagaagtcatcccttacatgccatcttagacttcatactggagagaaaccttacaaatgtgaagaatgtgacaaagttttcagtcgcaaatcaagccttgaaaaacacaggagaattcatactggagagaaaccatacaaatgtaaggtttgtgacaaagcttttgggcgtgattcacacctggcacaacatactagaattcacactggagagaaaccttacaagtgtaatgaatgtggcaagaacttccgtcacaattcagcccttgtaattcataaggcaattcatagtggagagaaaccttacaagtgtaatgagtgtggcaagaccttccgtcacaattcagcccttgaaattcataaggcaattcatactggagaaaaaccttacaagtgtagtgaatgtggcaaggtttttaatagaaaagcaaacctttcacgtcatcatagacttcatactggagagaaaccttacaagtgtaataaatgtggtaaggtttttaatcaacaagcacaccttgcatgtcatcatagaattcatactggagagaaaccttacaagtgtaatgagtgtggcaaaaccttccgtcacaattcagtccttgtaattcataagacaattcatactggagagaaaccttacaagtgtaatgaatgtggcaaggtttttaatcgaaaagcaaaacttgcacgtcatcatagaattcatactggaaagaaacattagaaatatgaagaatgtgacaaagtttacagttgtaaatcaagtcttgaaagacaggagaattcatactggagagaaagcttacaaatgtaagagtttgtgacaagaatcttgggcgtgattcacacctggcccaacaaactagaagtcacactggagagaaaccttacaagtgtactgagtgtggcaaagcctttagtgggcagtcaacacttattcaccatcaggcaatccatggtatagggaaactttactaatgtaatgattatcacaaagtcttcagtaacactacaaccgtttcaaatcattggagaatccataatgagagattttgaaagtgtaataaatgtggcaaatttttcagacattgttcataccttgcagttcatcggtgaactcatgctggagagaaaccttacaaatgtcatcagtgtggcaaggtcttcagtctgagatcaccccttaaggaacatcagaaaattcatttttgagatgattgttccaaatgcaatgagtatagcaaaccatcaagcattaattggcattagagtcaattcagcattgacttgagtttgaattgacttaacattgagttcaagcattaattgacattaaagtgtttatgttaagaagattgggccaggcggggtggctcacgcctgtaatcccagcactttgggaggccaagaccaatagatcacttgaggtcaggagtttgagaccagactggccaacagacatgagtcacttttcccaccctgtattttgtttctttaataaaaactgttacgggttttt

SEQ ID NO: 1415 - DNA, 4015 bp, Homo sapiens
gacccggcgggcccggcgccctggcgctcctcctcttcgctgccggtgggcaccgccgctcgctcgcacttctgcgcccattggagcttcggagatccctgcggtcccgcgggacggcgcggcagcagctgacctcgcagacaggatcttgctctcttgcccagactggaatacagtggtgtgaacacggctcactgcagcctcaacctcctggactcagagatgtcggcttatttataggaattgcttgaagccagagtcatggtggatgtcggaaagtggcccatcttcactctactctcccctcaagagatcgcgtctattcggaaggtgtgtgtcttcggcacctcagccagtgaagcactgtacgttactgacaatgatgaggtctttgtatttggactgaactatagtaactgtctaggaactggagataaccagagtacacttgtacccaaaaagctagaaggcttatgtggaaagaagattaaaagcctcagttacgggagtggaccacatgttcttctcagcaccgaagatggagtggtttatgcctggggccacaatggatatagccagcttgggaatgggacgaccaaccaaggcattgctcccgtccaggtctgtaccaatctcttgatcaagcaagtggtggaagtagcttgtggctcacatcattcaatggctctggcagctgatggagaggtgtttgcttggggttataacaactgtggccaagtgggatcaggttctacagcaaatcaaccaactcctcgaaaagttacaaactgtttacatattaagagggtagttggcattgcctgtggtcagacttcatccatggctgttctggacaatggcgaggtatatggctggggttacaatggcaacggtcagctgggcttgggaaacaatggcaaccagctgacccctgtgagagtggcagctttgcacagcgtgtgtgtgaaccagattgtctgcggttacgcacatactctagcactaacagatgagggcttgctgtatgcctggggagctaacacatatgggcagctgggaactggcaataaaaataacctgctaagcccagcacacatcatggtggagaaagaaagggtggtagagattgcagcctgtcactctgcccacacgtctgcagccaagacgcagggtgggcacgtgtacatgtggggccagtgccggggtcagtccgtgatcctcccgcacctcacccacttctcctgcaccgacgacgtgtttgcctgctttgccactccggccgtctcgtggcgcctcctgtctgtggagcatgaagactttttaacagttgcagagtcactgaagaaagaatttgatagtccagaaactgctgatctgaagtttcgaattgatggaaaatatattcatgtccataaagctgttttgaaaatcaggtgtgagcattttcgatccatgttccagtcgtattggaatgaagacatgaaggaagtgatagaaatcgatcagttttcttacccagtgtatcgtgcctttctccagtacctctacacagacacagtcgacctgccgccagaagatgctataggtcttctggatttggcgacatcttactgtgaaaacagactgaaaaaactttgtcagcacattatcaagagaggaattactgtggagaatgccttttcgctattctctgctgcagtcagatatgatgcagaggatttagaagaattctgctttaagttttgcatcaatcatttgacagaagttacacagactgcagcattttggcaaatggatggccctctgctaaaggaattcattgctaaagccagtaaatgtggagcctttaagaactgaagcgcgaggctgctgggttctgtgtgagtgctctggggcactgttgaggatgtgtccagtttgtgctctacgggtgatgtgattctgcaggtaaaagaccatcaggttgtttttttccacatctgggacacagttgtttgtgtaggaacataacaagggtgtacggcttttcttgagcccattttaaacaacccttgtttccagataagtgtattttaaatgtgacctttcgtaaatttgggctggaacatgtaaaagggtgaaagttagtcgtttttggtcttgttttcatttttgattagaggaacttctgaacttggaaaggggaagttggcagcaactctcctgggccatgtatcaacaatcttctgacagcaggagcagtgatagttggggaattgtgagatgaatggagaggccccatcgtgaattaaagatgctgacctggggattgttaagtgctgccttagttgctagtttagtagccttactgtgaaggaataattaagattgtttcagacttttgtttgtgtgcttgcgttgatgacttttttaacttcaagataaatcaaagtaataagtttaacgtatattaaacctgttgaaatgataattatgtaaagataaatattctaggttagtcaagatttctcttaagatttaagtgcataaagaatagtaatttagaagtatccgtgaaaagttgataatgaaagaaatttgatgaaggtgaatattttataaattagaatctccactacttatccaatggtgttttatttcattaaggtagaacttgagaactcaagtttaaattgtcccccaccaccttcttctataaatgcaaacttaagaggaaaataatgacatgtatagtatactgttgccttcctaaattatgactgctgaatcatcatatctactatatatgactagaagaagtggttcttcaagtcaaccctcttacaggacttagtggaatttgctttatctactttaggccaaatccatcacacattggcttatttgaaacttttggttttcctctgtttttaaacatcttaggtataacagcacaatttcaccttgaaaaagcaccaaaattatggtgttcctgaaaagatcctattaaaagacagtagtttatttggactggttatggaaggtgactttgggatgtaagagtgttcaactgtgagtttcatcatgtgtgtccgttgagcttgcttttaagagcaatgttttgctttgctctctggtccatgaactcatttccatttgagtgagctcccttagtgaattttgtctcctgcttggaaagtctctcttctgaacctggagcctgaatacattttcagagccaaattacaagtgggtgaagacatgctacaactactatttttagcaatgtttttaaatttgtgtctattggggtgggaaggggagtgaggccctaaagataggaattcactgatagctgaaatagatacaagcctaggaaccccagcccccttttcttgaccatatcacaagtgattgaagcccagtgaattagtcggttagaattcgttctacaacatgatagaacttttcttactagcttcagaaatgcacattgatttgtgctatgatgggtggtgtttgtaacaatcactgttttataggcttatgatctgagcaaaatgtgaactcagtatgtttactattgctcttacttgaaaactttttttcaaaaaaagcacaaattaaagtagtaaattcatatccatagatagttcattcattcaacaaatatttaccaagttcctaatataagtgaaggaccacttctcatattagattactaagtcatttgtatgaatatgtgtggcagtgaagagaacaggtctttcaaaaagcatttgattatctttattttttttaaatacactctcttatttttctacttgtttttttgttaatcatagcaggatatgacaactcttatttgaattgattttttcatctaatgtaataatggaagccaaagtattcatatttcttaagatagccctaaatgtactcttgaacttcttactggaacaatgtttgatactctagtatgtaagctgtatttatgtaatatttagaacgacatgttaataaacaaagtaacatt

SEQ ID NO: 1416 - DNA, 3818 bp, Homo sapiens
ttctcaaagaggcccacagttgagttttggcactgccttctgtagtcagagtcctggagattcctgggccccaggtggcggggggaagggtccagcacctcggctccaggcatgtgtgccagaggaagccccagctgtgggatcccatccgttcctggagcccagaacacttctctcccagacgccagctcatagtcatcagcctggatggggtggcggtccctctggtttcagctgggcctctggcagtgctgcaggcagcgctgcagtgctggttccacacccaggcgggcagaggcaggtgggggctgggtggctgagaggcggtggccagggaatgagtgcgcactttgggcagttactttctgaagtggctttagcggttgactttgaggaagaggcctctcggcagaaggaaaagattgagggagttatacagtttcctcccattaaaccttgtatttatgggttaccctcttgtaggaatgatgaatgctttcagccagtggcagactcccagccagctgcttaaccgtggaaggtgctaaaaatgaaggcctgctcccttgaagagccacaggcccatcttctgcagtcactgcctaggaaagggccacgccagcccccccggcgcatgaaggccaggatgggtgtgcggccaggacaagcgtcacagaggtgtcctggcccttgcttttccagtgggcggcaacatggtagaactgggtcccctcctgcagtgccgtggacttggcctggtctcacaccctggcacaagcccgttttctagtctgaatgaggcgagttcaggcattccttggcctgccctgctgtctcctgggacattcagacagcccctgagtgcagggtttatggcagtaccaggtgggctcctctggtcgcaggtggggaatgagaacaaagtccaaacctcagccaggggttctggcctcagctctgccaccagctcaccccaagaccttgtgccagcttgtgcctctctgggtcttcactttctcatgtacagaatcagcatgtgttgttgcttcaacgttgtcatctctcccctgagcccagctcataagacagtgtgtgactgaatgcctttggggagggtgggtaacggtgctgtaggaagtactctaggtcagcctttgtaaaaacgtgaagagaatctgtgcggaacccaaatctggcaccctgatggtggaactaacttctgccctttgtcatcgtaggaagatatggctgcccacgttggtgcttcccggactccccaagaggtgatggagcattacgtgagcatgtacatccacgggaacctggggaaggcctgcatccccgacaccatccccaaccgcgtgacagaccacacctgtcccagcggaggccccctctcacccagcctcaccaccccgctgcccccgctggacatctctgtggctgagcagcagcagctgggctacatgccgctgcgggatgattacgagatcgagtatgaccaggatgccgagacgctcatcagcgggctctctgtcaactatgatgacgacgacgtggagatcgagctgaagcgcgcccacgtggacatgtacgtgcggaagctgaaagagagacagcggcggaagaacatcgcccgtgactacaatctggtgccagccttcctggggaaggacaagaaggagaaggaaaaggcgctgaagcgcaagatcaccaaggaggagaaggagctgcgcctgaagctgaggccgctgtaccagttcatgtcatgcaaggagtttgatgacctttttgaaaacatgcacaaagaaaaaatgctccgggccaagatccgagaactgcagcggtaccggcgaaacgggatcaccaagatggaagagtcggcagagtacgaggcagcgcggcataaacgggagaagaggaaggagaacaaaaacctagccggctccaaacggggaaaggaggacggcaaagacagcgagttcgccgccattgagaaccttccaggcttcgagctcctgtcagatcgcgagaaggtgctctgcagctctttaaacttgagtccagcccgctacgtgactgtgaagactattataattaaagaccacctccagaagcggcaaggaatcccctccaaaagccgccttcctagctacctggacaaagtcctaaagaaaaggattttgaatttcctcacagaaagcggctggatctccagggacgcgtcttgaagctgagacgctttgaaagccagggtgatgctcagacagtgtgccagccaaaatgacttgggggaggggagccgcttccccactgttgctcttttttaaacaaattgagttcctttttttaagatagaaattcttttcatggtcctctgaaagaagcaatagtaacaatcttatattggatcatgggggaagcaaatgtgtgtattttaagtgagttcctgcgagtcatacactgcgatgatgctccgcctttacgcgttcagttgggagcttattgtgagattggatcatttccttttgagtgttcttctctttggtacaaaagctattgtgggtgacaggagcagtgttttcctgctggacccgcaagccaccagctatttcctggtgacacaagctcttctcaggcggggctgcctgcaggctcccgttttctgagcccacgctgcccacagctgaccccagcgcagccccgggcacgcggcactttacatgggggcagcttgggcccaaactcctccgctgtgtagcagatgaggaaaatcaggccagaggacaacaggctggcgttttgttgggaactgaagaggaatctgttgaacacagcgaccagatgaccttccatttcaccggcggcagcagtttcagcgtgcagttcccaaaccccaaagctgaccctgcgccccatttgaatacggccagagcctgctggttcactttgggtagagccgtgcctcttgggcaggctcccatagtgaccacgtccccacgaatgggaaagcacgttagtgggagggacgtaggacacgtgtggaccgccaggccctctcagtccattttccggggctgctcggtgctgctgttaagacgtgagtgcatttcacttggaagaacccattgtacaaagttcaaggctaagagttctgaattctggcgtcagcttcctcaggattttcttcagttgcaagtacctttccactgaaaatatgagcatgcccgcctggctagtaggcatctgtaagagtgtcgccaggcccgcgccagctgaggcctcagactagccaggcaagagccgtctgaccagttggctggcggtggttctggtggagcacgagggagcccgggtggtgccctgagcctcgagctgctctctgtcactgtcttgaatcagactcagaaatggcttcttcccagccctgcctacaagtttttctctggggtcctctttcaaggatgtccacggtaccttcctcctgaaacttgaggaagtcttttgtcttccagctgctcagggttctctggtccaagaccctgctttaaagagagtctttggcgtgctcagactccagcgctccgttcttcaaggaggttgacttgcctctcgggccccgtaggtaccaagagactgtttacctcccagaatgtttgggcttgaagttacattaaagtgaagttatttgaaagaaagaaaacctcatcatttctaaggatgacttaattactgtgccttttcctttctttttacacatcctactgtcccttagggtaaaattttcagcattaaataaaacatttcaaatatattgt

SEQ ID NO: 1417 - DNA, 3365 bp, Homo sapiens
atggccccggggagccgaggtgagcgttccagcttccggagccggagggggcccggcgtacccagcccccagcccgacgtgaccatgctgtcccgcctcctaaaagaacaccaggccaagcagaatgaacgcaaggagctgcaggaaaagaggaggcgagaggctatcactgcagcgacctgcctgacagaagctttggtggatcacctcaatgtgggtgtggcccaggcctacatgaaccagagaaagctggaccatgaggtgaagaccctacaggtccaggctgcccaatttgccaagcagacaggccagtggatcggaatggtggagaacttcaaccaggcactcaagggctttttggtctggtgaataatgctggtgtggctggtatcatcggacccacaccatggctgacccgggacgatttccagcgggtgctgaatgtgaacacaatgggtcccatcggggtcacccttgccctgctgcctctgctgcagcaagcccggggccgggtgatcaacatcaccagcgtcctgggtcgcctggcagccaatggtgggggctactgtgtctccaaatttggcctggaggccttctctgacagcctgaggtgaggggtacagggctctgggttccaggactaacagcagcccactcaacaaacgtgggccagcagaggtggttaagatacagcacattggaatagttaagaagagacagtttagggctagacttcatgggttcaatgaagtctacccttatgtaagctttgtgaccataagtagattacttctctttacccatttttaacgtgtttgttttttgttttttgagatggagtcttgctctgtcgccaggctggagtgcagtggcgcgatcttggctcaccacaatttccacccccggggttcaagcgattctcctgcctcagcctcccgagtagctgggactacaggcatgcgccaccatgcctggcttatttttgtatttttagtagagacagggtttcactatgttggccaggttggtctcaaactcctgacctcgtgatccgcccacctcagcctcccaaagtgctgggattacaggtgtgagccaccacgcccggccttgcctctcgtctttaaacaataaggttcaaagttccgtgggagcacaaaggagacatgatgaggacaacgggagtagggcctgagtttttttttgttttttttttttaagcgttttgctcttgttgcctaggctggagtgcaatggcgagatctcagctcactgcaacccctgcctctcaggttcatgtgattctcctgcctcagcctcccgattagctgggcttacaggcacgtgccaccactcccagctaatttttttgtatttttagtagagatggagttataccatgttggccaggctggttttgaactcctgacctcaggtgatccacccgacccggcctcccaaagtgctgggattacaggcatgagccaccacacacggcccaaggcctgagttcttagcaggagtataaggcgcctaagcttagtctaccttctaaggaagcctgcgtttgtcaccatcactcagcaaataacctgaatgtctcctgtctctcagccttaatttttcaggcagcatcatgggacacatacttttagttttgagacaaggccttgctctcacccagggtggagtgcagtggtgcagtcacggcccactgaacttcaaactcctaggctcaagcagctcaagcgatatccgcctcagcctcctgagtagctgagaccacaggcgcgtgccagcatgcctggctagtatttttttacagatggggtcttgctgtggtgaccagacttgtctccaactcccggcctcaagcgatgcttccgcctgggcctcccaaagtgttgggattataggtgtgagccactgcatactggaacacatactttatacttgaatttttttttatccccttccctcctgctccttacctatacttggatttctacatctgtgccagggcagtgggatgtatccccactttccccatcagcttaccctccagcaaatacgagactatacccttcaatatccagcactcagggctcaaccatgtgttttgggagcaagggaatggggttcctctaggtcaggaatcggcaaactcagtactcaagccagatctggccagctgcctacaagctgataatggttttttttatttttaaatggttacattgtaaactgttatataagtacctgataatatcattaattttgtttcttggcctgccatgcttaaaatattaactctctggccctttaagaaaaaaacgtgctgacccctgctctagatcaaagaaaacaaacctcaaaaatactttcctccctctaccccacttgacccttgtcccggggcagtaggcatctccgtcaaaactcttgtccctggtctgtggtaactttctcagctccccaacccatgtccctcaaagtcccctccctatagggcaagaacccagcaacttcgctctgccccgactctaggcgggatgtagctcattttgggatacgagtctccatcgtggagcctggcttcttccgaacccctgtgaccaacctggagagtctggagaaaaccctgcaggcctgctgggcacggctgcctcctgccacacaggcccactatgggggggccttcctcaccaagtgtgagtagccaggcccacacaggggcacatgaagggaaacaagtaccagaaaggccagtcctgcataagcctgctaggaggtgggtggggcacccagggcagggttgagggtgaacaggatgttacaagagtgcccaggccatgtggaacctgcccactccccacactgaggaggggactgagggtgacaagcccagggccccagaagacagtacctaagatgggctggagtgaggaagggaaactgattgcaaccacctatggggctgcagacctgaaaatgcaacagcgcatcatgaacctgatctgtgacccggacctaaccaaggtgagccgatgcctggagcatgccctgactgctcgacacccccgaacccgctacagcccaggttgggatgccaagctgctctggctgcctgcctcctacctgccagccagcctggtggatgctgtgctcacctgggtccttcccaagcctgcccaagcagtctactgaatccagccttccagcaagagattgtttttcaaggacaaggactttgatttatttctgcccccaccctggtactgcctggtgcctgccacaaaataagcactaacaaaagtgtattgtttaaaaaataaaaagaaggtgggcagaaatgtgcccagtgg

SEQ ID NO: 1418 - DNA, 3018 bp, Homo sapiens
aaaagcccgcggtcgggtgaggcgggacggagttggggccggtggggaggggcatgaggcgctcgcaggcagctcgagaagcaggccccgaccgctcgccgacgaagcctcgtccgggcctcctgggagcggggtgtcaggtaccgtggcgcctcctcgcgttggtcttgctggttctcggcccccgaagcggagcgacggagacacagctgtggaagcatctggatccgctgcccaggtccccgagcttcccggaacccgaggccgcaggacactgaaggctgccattcccgagtaggtcacgctggacgccaccctaagctgggcccagaggctcccgtccaggagggctgcagtcggcgcagacaccgcgcgtgtggagacgggagacccatcctccttggccgttccgagagtaggcgcggccggtcagattcgatgcagagccgaatgcgggagaaagggcaaaacgtacctcaaaccagacaaagccttgtgagcttcaggttctcaaataccccactcacccagaccccacatctccagtcagcccctcgcacccaaatcccattcggagcaaccgaactgcacgtgggactagttcttgggaatggatcaagccagtctcttcatctaacggagacagccctgggtggctctgtcacacagccactgtcttgtgcacaagttctgaacttggcctcagagaagccccagagtagaaagaagacaaaataagccccagttcttcgattctgggctgaagtgagattttcttgaatggcagccattgttttgcctcttaggtaagtgagtgcagtaaagaccggtaaggcccacgcagaagaaacactgaggaaagaagacacttccaaagtaacaaatgggaggaagcagccaacgcccgaggacaacatggcaagaaggagcctttggattccggactgggatggaaagagagttgattgaatcccggaatttggaaaccccagatacggagggcggacggtacaaccggagctgtcaggtggatttccaaggctttgcattggctgtacctgaaacttatggtggcctagactccccagtatccactcttccttatcttgaatcttgctctgtcacccaggctggagtgcaatggtgcaatctcaagctcactgcaacctctgtgcaggttcaagtggagaatctgaatcttgatgatataattggaactcttcagccaagccatatctaacagaactatcttcaacttttcagacttcacagggttccttctccagctgagctccaagtggagctttgagagaaaaacagaagggtgatggctagaagactcaggcttccaaagtattcctctcctgagtatcagctaccaggtgaatttcacaatgaggatgacaacttggaaggggcaagagtcacgtgcctgaggggaaaggtcaccagggtgcaatctctgttaatccttctctatacccagcttcccgatgcggcctgtacagaaacaagcacgcaggcacttaagaggacagtggtttcaccgtgtccctcccggcggcgctccccacctttccttcctccccacacgcccctcccaggctgcaggcttagcagccgacttccgctgatcccggctggagggagcctggaatccaattactcttccctagggagcgcaatccacccgtctggccgcaaagagcggagccggggtccgagagccgcacaggccggccctgctccgcccgcccccacttcccgccacccctgcctcgggctcggcagcccgggcggggcgagcagagccgcgtagaggtgcgcggcactgccgccggaactatttgtccttccgcgcgcggcccggcccggcggggcgagaggttcgcggcgctgcatcccgggcgccgacgtcagccgggctgagtggcaggagattagccaagggcttcccccgccgcgcgtccgggccaatcggctccgcgggcggtgctccagggacgcgcacacgcactttccagaatccacgcctcccagcaacagcctccagcaccgcgacgctgcccttccggcccgctttcttcgtccggcctgctacggctgcgggcttggaccctggcctctagtctcctgcgtgctgctccctaaagtgacagggaaacggggcaagaggtccaagggttccgtaggagaaagagtatctgtggctctcccaccgtcccggcttccctaacggactagggagtgaagctctggagatggatctttgggagaaaaaaactggacctctcttcgggttctttagagtttaggtggagaactctttcagtaccattgagtgttctctagtaagaggatcttacactgttgggtttctcacttgctttaaaattgtggtcagagtacttcataaatcctttcctttctgcatctgggggaaggaaaaaaaatgcaacactctctttacacattgtcagactttcgaggccgcaacgcaactgacatacatgctagaaggagaaagtgctatattatgccttgtgtcctcttttgaatcacattctcctgagatgtggctgacccttaggcccatggtgttcctgaatgtgattgacatgcgtagttagcaagctagtgagagagaaccaggaaaattgctatcaaaacaattacatacagggacatcagaacaaacgcttgagaccactggggaatgagggaccatcccagttctgccacggatgccttcggggatggtggccaagtcagatctttgtgtcttgtttcttcgtagcagattgaatagaactatcttcaccacactcactatttcaaagtgtgttataaacatttcacttaaggtgaaaatgttgaaggttttattttgggtggagggaaggtggtgccattgaaaggcactctctgaagggaagattctgtaaaaggaagccattttatctgcctacaatttggtcatttcaaagaaattcaatgtatatgtgttaagactaattt

SEQ ID NO: 1419 - DNA, 3373 bp, Homo sapiens
acttcctgctgccacgtggagaagggtgtgtttgtttccccatctgccatgattataagttttctgaggcatccccagccatgctgaactggaagtggcactaaggtccaaaggaagctacatatgggtggtccctgctacaccagcctcccaagcctcccagcgcaccttctaggagacaagcaaggaaggccgctgcttgtttgtcatcctgctcatggcggtgtactggtgcacggaggccctgccgctctcagtgacggcgctgctgcccatcgtcctgttccccttcatgggcatcttgccctccaacaaggtctgcccccagtacttcctcgacaccaacttcctcttccccagtgggctgatcatggccagcgccattgaggagtggaacctgcaccggcgaatcgccctcaagatcctgatgcttgttggagtccagccggccaggctcatcctggggatgatggtgaccacctcgttcttgtccatgtggctgagcaacaccgcctccactgccatgatgcttcccattgccaatgccatcctgaaaagtctctttggccagaaggaggttcgaaaggaccccagccaggagagtgaagagaacacagctgctgtgcggagaaacggcctacacactgtgcccacggagatgcagtttctcgccagcacagaagccaaagaccaccctggggagacagaggttccactggatctgccggctgactccaggaaggaggatgaatatcgtcggaacatctggaagggcttcctcatctccatcccctactcagccagtattgggggcacagccacactcacgggcacagcccctaacctcatcctgcttggccagctcaagagtttctttccgcagtgtgacgtggtgaatttcggctcctggttcattttcgccttccctcttatgctgttgttcctgttggcaggctggctctggatctccttcctgtacgggggactgagcttcaggggctggaggaagaataaatctgagataagaaccaatgcagaagatagggctcgagctgtaattcgggaagaataccagaacctggggcccatcaagtttctttctgatgctgtcaccggcgtggctattgtcaccatcttgttcttcttcccgtcccaaaggccctctctcaagtggtggtttgacttcaaagctcccaacacagagacagagcccttgctgacctggaagaaggcccaggagacagtgccctggaacatcatccttctcctgggagggggcttcgccatggccaaaggctgtgaggaatcggggctgtctgtatggattggtgggcagctgcaccccctggagaatgtgccccccgccctggctgtgctgctcatcactgtggtcatcgccttcttcactgagtttgccagcaacacggcgaccatcatcatcttcctgccggtcctggcagagctggccatccgcctgagagtgcaccccctgtatctgatgattccgggcacagtcggctgctcctttgccttcatgctcccggtctcaacgccccccaactccatcgccttcgcctctggacacttgctggtcaaagacatggtgcggacaggcctcctgatgaacctgatgggtgtcctgctgctcagtttggctatgaatacctgggcacagaccatcttccagctgggcaccttcccggactgggctgatatgtactcggtcaatgtcacagcattgccacccaccttggccaatgacacatttcggaccctctgagtccccctggaggactcccttgaggctgaaccctctcaaagggctgtcaccatcacctgctgctaggacactacaaaacaatcaaataattcttttctgtaatccaatatgcagcaagcaagggtgacctccagtggcccactcaagtccatgagccattatctaggatactttctctctctttcatgcagttcaaagcccaggtatctctcagatctgctgcctgataaataagctcctttatcagttagctgttttatcattaggatacaagacagcccagtgtcatcaacagtgagcaaatctggcatggtgtttgtctcgtacagttgggataggaggccattcattcccatgggcacagctaacattatcccccagtgattactttcgattacactgaagagaccaccttgtctttaaagatcactttcctgggctgcaatgttccaacccagttgttccagctgttcacaaccagtgtgtgattttgcttagttggtgcccattctgcaccagttgttttacccctgccgataaccagcagtcagagattcttttttaatccttggagacagggaaagggacagatagctttccaaggacatgagactgtgcaaagcctctttgctgtttctctgggctcctgagcataccaggggaagttctagaaaccgcagctgacatctcgacccaagagatttaggattctcctgtttcatctgggtcggtttggccataattctggggtcaggccaggcctgggtcctgccctcccatggggtgactcatgacccctccagccaggactctcctacatgtggcccccataggcctctgtggctgcaaggcggtcagttgctgcttgtcccagcaggtggccttgatctctccatgccccaccttaagtggtaagcatgtttaattatcaaaggccccatttgtcaggggtgagagaaaagtcaaaagataaattggggccttgtaaaaggccagggtaaaatgtctcaggcaagcaaaagattgtccccttctgcatatgggtaaaactgagacgtccccgtgagcccgaggctggaagtggtgtctgccttcaagggttaatccctctttgttccaagcagaagcattctggcatcccagtgaagagctcaggccctcaggaagtgtctgctgaatggaatggcccagcattagcccagtattggaaaagacaccagcccaggggccctgactcgtcacacttccctttcctaagcctctgagggtggagattcccctaggagcgcttggccagctgggaaggcagcgcccagctgcacttgttgttgatacagcataagtgaatcatgggcatttccctgagagcagtgggagaggccctctgagttggaagttgagctccacctcctttccaagcgagcactcagtgttgaatcacagttacaacccactggggctggtgggagatgcgttgtatgggactggaagcaagaggttcattcaaagagaaactcatgggatttgtaaccagatgaatcatgatttctaagacttctgatcaaaaatactgtgaaataaagaatgttaatc

SEQ ID NO: 1420 - DNA, 2743 bp, Homo sapiens
atttatacctatttatgtatttatttattgaagtgtgaaattgagcaataggcaggcaccaccgtccccagagcaggtcagcgtctcgagaggcccctggacaattgaggatgcccatcccctcccctttccctgatcttttactgaggggctgtgtgcgcgatccttgcaaattgatgatgttgccatccgtacccaggctgtgtctcataaaagtcggcctggtgccagagaggacctcctttctcccacagaatcccagatcctcaggaaaagccaaaaccgaggcccattgcccggattcgacacaaaagagggtccctgctctgttgcccgagagcagtctgcatcctgggaccagaatgctttcctggaaaaagaagcctttcaggtttccctgggccagcatcttctgatggaaggtgggagccaacacccttctgatggaaggtgggagccaacacccttctgatggaaggtgggagccaacacccttctgatggaaggtgggagccaacacccttctgatggaaggtgggagccaacacccttctgatggaaggcgggattcccgcttctgaaactccccctggagtctcactcccacacatgcccatagctagcattcaacagagaactctgtcttaagcttcaactgtgaaaatgatgacgggcttgtagcacctcagcttctttcctcgcccccttttatctgaatcctatcaattattctgatgctgggacaggtgagaagaaactgtgaagtatatgagcctttgaaagttccctgaagtttctcagttcaggaacattctcattgtatgtggtctccgctgtttgaacagccttctagctaaaaaattccaaagcctttatttgggagtcttagcttgcaagcttgtggaaggatttagcttaacaactgtcactcctgaaaagcaatctctgttccatcaaggttctagttgctggccctgtgtcctcaaagttcattacatcttatcaaggcctgtttgcaaaggggagatcccttttcttaaaaaaggctcaacccaaaagaaaccatttcttaaaaaattttacatagatcagttgtatttctatttagcaaaaatgagtgctctgcttttatttgggaatttcgatgaaaaagcgttcagagtagataatgttcatttatcaaaaatctggtttgggaaataccaaagaggctttgattgaattcccttttgacccgtgtgtaacttcctctggtagttggaccccaggcagctccgaatttgtgaacctgcttcctgatgaattctcccttgttcccccttggctctgccattatttcgttttcagtgtaatttgccaagccgcagttttctgtgctggctgtgcctctagtcgcagctctgtgactgattccctcccgggtgctgagtcccctccccggccaccatcctgcgtgaatatcctgaaattcatgggcttcctcgggggcccgcccgcaggtggtgctgggtgggttccgccaccttctcctggaaggtgagccttttcctggccaagggcagctgccttaacctctgagagtctgcgcttggccttagtcctggagacccagcctccagggactgaaccgtgctgctgttgggagccaagaccggccctttggagccggcagcccaggggtccctgctggatcatcagaaatagaagcacccgaagacggttagtggcaattccttgacccggtttgcttccaaatgaaggccatttgtccaccaggcattgaaaagacatgacttacccagtccggcatcggacttgaaaaatcgaaattgacatcactcagctgttacatttcacatccgattcagcccccttttatttccatgtgcttttcgcagccttcctgtgttggatgaaagagaataagaattcagctgacaggaggcctctatcctgtccctccaccccaccctccacctcaatcccctcccatcttccccagacctacctcacctactaggacctgaggcagctccttagcagagacccctggggtttagctgactctgggggtcaggggttcctgtccccaaacttcgcaagacagccctgaagtcacaagtgctttcttttaagtggcattggcaattggcgtgtaatgatggcagtagaatctgaatctcggatcccaggcagggttcacatttccaaacctttttgatttcccctgacctctaatggctggatcctatttttctacaacctttcagtgacatcgttcaggtttctttcttggccatttaaaaaaacaaattttttttttctcacttgtaagtcaccgccagtacctaagttaggctaacggagactttgacaggactggatttttcttccaccagaagagaagccttttccgttggtttggggccacctctttgaccatgaccatgtgatgttccgtttacagtgacttgctttgggggaggggaggctctcttaaccgattcccatgttgtacagtagatggttagaccttttgtatattagtgtgttttaagttattgatttgttttatataaaataatttatttttcaggtgccatttttcattttaactttgtttttacatgggtttgttttcaataaagtctgacactggtgtccaaaagtcaacaataaaatgaatcccattgtgttcttttgaagatgcctatgtaacttttaagctttttaaattattttc

SEQ ID NO: 1421 - DNA, 2626 bp, Homo sapiens
attctttgcagggcgcagctgtgaggatgagcgcaggactctgcaggaagcagacccaagactctgccagctcctcctggccctctccagagagtccgtggaatgccatcagcaatgacttttggcaatttcagtaacttcttggtatcctgaaatcttggggtgcttttccctgaccttcacgcgaacagccctgctaacgattctgtaaacaccgaattccttctgtagaatccatccagcttgacggaatggaagttttctgtttccatgaccgggccccagctcacacagcatttggctccagactgttttcagggaacagaacctctctaagaatgagcacgtggggttggctaactaacaggggtagatttagagttagcaatgacctccttggaaatggagtatgtgctggccgtgtgacttgaaccatcgctagcatttgcctgtgaagaggctgcccactgaaggaaggctttgggatgccaggtggctgtggaaatggaatattctggtgacaacaataaggacgacgtctgtggggggtgccatctgctccaggcagcaccagagagtttggagaagagaaaaaggcacggtgagggcctgacattcctggtccaaggcaagttcggagaactgagggatgtaaaataatctgtcatctcttacagctgtatccaaatagcaaataaaaaatcggatcccaagggctccgggttcacaacgccagtgggattcacaggcttacttggcccagagcccgggtgtgctcttgcccacaggtgtgatcgtcctcagaggacctacccactccgcggctgacaccgcctgctgagacgggcctcgctcccggccctgagctgcctgtgcctgcgtactggaggcgtccatgttctatggccacacctgtgcagacctcccagcctgcctgtgtctgagatccaccctcttccctgtcctcctaggcacaaggatggcctcccaggcacagctgcggtctccagaagattctctgagcacagcgtgggaggaagtgggtccacgcagggaggccagcgccactgcccacctcccctcctcctcctcccttcgcagccacctgcaggcccagggacccccttggggagcccggaagggaggtttgccggtgggcctcggcagtaccagcctcagccacaagatggcagacacttcactaagaaaaacctccaaggcgagcagggaaaccgcagcccacccacgcctctgcaccgccctgggcctgggacctcatggacgggtcctgtcgggtggcggatagaggtggcggccaccggcctgcgatgagcgtggcgtcaatctgcaggcttcggctgtccttcccagcactctcccccatccccccacccgccgccaaaactgagggaaaggacaaaaaagagactaggtgcgaaagaaggggaaagggaccacggaaggtcacatctagtgtcttcctggtcccccttcgtccgctgcctcacttgcaagtcactcccctcggacaactccatgcattctgcgaggtctccctccgccactgttcagattcacgtcttgatttcagtgggcttcgcagccgccctgctccttcgctgtcccccggggtgggccccgctgtgtgcggcacaagtgacagcattaagttaatcatgacatctccctccagggccctgcaggcttggcgatcttcaaagagtgcactgccctgactgttcaccagggagcctgggagatctgggcctgccccagcacctcccctaacccaggagggggcctctccctggccccgaatcagaacaccccaggcctttctctccgatccaacccaccccgggcccttctccccgtccagtttagctccgccgcagacccttctccctgatcccactccaccctggccccttctccctgtccctctccaccccaggcccttctcccgaatcccactctatcccgagtccttctccccatcccactccaccccaggcccttctccccgatcctattccatcccgagtccttcttcccgtcccactccaccccaggccttctccccattcctgctccaccccaggcccttctccccgatcctattccattccgggtccttctctccatcccactccaccccgggccttctccccattcccgctccaccccaggcccttctccctgattcacccctcagcatcgtctccctcaccatcttctaccttttcagcctttccttcccctctgcgcactattttctttggtgttgttcatttttacctgtttcccgaatgttccattcccttgcacacgatctccaaggaatgtcctttcctcttttccatcgcaggaactcctatccatctctgaggacccagaccaaatgtccccacctctatgaaacctgcccgcttcttgaaggcagaagctgctccacatactatgttcgcgtggcatcgcaatgcccgacagcgctgatgacgctgcattacaaaaacccttctgttctccaagccacttccactacccaggactgtctgtgtctctccctcatctcggggctttgtgcactgtgtgcaattaatgaatgaatgaatgaatgaatgag

SEQ ID NO: 1422 - DNA, 3999 bp, Homo sapiens
ttacagctccaaagcatgaactccttgaggggaaggtgggtgaagaacaattcacttcttcatttcttactgggtcttagagctgggtgtgatgggcaccgaggccaacccctctggattgtgtcatcttttcaccccttcacccccagactgtctaataatacacacatcataccttgtctccgtctctggaggcaagtctctgtaatgcccttccctatctccaaggagaagaccagcagtaagttctgtttttctgtgggagagaaagaatcctagaggcaggtgacccacctggagctggaaagcccactccacgatgcagacagctctctaccttcctgtggtggcccctgggcctggcattcccaggggacctgctggcaggaggaggaacgagggctttataactttggttataacttttggtctttgttctgattctcagtgtatcttcctccgctggttactaaagtgttcactgataagtatgttaactaatgatcgagacagtaacgaaaaatgctggcactgggattctctcccttcccagacctacctgctggtatttcctgggaccttgaccctgccccaccccctcagccgtgcccatctctgcagactcccagatcacatctgggctgatgggctggcccaggcctgtccctcccttcttgcccccagttctgggctccacctctgccctcttctgtgctgtcccattagggaagtcccttggcctgtctatttttcagttcccaattagaagtctagaacctgacaactccaggagttcttgggaggaccagtacaacgttctaaaaagcctgagacgccttacaaaaagcaagtatcatttggagtacaattcctaatctgttcatgtcctgctgaaggagggaaggagggagaggaaggcaggggagttgatgcattcatataacaaacactgctgggtgtctgggtgcccagagcaaagctgggccaggccttcaccagatcaagccccacagaccagctggtgcccatgcgctgctggtggtttggggcctcctgttcctcctctagctgggagtaatcacagttgtctgacctgattccaacttaaggtccccactctcttgccccatcaagaatccctgattatttacttttccctagaaaatctggggaaattcccacattttaattttgcagcagaatcttttgagcagcttttggaaccacagtgtttgccaagataagagtttgagaatccagcagccctgggtgcctggctgaatttggtttcctgcatgtgctgggtgtgggcggggccacgcacaggccctgcatgggaggactcctcaccccaggcctgtggtgctgcagacaaccgtctcctgtctacactgcgacccagccacaagctgtggggtctcagtggcctgggggaaagcagctccactctcctgcccttcctggctgcccctttgggttccagccggggtcacgtccagcctccactgggaaaccagtgactgaggcctggacccagaggtggaccaggcatctcctggccacctgtgacctgggaagaagcgagtcagtggcccgttcaacctgctctgcagctgctataaatagcctccctgtttccaagaggaggtaaggaagtgtttatcttctaaaaaccagacgtttcctgatgctctgagcgttactcagtgctacagaggagatgcacacgtccccactatgttctgtcttgagaaggggacaagagaaagaggaaaaggagccactgtactttattttgcacctacagcgtgccttggcactgggctagagaggcaccttcctgcgtgaatcctgtgcggcaggtcttattgccataataagtcacatcaaagacactgctggtcataaaacactgttttacataccatagggaaaaacgctgccaatcttaactaagatgctacaactgtacagttccttccaatcagagatgttcacgtgtgaaaaaaaaaactgtgctacttacaatctatgaaagctggtgttatcccacttggcaggtaaggaaactgaggtcctgtgagtgaagtgacctcatgatcacacaacaggagatggcagggctgggattcaaacccgggagtgtctgctgccacatcccacactcccactgcctggctccaagtcccaggaagctcgagactgtgagttttctcccttgaaactcacctggagagagtccgggcacctgtgcctatgtggagggttccagccccagccaggcccctccgctgcccacaccctgggaggagaagcggcctcccttccaggctcatctgctcactgcccgcattctcctggcagagctgaggtctgagagatctggactccaacccaagggccctctcttgttattcaggggtgtccacagttaggaagggacctggggccttgtcccaccaccttcctaggccccgtgatcaccaccccctcaagcggggccccagccccctgagcaccccctcacgtgacccagccctcggctgttccaggctcactgcccatggtgtgctcttctgggccacagcagccagggctccagggcgaggacaggggacacctgaaaacaccccgttgttcatggtcttgtgcccattcattcggagactcctgaaaaactgggctgtttgcaaagcaaatccagctccttgtcctagcaggttctcagaacggggagtcccctgggatggagctgctcccctcacggcagcaccacgtttccagtccctcgatgccactaatcagcatggactgtgttcaggacacagggtgaacttttctctgacccccggtgctggtcctgtgccagcacgtagtagttactcagtagaggtttgctgagtaaaccagaaatcagattatgagtgttcaggggtttgataaaacagcaccacataacgcacacaaagatactccagaaacatttgctgagtacctagtacgtgtgaggtgctgtgaggatagagcagagaggactgtgccccagctgtgatgctggcagaggtgacactaagagggaaatgagatatttggggcagaatccactgggctctcttggccatccgctgccttgggtctgttgaggtgggtgcccaaaggctgccttcttgaccagaacctgctgtgcgcttcacagaacctcctcttcattggaaatgctgggcacattgcagtcagtgagctgctgccaaaacggcgttaagtagaacccccagaggccccgccggttggtgatcaccctcaggtcctgccagggagacacagtgaggaggttggctaattgctgctttcaggccctggaaatcagtcgccaaggcccaggagaaccccggtgagtccgtccagttgaggcagaggcaataacctcccattgctcggccctgcgcctgccccagtcctggcagggggcaccggctcaggaacatgcggcctcctggcatttctcggtatttaactgtctcgctgtcttatccgagtccctaatgaaacgacttgtgtgacaatctgtctgtgccttacgaaagtgtctgtgcactttttatcctttttaaaagcaacttttaaaagtggatggggaggggggctagcatacgtggtagggttctagaaatctgtggtcatcgctgaaatcctttttgcatcatgttttttgatgttggagtgatgaagtgtacatcccccaccccacacaccactacctgtgtacagaccttttaaaacatgtcttctttttctgattcaatactgtgacctctccgatacagtctaatccttggggatctgtaatcaaggttttaaaacctgggaagtgggttgggaagggtttgcactggtcttgagtgttgtgcttttctgtgttgtgtgttttgatttttgtctttttatctgttttatattgacataattttcctgtttaaaaaaatacaactttggcttgtt

SEQ ID NO: 1423 - DNA, 2552 bp, Homo sapiens
tttttttgcttgtagctccagccagagctcggttagggcctcatcgctctgctcccgctccttagggaagcctcggtgattctgccacagcctcagcctctgtggctctgtgacctgccggtattggatgattcgtatctaagactctgggacactcctgaagtcgggaaatggtgagtgtgcagggcagggcgtcccaaggctgtggaggcctcatcggaaccggcgggaaatggcggcggtgggaggagtctgtgaatggagttcccgctcagccctctgtcctcagtcccctccggtgagggacccgcgctcttgtcagtccccgtacagcggctctggcccagcctgcagccctccttgtgcagctctgcgccggtagccctgcactttccccgggctgtggagtgagtaggagctcatccggaagacaccgcggcggcctgcgcggtgccggcgtgggaggagctgtggtccggaatcccgtccctactttaccctgttcagaatgagattgaggccccatcaaaacatggagttcatgtgagcaaacaggacttattaatgggaaagctctgccgtggctcgtggtttggggactgccagcgggtcttgaaggaaaggcttttgtgaggtgtgtgaggaagcgaagcaaatcacctgcctgcgccaactttgccgccagtccccttgccctgtgcgcctcctccgcgtggctgttcctgaatacgctggtgtctgttcgcatcttttagaatacgctggtgtcggtgcgcacagcgcttctcttagttctacggagtcttcgctgtgtcgccaggctggagtgcagtggtgcgatctcggctcaccgcattctccacctcccaggttcaagcgattcacctgctcagcctcctgagtagttgggattacaggcgcgccaccacactcagctaatttttttgtatttttagtagagacggggtttcgccatgttggccaggatggtctccatcttctgacctcatgatccaccggcctcggcctcccaaagtgctgggattataggcgtgagccaccgtgcctggctgaagctgtgtgttctcatttcacccaaaacctttggacagtgcagggcatagaagattcattccacaaacttataccaaaaggacatgagaaacgtggacatgagaatttaagaaaaacttgtaaaagtataaatgagtgtaaggtgcagaaaggtggttataatagaattaaccaatgcttattaactacccagaaaaaaacaattcaatctaatatatgtgtcaaagtttttcataaattttcaaattcaaacaaagataagataagatatactggagataaaacctttaaatgtaaagaatgtggcaaatcatttcacgtgctctcacgcctaactcaacacaaaagaattcatactggagagaacccctacacatgtgaagaatgtggcaaagcctttaattggtcctcaattcttactaaacataagagaattcatgccagagagaaattctacaagtgtgaagaatgtggtaaaggctttactcggtcctcacaccttactaaacataagagaattcatactggagagaaaccctacatatgtgaaaaatgtggtaaagcttttaaccaatcctcaacccttaatttacataagagaattcattctgcacaaaaatactacaaatgtgaagaatgtggtaaagcctttaagtggtcctcatcccttaatgaacataagagaattcatgctggagagaaacccttctcatgcgaagaatgtggcaatgtctttaccacatcctcagactttgctaaacataagagaattcatacaggagagaaaccctacaaatgtgaagaatgtggaaaatcctttaataggtccacaactcttacgacacataagagaatccatactggagagaaaccctacacatgtgaagaatgtggaaaagcctttaattggtcctcaacccttaatgtacacaagagaattcactctggaaaaaatccctacaaatgtgaagattgtggcaaagcctttaaagtgtttgcaaacctgcataatcataagaaaattcatactggagagaaaccctacatatgtaaacaatgtggcaaagcctttaaacagtcctcacacttgaataaacataagaaaattcacactgtagataaaccctacaaatgtaaagaatgcgggaaagcttttaagcagtactccaaccttcctcaacataagagaactcatactggaggaaaattttagaaatgtgaagaatgtgggagcctttaagtcttcctcagtcttttctaatcataattcatactggagagaaactctacacatgaaaaaattgacaaagcttttaaccgcaactcaatctgttctaaacataagagaaatggtattggtgagaagccataaaaatatgaaaaatgtggaaaagccttcaaatgcttgtcacatcttactgaatataattcttactgcagaaaacccctaggaatattaaaagtgtggcaaaaccttt

SEQ ID NO: 1424 - DNA, 1943 bp, Homo sapiens
tttttatatttttagtagagacagggtttcaccatgttggtcaggctggtctcaaactcctgacttcgtgatctgcccaccttggcctcccaaagtgctgggattacaggcgtgagccaccgcacccggtcagctattttctacatgcttcatttgcagtgtaatattggattgtatgagactttgggttttgtgttaatacctacggaaaatgttgatattttctcttagcaggctgtcaaccaggttaggttcaggtcataagtttctacccacattctttgaactgtagttgtcattttagtttatttttcaaaaacttttgcagtacctttttggtctgtctcgtgtgtgccttgcagtgaacagtctggatttggacagtggtctgtctgttagttcagtttctcaagcctttgtcacactaataggattggatttatgtatgtccagcttgggaattattacaggaattaaaaacaactttttagagtgctttcctgagctctctttctatttgttcccccttctactttttgcttccctgtggctgctgtttctatcctccagccagagagctagtgtttattttctccattgtgttacacacttgtgcagctgcaaccaccatatccagggcccaatggtaggaggtagagaagaaaagcaaaagggattggcctcatcctcttacaacgatagttccattgaatagagagaaaggttttcctgcctcagagtgttggctgcactaggcttttgttactgtagtctggccctgttaccatgggattgcttgcatgtggggatacaggagaattcagaaaagaaaaaaagatttgctatttctacattctccctgagcattaagacttcccttgcccattcctcaattcaaagctaaggcttcttctggagctgcctctgtgggcggttcgggagataccaaaggagaaaaagtaccactgttgatatggtggtatttcaaattctggtctaccctatttcacatgccttgtttacttttcagagctgacagattgctgctccatgcattctgtccagtttcctaagagagacagcttggagtatgcttaatccatcttacctgggactgaaacagctgcttattttgccgttaaaaattacatgcagtttactgcgtggctccgggtttgtttgtttgtttttcctctttaataggtttattcagaaaacatgtccactgcaattagggaggtaggagtttggagacagaccagaacacttctactgaagaattacttaattaaatgcagaaccaaaaagagtagtgttcaggaaattctttttccactattttttttattttggttaatattaattagcatgatgcatccaaataagaaatatgaagaagtgcctaatatagaactcaatcctatggacaagtttactctttctaatctaattcttggatatactccagtgactaatattacaagcagcatcatgcagaaagtgtctactgatcatctacctgatgtcataattactgaagaatatacaaatgaaaaagaaatgttaacatccagtctctctaagccgagcaactttgtaggtgtggttttcaaagactccatgtcctatgaacttcgtttttttcctgatatgattccagtatcttctatttatatggattcaagagctggctgttcaaaatcatgtgaggctgctcagtactggtcctcaggtttcacagttttacaagcatccatagatgctgccattatacagttgaagaccaatgtttctctttggaaggagctggagtcaactaaagctgttattatgggagaaactgctgttgtagaaatagatacctttccccgaggagtaattttaatatacctagttatagcattttcaccttttggatactttttggcaattcatatcgtagc

SEQ ID NO: 1425 - DNA, 2470 bp, Homo sapiens
atctacagagtggagaccagcaactgacccgacatgtgttgctgtgtttacttctcatcattggcctgttcgctaatctttccagttgtttatggtggctattcaaccaagagcctggaagactttatgttgagttacagtttttctgtgccgtgtttaactttggtcagggatttatttcctttggaatctttggattagataaacatttaatcatcctgcctttcaaaagaagacttgaattcctatggaacaataaagacacagcagaaaacagggattctcctgtttcagaggaaataaaaatgacctgtcaacaatttatccattatcaccgtgacctctgtatccgaaacattgtcaaagaaagaaggtgtggtgcaaagacttctgctggaactttctgtggctgtgacctggtgagctggctaattgaagtcggccttgcctccgaccgtggtgaagctgtgatatacggagacaggctggtacaagggggagtcatccaacatattaccaatgagtatgaattccgggatgagtacttgttttacagatttcttcaaaagagtcctgaacagagtcctcctgctattaatgcaaacactctccaacaggaaagatataaagaaattgagcattcatccccaccctcacattcccctaagacctaaattatgcaggggagaaccctacatggaatcatattctagccgcgtattcattagtttttagctgggtgaccttgggcaagttaacagaggcaacctctctgagcctcagttgtctcttctgtaaaatgtgaaaagatgtgctcccaccacatgcgcagggtctgtgattttacatgtatgtaaaacacataggaagctgacttaggaaaaagagaaaaccaaattaaagttctgataatgaatataatatagtcatcctttagtatccaaggggattggttccaggactcctgaagatcccaaaatctgaggatactcaagtcccttatataaaatggtgtaggccgggcatggtggctcacgcctgtaatcccagtactttgggaggccgagtcaggtggatcacctgaggtcaggagttcaagaccagcctggccaacatggcgaaaccccgtctctactataaaatacaaaaaattagttgggtgtggtggcgggtgcctgtaatcccagctactcaggaggctgaggcaggagaatcgcttgaatctgggaggcagaggttgctgtgagccgagatcgtgccactgcactccagcctgagcaacagagcaagactctatctcaaaaataaaataaaataaaataaaataaaataattaataaaatggtgtagtatttgcatataacctatgcacattctcccatatagtttaatcatctttagatacttataatgcctaatacaatgtaaatgctatgtaaatagttgttgttatactgtattgtttagggaataacaataataaaaaacagtctgtacatgttcactacagatgcaaccattgttaagcctgactacatctttttatctgcagttgattgaatctatggatgtggaacctgtgcatatggagggtcaactgtactataaataatacgaatatgccaacattatataatcattgctttctgcaactgtttactataatttcaaaattaatatcctattaactgttcctataaattatcaaatttggcaagtgtattactagcaggagatggaccttaaattatgacaactttatattttttgatagcatctcttgaaaaagaattttaatgattctaataagaggttctttttcttttttccatttccttgacaaatagtactcatttaaaaactagagggctaggcttagtggctcacgcctgtaatctcagcactttgggaggctgaggcgggcagatcgcttgaggtcaggagttcaagaccagcccgggcaacgtggtgaaacccggtctgtactaaaaaaaaaaaagaaaaagaaaaagaaaaaagaatacccaggtgtggtagtgcatgcctgtagtcccagctacttcggagactgaggtgggagtaccccttgagcctgggaggcgcaggttgcagtgaaccaagatcacatcactgcacttcaacctgggtgacagagcaagaccctgtctcaaaaacaaaaaacaagcaaaaaaaacctagaggcaatatttttttttaaagtttgtcttttcttttctacccaaattactaatctatgccattaaggaaaggaataagaacctccatatgtattattatctccacagtcctgcagaagtacaatctgatctttaactttcatgctacaaataataatttgagtagattaatttgaattttatcaacaaaattattgccatatgatgtatcatttctgtgtttgaacaaagcatcgtaatgcaggataacttctactttattccctgtagtt

SEQ ID NO: 1426 - DNA, 1945 bp, Homo sapiens
gctctccgaaccaaaaggcgacctcacgaaatgcccctttgagctcaaaggctagttacccccaggggcccttccactctcggggacaggcgaaacctctttgtctctgcctcggcctgcggcccccagcccagcctccgcgctttccctccgccagtccttgtcaatcaaacctggtgccaaacgcggcagctgaagttttcagggacacatttgcttctccccttgaagaaccagttacaaagcgtgatgtcctctctggggtcccatcagaacaaagaaacaggtctaaagaccctcattccagagagcatcctgccccatatccagaatgaaatccatgctcagagatgccaagaagaatctagacagacaggcctttctaggatctgtgggaacatctaaagaccctgtaagaaacatagaaaaccctctccctccccctccccctccccctccccctctcccgagccgaagctggactgtactgctgccatctcggctcactgcaacctccctgcctgattctcctgccccagcctgcccagtgcctgcaattgcaggcgcgcgacgccacgcctcactggttttcgtatttttttggtggagacggggtttcgctgtgttggccgggctggtctccagctcctagccacgagtgatccgccagcctcggcctcccggggtgccgggattgcagacggagtctggttcactcagtgctcaatggtgcccaggctggagtgcagtggcgtgatctcggctcgctacaacctccacctcccagccgcctgccttggcctcccaaagtgccgagattgcagcctctgcccggccgccaccccgtctgggaagtgaggagcgtctctgcctggccgcccatcgcctgggacgtgaggagcccctctgcctggctgcccagtctggaaagtgaggagcatctctgcccggccgccatcccatctaggaagtgacgagcgcctcttcccggtcgccatcccatctaggaagtgaggagcgtctctgcccggccgcccatcgtctgagatgtggggagcgcctctgccccgccgccccgcctgggatgtgaggagcgcctctacccggccgcgaccctgtctgggaggtgaggagcgtctctgcccggccgccccgtctgagaagtgaggagaccctccgcctggcaaccgcccgtctgagaagtgaggagcccctccgcccggcagtcaccccgtctgggaagtgaggagcgtctccgcccagcagccaccccgtccgggagggaggtgggggtcagcccccgccaggccagctgccccgtccgggagggaggtgggggggtcagccccccgcccggccagccgccccgtccgggaggtgaggggcgcctctgcccagccgcccctactgggaagtgaggagcccctctgcccggccaccaccccgtctgggaggtgtacccaacagctcattgagaacgggccatgatgacaatggcggttttgtggaatagaaaggggggaaaggtgaggaaaagattgagaaatcggatggttgctgtgtctgcgtagaaagaggtagacatgggagacttttcattttgttctgtactaagaaaaattcttatcctgttgatctgtgaccttacccccaaccctgtgctctctgaatcatgtgctgtgtccactcagggttaaatggattaagggcggtgcaagatgtgctttgttaaacagatgcttgaaggcagcatgctcgttaagagtcatcaccactccctaatctcaagtacccagggacacaaacactgcggaaggccgcagggtcctctgcctaggaaaaccagagacctttgttcacttgtttatctgctgaccttccctccactattgtcctatgaccctgccaaatccccctctgcgagaaacacccaagaataatcaat

SEQ ID NO: 1427 - DNA, 2238 bp, Homo sapiens
agtgcttcaagaagaggatgatgaaatgtgcttgctcctcagctctgctgtttttggtgtaaagtataatttgctagctcacactaccctaaccttggaaagtgctgaggatagtttcaagacccataatctgtctattaatggaaatgaggagtcttcattttggcttcccctgtatggcaacatgtgctgccgactagttgcccagccagcttgtatggctgaggatgcatttgcaggatttcttaatcagcagcaaatggtagaaggtctgattagttggagaaggttgtattgtgttttgcgaggaggtaaactctattgtttttacagtccagaggaaattgaagctaaagtggaaccagctttggtagtacccattaacaagtcattagttttatttgaagacagtctcgaaggaattcaactcgccatatctcagtcctttaaggaaaccagaatccgggcaatggataaggatgccaagaaaagaatccataatttctctgtcatcaatcctgttcctggacaagctataactcagatttttgcagttgacaatagagaagatcttcagaagtggatggaagccttctggcagcatttctttgatcttagccaatggaagcactgttgtgaagaacttatgaaaattgagattatgtcaccacggaaaccacctttgttcttgacaaaagaggcaacctcagtctaccatgatatgagcattgattcacctatgaaacttgaaagtttaacggatataatacaaaaaaaaattgaagagacaaatgggcagttccttattggtcagcgtgaagaatccttaccacctccttgggccacactctttgatggtaaccatcaaatggtcatccagaaaaagaataatagtaatcaactacataatctccagaaactgccagcaacttccaaattcctcttcacatagcttctcaaatacttcattagaaccagtgtgaaaaatttaaaatacaatgtgacatttctctagtagaatgtaagcttcatgagggaaaagacaacgcgtctccttcctgtattcctagcacccagtacggcacctgacacataatagtgaccttagaagaatatttaagagtcattgagtaaacattttgtagagctgtccatgtttattttccattcagtgtttaccaggtgtctgctatttggacagtcacttcattgttcattagtacatgactttggtaaatatatctcctgtgaagagaaatattataactactatggcattcaacactggtatttcagttactcaactaatccacccactgatggagtgaaccttgaattaaatgctttgaagaataaagtgaatcttgataaaaatcaaaggctgaagaaatcttgtttggcagaaggcatgaacaaaaatgctaaaattaatactgtttgtggagaaacactcattccaccgcagactaaatggagttcatgagtatcaaaatgcctatgtgatcaaaaggcagaaacagcttctttttactaggtctgttaatattccaggactcataatattgtgcctacatgagcacctgtgtttgtggtaactcaaagtatttgaacaccttatctcatccaacctcaaatttcctgtgaggtatttaagcaccgagagctcttggtactgttttcaagatgaagcagatgaattagagaggctgttcacacaccaaatttcacagaagcctatggaggaaatgacggggagacttaccagttaacacccagttgcagaaatcaatgtcagagcttgaaaggaccttataaacccctgatccaatgtggactttcctagtaagacttctgtttgcagtgacttggttcatttcaccaaccacaagaattttaagtaatttttaatcataaaagtaacatagaacatagtaatacatatatacgtacatacatgatacagaaaggtatcaaaaaacaaaaacatatattacttcctcctctaacattccagtgccagtttccaaagattcctattacccagaggtaccactgttaataatttttaatgtatatttccaaaaattttttatgcatttagaaatgtgtgcatgtgggtgatgggtgcaccaaaatctcagaaatcaccactaaagaacttactcatgtaaccaaacaccatgtggtcccccaaaaacctattgaaataaataaataataacataataaagacttaat

SEQ ID NO: 1428 - DNA, 2359 bp, Homo sapiens
agaacggcttccggcgggagctgtgcagctccttatcatggggacaattcatctctttcgaaaaccacaaagatccttttttggcaagttgttacgggaatttagacttgtagcagctgaccgaaggtcctggaagatactgctctttggtgtaataaacttgatatgtactggcttcctgcttatgtggtgcagttctactaatagtatagtttaatgacatgtttaataagttactgggtaacattgaggaaacctagccctgtctattcatttgggtttgaaagattagaagtcctggctgtatttgcctccacagtcttggcacagttgggagctctctttatattaaaagaaagtgcagaacgctttttggaacagcccgagatacacacgggaagattattagttggtacttttgtggctctttgtttcaacctgttcacgatgctttctattcggaataaaccttttgcttatgtctcagaagataatttaagtattttcttcttaaagctgctagtacgagctggcttcaagagcatgttgcagatcttagtcgaagcttgtgtggaattattccgggacttagcagtatcttccttccccgaatgaatccatttgttttgattgatcttgctggagcatttgctctttgtattacatatatgctcattgaaattaataattattttgccgtagacactgcctctgctatagctattgccttgatgacatttggcactatgtatcccatgagtgtgtacagtgggaaagtcttactccagacaacaccaccccatgttattggtcagttggacaaactcatcagagaggtatctaccttagatggagttttagaagtccgaaatgaacatttttggaccctaggttttggctcattggctggatcagtgcatgtaagaattcggcgagatgccaatgaacaaatggttcttgctcatgtgaccaacaggctgtacactctagtgtctactctaactgttcaaattttcaaggatgactggattaggcctgccttattgtctgggcctgttgcagccaatgtcctaaacttttcagatcatcacgtaatcccaatgcctcttttaaagggtactgatgatttgaacccagttacatcaactccagctaaacctagtagtccacctccagaattttcatttaacactcctgggaaaaatgtgaacccagttattcttctaaacacacaaacaaggccttatggttttggtctcaatcatggacacacaccttacagcagcatgcttaatcaaggacttggagttccaggaattggagcaactcaaggattgaggactggttttacaaatataccaagtagatatggaactaataatagaattggacaaccaagaccatgatagactctaacttatttttataaggaatattgactccttggcttccaatttatttagtaatccaactttgcattgactgtttaatcatttactctaaatgttagataatagtagtcttgttcacatttcatgaaacctatgaaactatatttttgtaaaatgtatttgtgacagtgaaatcctcgtaaatgttaaaggctttaaataggcttcctttagaaaatgtgtttctttaaatttggattttggtatctttggttttgtagttgactgcagtgtgatgtgaccttacctttataagagccacttgatggagtagatctgtcacattactaagatacgatatttctttttttttccgagacggagtcttgctctgccactgtgcccggccaatacattattattaacttaaggctgtactttattaaggcttccttagtttttgttttgttttgttttttgagatggagtctcactctgtcgcccaggctggaatgcagtggcatgatctcagctcactgcaacctctgcctcctgagttcaaatgattctcctgcctcagcctcccgagtagctgggattacaggcacctgccaccacgcccagctaatttttgtatttttagtaaagacgggggatttcaccatgttggccaggctggtcttgaactcctgacctcatgatccacccaccttagcctcccaaagtgctgggattaggtgtgagccaccgcacctggccgatattttctttaatgaaatttataaatatgcttcttgaataatacacattttgggaaagggaaaaatgtctgttcaaaaagtaaaagtctcttttatagcttttccaaacttaattgctaaatttttctttgaggttctcctgaattatgtcttacaaactaaaagcaaaaatttttagcagaaattttggaatacattctatctagc

SEQ ID NO: 1429 - DNA, 2307 bp, Homo sapiens
catgtttctgagggattacagcctgggaggattccaccgatcttcacttctagcaggttttttaaacgtgacccttggctgtatttcccatcttcacagttcaagcaccccaaacctgccctttctcccctgcagactggcaggtgggattggctcccaggtcatttcctctctctctctttctcccaagcctttctccctccacaggaaacagatttttcagggccttccatgcctgccactttgtccgtctctttttttttttttaaagtaatattttttagaaatacatgtaaaataccaagaaataatgtctgcgcctctgccacctctctctcatctcttatttcataaagctggctctttatgttgctttacatgccttaatatatgttttatggagattatacatattatagatctatatatgtaatatatttgtttggatgtctgatcttttcctacagttcctgcccaggcctgtttttctctcccttattttccacatcattcctagcatatcaagaccataccccttgcctttttgatccaaagaaggggagaggaaagacttattttaagacatctattttatgcttttgtttaaaaaaagcaaatctattttcaaattgtgcaatgtctgaatggaattggcaaatgaggtgaggagatggggtaactgcctttaggtcccaaccctgtgcctgtccctctgccacagtggcttccttccatcctattccccagtcacgaaagggctggtccccagagctcacccagaaagcatcttgccgggggcagggcattccctcggaagtcctggcctaaggattttattacactgtctgctcctgatgaccctctgcggttgtcaggcgtgaatcctctggaaggaactgtttgcagttgtatgcacaaaggagacccatgcaggcatgcaccccagatgggctgctagactacccctcttcatcagcctgctggaaagagcagacagcgtaacagcagcctatgccaaacagcactaaggatgtcagtgtacgagacggtgcgaagcccagaggaggcggcttgggatcctctgggccatccctggccctgtagcacagacacatacaagttccttggacttgtcacactccttttcacttgatccctctctggcctgggtcacatttatgacatcccccctctgtaacctttctctctgggggctgtaccaaaggcatggtacctcagtctggtatccagactgtgaaatcagcctctgggccaaggagggtcctacagacaaggtggcatctcaacctcacccaagaaacccccgggactttaccccagcaggctgccactggggcaccgaactaagccagctcagccttccaagctgcttagcctttgtcaaccatcaaagtggggaaagggtctctggccttgcaaggatttgggcaggatggaagtctttgtctaggtctgaaatcaagggcttgggaatctagagcagagctcctggccagcgtttgaagcctggcctcccacctggggcatttactgacaccctgtcgccagcctagaacatcctgctctgaatgaacagagcccagatgggggtccagagctaagtgacccacctggggaagctctgattattcatccagggccttctcaatgagcacattacctccatgatcaataaccaagaggctgcagtcaaatactgctactgtcactttgaagattttctaagggcacaagtggcacacttgctctccggcctttgggagaggcatgttcttgggcagggctggctacggcaagagggaaccaattcctttcccctttaggcaccctctacctggcagctcttaaaactaagaaaaaatatgatatacacacacattatatatatatatatatatacacacacacacacacacacacgtatatctatttatgcacatattggggccaatttgatttgctagtattagacaataaactgtacaaggaaatttattatctcagtgtctttatttagcataaaagtggccttagaagaagggtgaaggttagatagatggaatctctgtcaggggacaaacagctgtagcatccccttagcatctttctagccaatgagccccctccccaggaggagggatggcctgactgaaacaggtgagagtttgcttccccctttcagcagcattctttttagatttaggtactgaagaatcccagtgagttctgcattttatcttgcaagtttgtataaacccaatacaggaaataaaatgaatggtttgt

SEQ ID NO: 1430 - DNA, 2365 bp, Homo sapiens
ggtgtcagagagcccagttaaacataactgtgtagaggtattggactcagtttattctagtgggcctaaccaccgagaccatccttaaacatcagtagactgggagctgtacatggatgggagcagcttcaccaacccctgcaaagtgactctgaagaagacgacaagccctgctccagtcacacccggaagctgactggtccacgcacagctgaagcatgaggaaactcatcgcgggactaattttccttaaaatttagacttgcacagtaaggacttcaactgaccttcctcagactgagaactgtttccagtatatacatcaagtcactgaggtaggacaaaagattgctacattcctattattttatggttattataagtgtaccaggactctaaaagaaacttgtttgtataatgctattctatccaaggtatgtagcccaggaaataaccaacttgatgcgtgttatgacccattttaagcctcccatgatcacagtttttaaaatacaattaaggactggtccttttctaggtgacacaagaaaggtaatagctagaacagaagaaagaggggtccccaaaaatgtaaccttaaaatttgacacttgtgccactattgatagtaagcagcatggatgaggatgtggttctctaaattggaaaaaaaagttacacagtaaaaaaaaataagtatatctgtcaagaatcatatttatgtgagatgtgtcaatactggtcttgcgttatttcggctacttgaaaataagttaaaaaagatagtgtttggttccaaaaaggaaaagtcagcctctcctgcatgagtgggagctgcaaccttttagaattgataatcacaaacccctcagacccaaagtggaataaagaaaaatatgtaacattaggcattgatggaaaaggactagatcctagtgtaagcatcctaataaaaggagaggttcaaaaacgttctccagaaccagtatttcagactttctatgatgaactaaatgtgccagtacctgagattccaggaaaaactaaaaatttgtttttgcaattagccaaacatgtagcccagtctctacaagtcgcctatgtcatgtttgtggaggaaccgtaacaggagatcaatggccatgggaagcccgagaattggttcctatagacccggttcctgatgaattcccaggccaaaagaaccaccctgacaaattttgggttctgaaagtcttattattggacagtattgcatagctagagaaggaaaaggatttactcatcctgtagggcagcttagttgtcttgggcaaaagctgtataatggtaccacaaaaacagttacatggtggagttccaattacacagaaaaaaatccattcagtaaatttccaaagttgcagactgtttgggcccacccagaattgcactgggactggacggcccccactgggttatactggatatgtggacacagagcttatgctaagctgcctgatcagtggacaggtagctgtgtaattgtcaccattaagccatctttcttcttagtgcccataaaaacaggtaaacttctgggcttcccagtctgtgcttcctgtgaaaaatgaagcatagccataggtgattggaaagacgatgaatggccccctgaaaaaatcttacaatactatggacctgccacttgggcacaagatgtctcatggggatatcgaacccccatctacatgctcaaccgaatcatatggttacaagcagttttagaaattattactaataaaaccactcaagccttgactgttcttgcctggcaagagactctgatgagaaatgctatctatcaaaatagactagctcttgattacttgctagcagctgaaggaggagtttgtgaaaaatttgaccttactaattattgtctacacatagatgatcaggggcaagtagttgaggatatagttaaagatataacaaaactggcacatgcacctgtgcaagtgtggcacggactcaatctgggagccatgtttggaaattggttcccagcaataggtggatttaaaactcttataataagagtaataatagtaataggaacctgcttactgctcccttgtctgatacctgtatttctccaaatgataaaaaacttcgtcgcttaaccttagttcaccaaaatgcttcagcacaagcatactatataaatcactatcaatctattgcacgaaaatacataagtagcaaaaataagagtgagaactcccactgataaaaagtgagagtctcaaagaggggaaatgagggaagagagagaccctctcatattgttttatattgttttacactcagtacctcttttaag

SEQ ID NO: 1431 - DNA, 2439 bp, Homo sapiens
tctgagcctctggaggcaggagctggcaaagaaggaaagaaagatgacaagccgactctgggtgcaggggcccctgactgtagtgaggtgggggaaggacatgctcaggtgggccttggggccttgcagcttgtgcctgatgataacagggggaaggagggcaatgatgatcaggatgactggagcacgcaggagattgaggcctgcctccaggacttcgataacatgacctgggagatcgagtgcacttcagaaatgctgaagaagctgtctagtaaggtaatgaccaaggtcatcaagaagaaaatcatccttgccattcagcagctgggaaatggcgagtggacccagggcctgcagaagcgactgaagcacctgaaaggaagcatccagctcttcgaagctaagctggacaaaggagcccggatgctctgggagctcgccattgacttctcccctcgatgcagtgagaaccctgagaagatcattgccacggagcagaacacgtgtgcaatggagaaatcagggcggatctacacggaaatcatccggatttgggacatcgtcttagatcactgcaaactggctgattccatcaaggccatctgcaatgcctacaaccggggcttgtcctgtgtcctgcggaagaagctgaaaggtatcaataaaggccaagtgtcagctaacatgaaaattcaaaagcgtatacctcgctgctatgtggaggacacagaggccgagaagggcagggagcatgtcaatcctgagtactttcccccagccagtgcagtggagacagaatataacatcatgaagttccacagcttcagcaccaacatggcctttaacatcctcaatgacacgacagccacagtggagtaccccttccgggtgggtgagcttgagtacgcggtgatcgacctcaatcccaggccactggagcccatcatccttattgggcgaagtggcactgggaagacaacctgctgcttgtacagattgtggaagaaattccacgtttactgggaaaaagctgagcaggcaggaagcccattgctggccaaacaggtctggctgaagagaaggttggaagtggaacccggaaaagagagtccaggtggggaggaagagggggaggaagaggacgaggaagaggaagattctattgaagtggaaacagtagaaagcatagatgagcaggagtatgaagcctgcgcaggaggagccggtgtggagccagctggggacggccaagctgcagaagtatgtgcaccagaacatccccaccagctggagcatttacatcagatctttgtgaccaagaaccatgtgctgtgccaggaggtacaaaggaatttcattgagctttccaagtccaccaaggccactagtcattacaaaccactggaccccaacattcacaaactccaggacctgagggacgagaactttcctctgtttgtcacttccaagcagctgcttcttctgcttgatgcttctctgcccaaaccattttttctgagaaacgaagatggaagcttgaaaagaaccatcataggatggtctgcacaggaagagtcaaccattcctagttggcaagaggatgaagaggaggctgaggtggatggggactacagtgaggaggataaagctgtagaaatgcgtacgggtgacagtgacccccgggtgtacgtgacgtttgaggtgttcaaaaatgaagtatggcccaaaatgaccaaagggaggactgcctacaaccctgcactgatttggaaagaaataaaatcttttctaaagggttcttttgaggccctcagctgtccccatgggagactcactgaagaagtatataagaaattagggaggaaacggtgccccaatttcaaggaagaccggagtgagatctacagcctcttcagtctgtatcagcaaatcaggtcccagaaaggttattttgatgaagaggatgttctgtacaacatatcccggaggctgtcgaagctcagggtgctcccatggtccatccacgagctctatggtgatgagattcaagactttacccaggccgagctggcgctgctgatgaaatgcatcaatgaccccaactctatgttcctcacgggggacacggcccagagcatcatgaagggcgtggccttccgcttcagcgatctgcgctctctgttccattatgccagcagaaacaccatagacaagcagtgtgctgtccggaagcccaagaagatccaccagctgtaccagaattacaggtcccactcaggaatcctcaatctggcatctggagtggtggatttacttcagttctatttcccagaatcttttgatcgccttccaagggattctggcctctttgatggtcctaagccaactgttctggagtcttgtagtgtaagcgacttggcaattttgctacgaggg

SEQ ID NO: 1432 - DNA, 2594 bp, Homo sapiens
agcagcttttgctcatcgggggactctgttattgggcagctcttcagctgtgagatggagaactgcagcctctgccgctgtggcagtgagaccgtgcgagcctcatccactctgcttttcacactctcctaccctgatgatgaaactgggaagaactatgactttgctcaggtgctgaagcgaagcatctgcctggaccagaatacacaggcctggtgtgacacctgtgaaaagtaccagcccacgattcagacccgcaacatccgccatctgccagatattcttgtcatcaattgtgaggtgaacagctcaaaagaggctgatttctggagaatgcaggctgaggttgccttcaagatggcagtaaagaaacacggtggggaaatctccaagaacaaggaatttgctttggctgattggaaggaactagggagtccagagggtgtgctcgtgtgtccctccattgaggagttgaagaacgtctggcttcctttctccattcgcatgaagatgaccaaaaacaaagggctggatgtttgcaattggactgatggggatgagatgcaggttgttgaaaaaccgggaagaggaaagggaataagggagagaaggtggggcagaaggtaaaggagggcaggggaaggtgaaacttagcagagggaaaaggaagagaataaggcctagtatttacctgttaggggattttccatagtcactcagttcagtgttggggtcctagatgggctaggatggagataacccaccctggtcccccatcccccatacccccaactccctgtcctctgtccccattcccctcccttccccatccttaaacttagcttagcagcctgggtacccccctcacagtggggcccagccagggcagaggaggagcatggtgtctatgtgtatgacctgatggctactgtggtacacatcctggactcacgcacagggggcagcctggtggctcacatcaaagttggagagacctaccaccagcgcaaggagggcgttactcaccagcagtggtatctgttcaatgactttcttattgaacctattgataagcatgaagctgtgcagtttgacatgaattggaaagtacctgcaatcctttattatgtcaaacggaatctcaattccagatacaacctgaacatcaagaaccctattgaggcaagtgtcttgctggctgaagcctcgctggcacggaagcagcggaaaacacatactacctttattccactgatgctgaatgagatgccacagattggggacctggtgggtctggatgctgagtttgtcacccttaatgaggaggaagcagagttacgcagtgatggtaccaagtctaccattaaaccaagccagatgtcagtagccaggattacctgtgttcggggccagggacccaatgagggtatccccttcattgatgactacatctctacccaggagcaggtggtggattacttgactcaatactcgggtataaagcctggtgacctcgatgccaaaatttcctccaagcacctaacaactctcaagtctacctacttaaagcttcgttttctcattgacattggagtcaagtttgtgggtcatggcctgcagaaggacttccgggtcatcaacctgatggtgcccaaggaccaagtccttgacactgtctacctgttccatatgccccgaaaacgaatgatttccctgcgattccttgcttggtactttctggacctgaagattcaaggggaaacccatgacagtattgaggatgcccgcacagcccttcagctgtaccgaaagtatctggagctaagcaaaaatggcactgagcctgagtctttccacaaggtgctcaagggtctttatgagaagggcagaaagatggactggaaggtgcctgagcctgagggccaaacaagtcccaagaatgcagctgtcttctcctcagtgctggcgctctgactacccttcccaaagaaccacggccctctccctttactgttctatagccccagaactgggagatggcttcctaagttggctataccttgtccacttccagtactggacgtgctcagggtctagggtcacagattcattccttcttcattctttgcaaaacagtggtacagacatggagtctagaattgacccagatggaaagtaattggtattcttaatatcctgggtgactaatatccaggcagagaagctcctggaaccataactgtaagttcctagctggctagggattgaagtcctggacagtgacagaggataccacagtagttcaagacttagcacaagtcaccaactgcttcagggatacctggaggggccagcaagtagagtgttggtggcccaagcaaaccagtgttgccaataccattgccaaaagggcctttggatcctggacaaagcttggctgccggcttcatttattcctgctgatggctgagaagcatctgtcttccatcccacttgcctgtcccaagttttgttccattttttaaaaatttgttgtaaactgcatgttttataaaataaaaataaaatatcgtttgttatttatctcattagag

SEQ ID NO: 1433 - DNA, 2121 bp, Homo sapiens
atgccagccccgtgccctaccgacggccccgcttccttcgcggctccagctccagccccggggcggccgacgcctcgcgccgcccagactcccggcccgtgcgcagccccgcacgaggacgcacgctaccctggaatgcaggctacgccgagattatcaatgcagagaaatctgaattcaatgaggatcaagccgcctgtgggaagctgtgcatccggagatgtgagtttggggctgaagaagagtggctgaccctgtgcccagaggagttcctgacaggccattactgggcactgttcgatgggcacggcggtcctgcagcagccatcttggctgccaacaccctgcactcctgcttgcgccggcagctggaggccgtggtggaaggcttggtggccactcagccccccatgcacctcaatggccgctgcatctgccccagtgaccctcagtttgtggaggaaaagggcatcagggcagaagacttggtgatcggggcattggagagtgcctttcaggaatgtgatgaggtgatcgggcgggagctggaggcctcaggccagatgggcggctgcacagccctggtggctgtgtccctgcagggaaagctgtacatggccaatgctggggatagcagggccatcttggtgcggagagatgagatacggccactgagcttcgagttcaccccagagactgagcggcagcggatccagcagctggtaggtgcccttggcagcatggaggctgtgaagctccaactcctgggtccagggccataagaaggagtatgacctgagcgcagcctccccaccccaggcctttgtctatcctgagcttctggctggtgagttcacccgactggagttccctcggcggctgaagggggatgacttgggacagaaggttttgttcagggatcaccacatgagtggctggctcggttactaggaacactggctgtctcccggggcctgggagaccatcagctcagagtcctggacacaaacatccagctcaagcccttcttgctctctgtgccacaggtgactgtgctggatgtggaccagctggagctacaggaggatgatgtggttgtcatggcaactgatggactctgggatgtactgtccaacgagcaggtggcatggctggtgcggagcttcctccctgggaaccaagaggacccacacaggttctcaaagctggcccagatgctgatacacagcacacagggaaaggaagacagtctcacagaggaagggcaggtgtcctacgatgacgtctctgtgttcgtgattcccttgcacagtcagggccaagagagcagtgaccactgaggattcagacactgtatcccagaactgctctagtgcccgggtgtggtctgggcatccctccagtgtgaccaagagcaaatcctgcctgccctatccctagccaccgcccagtgctctcactatccacctcaacacacatccatctcaagaggaacatttataccaggcagtcagagctggaagtgtatggagagcccagcccaccaggtcctgccttttgcggtgataaccttctctggcagagtgactttacaacttaactaggaaacccatgtgaggctcctcagacaggatcttgaacagcccaaagtatcattctcagataggggcacccaagctaagggtattagccaaagatgccaggatgggtagctagcccatgtttagatccaggtccccaattcatggttatcagggcatgtgttcaacaacccccaaagtccacgcaggtggcttgtagaaacctttgggcagcctcatgtctgctaaaacagccatcttcaagacagcccctgaaaagagaccagttcaggtcctgccctgctgttctttgctggagatgaggaacaggtgctggggctaaagtttggggtagagcacaagggacaagaggaactcttggagttggctgggtgagagggctctccatttgctacctgtagtagcctgcctcttaactggttgcttctccctagttccagccctgccctggtctgatgccccaacactgcccttgctttgttttccctgtcacctccctattattaaatgttttctacag

SEQ ID NO: 1434 - DNA, 2083 bp, Homo sapiens
ggcttaagccgcgcggagcagcgcaacctgggtcgctccctgcttcgccgccgcctccggaccgagccagcggagtcagtgtcctagagaccctgtaacaccacaaagcggacgaaggagtccatgttggggaacttggcagcggagtgactgggacctgggaacctactgtggggccgcggccggaccgagcgcctcgacctcggtctgagtattgaaattagaccaaacagccttgtcactgatatgaagaaagtttgcctgatctgggtagaaggtcaaaccagtcgtaacattctcttaactcaaagcctaatccagagcgcgtctctaacgctcttcaagccagtgaagtctgagagggataaggaagctgcagaagaaaagtttgaagctagcagaggttggttcatgaagtttaaggaaagaagccatctccataacataaaagtgcaaggcgaagcagcaagtggtgatgcggaagctgcatcaggttatccagaagacctagctaacatcattgatgaaagtggctatactaaacaaaagatttttaatgcagatgagccagccttctattgaaagtagatgccatccaggactttcataagtagagaggagaagtcaatgcctggcttcaaagcttccaaggacaggctgaccgtcttgttaggggctaatgcagctggtgactataaatttataaaccagtgctcactgaccgttctgaaaattccaggactcttaagaattatactgaatctactctgtgctctataaatggaacaacaaagcttggatgacagcacatccgtttacagcatggtttactgaatattttgagctcactgttgagaccaaatgctcagataaaaagattcctttcaacatagtacttacttattgacagtgcacgtagccatccaagaactctgatggaaatacacggagataaatgttgccatgcctgctaacacaacatccatttttcaacccagtgatcaagaagtaattttgactgttaagtcttattctgttagaaatacatttcataaggctacagctgcttcagacagtgatttcttggatggatatgggcaaagtaatggaaaggattcaccattctagatgccataaagaacattcgtaattcatagaaggaggttaaaatatgaacaggattgtgaagaagttgattccaaccctcatggatgacttttagggattcaaaacttgtgtggaggaagtaactattacaggtgtggtataaacagcaggagaactattatagaattagaagtggagcctgaagacatgactgaattgctgcaattttatgataaattttgaatgaagagttgtttcttagggatgaacaaagaatgtggtttcttgagatggaatgtgctcttgctgaagatgtgaacattgttaaaatagtatataaacttagttgataacacagtggcagagtttgagaggattaactccaattttgaaagacattctgctgtggataaaatgctgtcaaatagcatcttgtacacagagaaattttttgtgaaaggagtgtcagtgtggcatacttgaatgttatctcattttaaggaattgccacagccaaccctgcccttcagcaactaccatcctgtgattagtcagcaaccatcaacatcaaagcaagaccctccaccatcaaaaagattatgacttgctgaagccttgctgagatgattgttagcatttttagcaataaggaaacccttttccaaagagaaatgaagaagaaaactgtatgtaccctaaatatgggagataagaagtatgaagacatggaaggtgaagaaaacggagataatactatttccactggtctgttgtacagtgaggctgacagatgcccaatatgtcttaattgtctattagaaaaggaagttggttttccagaaagctgtaatcatgtcttctgtatgacttgtattcttaaatgggcagagacactggcttcatgtcctattgaccgtaaaccttttcaggcagtgtttaaattcagtgcattggaaggttatgttaaggttcaagt

SEQ ID NO: 1435 - DNA, 1941 bp, Homo sapiens
gttttgcgtgggaggcggtcccgggatttcaggggtctaccggctctcttatggcgaatgcaacccgaagagagagtgagctgtatcttcagagttgtctccgtctttccaagaacagaacaaaatgaacaagggtattgtgctcacaaaccagaggtgatcttcaggctggaacaaggagaagaaccatggagactggaggaagaattcccaagccagagctttccaggctcctcttggctatggtggtttcccagactttccttgttttggttgaccttgacagtttggaggaatcctggtgagaagtctggacagctgatcacctgaaagagaggagccaagaaaatcaatctaaacatttgtgggaagttgtattcatcaataatgaaatgctgactaaggaacaaggcccctgaggtgttcatgcactgatcctggaccttggattaaacccttgcagtgctggaagaagaggactctgcactgcctgccacaccaggactggaagatcaatggccttcccttcttccaaactaccttcccatgaggtggggatggtggtcacatctccaacactggcgtgctgtggaagagacatcagcattctctgcaacaaatttggaaacagcctaaagagacgtttctacttcaaagagatgcactgaggaagtgcactggcactgctggggactcacctggggcccagggctgaggcttctcgtgtccttggagctgctgtcctcccgaggagcgtccacactgcagccagctcagcctcaggtgtcctatctggttttgaaaccaaatctaagtgggaaaagaagattcaagttttatccgatttagtctacataattttaagtatctatttgagctcaacaccaagaatcacttccttctctgtcccatctgtggtctccaaaggaaaggtccctgggttaggagacactggctagcatcctaaagccagagctggccgatgggtgtgtgtccactcttccttcacctcttccccaccctacagttgtttttgtctcatgctcacttgctctttctgcctccctctcactctttaggtctcacaaaggctttggtcaaggactgactgactttccttggctctctgtcatctccccataatcaaaggcatttcataacacacaatccatgtgaagggacctctgatcaaaattcacttaaagaggagctcactaattaccagtacttactgctgagcctggaatcattcgtatataccccagagttcattcattccagacacagtactagataaggagactcctatgagccaaaaacctaactctgaatagactgtgactgtcataatcaaaccctgtggctgcctccttcttactggagggcatagaggaatgcagatttttgtttgtttgttttgagacagagtgtcgctgcaatgcccaggctgaagtacaatggtgcggtctcggctcactgcaacctctgcctcccgggttcaagcaattctcctgccttagcctcctgagtagctgggattacaggcatgcaccatcatgccctggctaatttttgtattttgtgtagagacggggtttcaccatgttggccaggctggtcttgaactcctgaccttgggtgatccacctgcctcggcctcctaaagtgctgagattacaggcgtgagccaccatgctcagccaggaatgtgcttttaatcatttcttagtgtttcatgtggggacttgataactcacaataaggattctatcctaaaagacaagcaatacctgttgacctgctcttatgtcccaggcagtttgtaaaactgtttcatctattctctcaatatgtcacttcaaatatgatcaggaaagaagtcttaaacatggctggaaatgtgggggcaacaaatacattagtgaacaccctggcggatcc

SEQ ID NO: 1436 - DNA, 2209 bp, Homo sapiens
aagaaggcccctcggcctcagcagagcgctatcctccactggttacccgggttccccggcttgctaccgggctgctccgtgcatctttccccccaggcgtcaggaactgcgccctcatggcggaggtgaaggtgaaggtgcagccgcctgacgcggatccggtcgaaatagaaaacaggattatagaattatgtcaccagttccctcatggaatcacagaccaagtaattcagaatgaaatgcctcatatagaagcccagcagcgggcagtagccatcaataggttgttgtctatgatgactaacgcattaggactcaactctgccattgtctccaggaagtcactgaacccccccagggtcagttggatctcttaaggagcaatacgggccttttatatagaataaaggactctcagaatgctggtaaaatgaagggatccgataaccaagaaaaactagtatatcaaatcatagaggatgcaggaaataaaggaatatggagcagagatatccgctataaaagtaatttgccattaacagaaatcaacaaaattctgaagaatctggaaagtaaaaagcttatcaaagctgttaagtctgtagcagcctcaaaaaagaaggtgtatatgctctataacctgcagccagaccggtctgtgactggtggagcctggtacagtgaccaggattttgaatctgaatttgtagaggtgctcaaccaacagtgttttaaattcctacagtccaaggcagaaacagcacgagaaagcaaacagaacccaatgatacaaagaaatagttcatttgcctcatcacatgaagtgtggaaatatatctgcgaattgggaatcagtaagagttatccatggaagacattgaaaccatcctgaatacactcatttatgatggaaaagtggagatgacgattattgctgcaaaagaaggcacagttggcagtgtagatggacacatgaaactgtacagggcagtcaatccaatcatccctcccacaggtttggtccgggcaccctgtggactctgcccggtttttgatgactgccacgaaggtggtgagatttcaccatctaactgtatttacatgacagagtggctcgaattttaatagagagctatgaactttattgacattttgcaaatgaagatacttagggagcagataatttaattcatgatggaacacgaaatctccttgaaagcaaacttcacaataatggacgtagacttgctgctatgaaaacatatttttttttatttatgaagactaaatttatattggtaaaatagccagtagaatatgaaagaaataaggttagtagtgaaattcattcttcaataaataaaacactttgaaactccggaggaccacatctttcaagacttctgatgggtcaaggaaaaagatgccaacatacccgtatttaccaagtactatgataatggctagagtataaaaatgttctttttaaagttatttattaagttcttcattggaagttttttttttatatctggttcactaccaccattttctgtttcctactttctcagtggtttcattgaaaagaaattagaaggggttaaaggcaggaatagcaaagagtgcaaacttggggtatgactgggggagagtggaacatgccttttccgcacaatattaattcctttttgtatcagaaatgttcttttaggagattatgctaccatacttacttcaaacccaatgactactgtcaaggacatattttcagtacataaatactatcattttcattctaaagaatattttcactgttccttctttcttaaagtcttatgtttcactctttaactcaaatgtattctttgttagaatttaccctagattcttatttagtgtctgcagtagactgaatgtttgtgtgcccccagaattctaatgttgaaatctcatttccaatgtgatggtatttggaggtggggcttttggtaagtgataggtcaggagagtaacagcgctcatgaatgggattagtgcccttatataaagagacccagagagctccatcaccccttctgccatgtgaaagggagaagacaaacatccacgaaccaggaagtgggtcctcaccagaaaacaaatctgtaagcaccttgatcttggacttcccagcctccagaattgtgagaaataaatttctgttgttgat

SEQ ID NO: 1437 - DNA, 2788 bp, Homo sapiens
acacaaaacccggaaggaccccgccgaaggttttctccggttcgggagagagacggagtcccgctctgtcacgcaggctgccaggctggcgtacagtggcgcaatctcagctcgctgcaacctccacctcctgggttcaagcgattttcttgcctctgcctcctgagtagctgggattactggcacacaccaccatgcacagttgcaggaatttagccaattcagaggtcttgttctccataatttggaattttccttcggatttgatcaagttggatagagttggtcaaacccaatgggaaaaagatgaaaacaacaagaaacagaaacaaacagcaacaacaacaacaacaaaaacagttaagtgaaacaaacaaacaatcacacaatttatgtggtcactgagtgctctaatagtaaggagaaattaagaccagctggctgttagtcttaactctagccaagacaaaactccaattcagctacttacctagtaatgagtctcaggctgaagtctgctctctcccatcctagaagcaggaaaaaactgaaactcatcttccctgctggaaacgagctcaaactccagaaaggagttacctgccttccatcatcatggacgcaggaaaatttgccttccttgttggaagcaagtaaaactccaaaaaaggagttgcacagcaaaataaacttcagatctcaacaaatttggggagatcagggattctctgggggtggggtggctcccaggcctcagccaattgtcctattggtttcagccataaagacagctcaggctgctaccacgcactgataggagatttgtcaaagatcgaggcatcttcactcagaatccctctgtgattaccaattgtgaacacaaaatatctgatatgggtctcagtcaatttagaaagtttattttgccaaggttaaggacacatccatgacatagcctcaggaggttctgttgacgtgtgcaaggtggttggggcacagcttggttttacacattttagggagacatgagatatcaatcaatatatgttaagacatatatcaggtggtccaaaaaggtgggatgactggaaacagggagggggcttccaggtgataggtagataagagaaaaacagttgcattcttttgagtttctaataagcctttcactgaatacacaatttacaggactaatcacttaagccttagcctggctcagtgaaacaacagggcaaaggaagcaatcagctatgcatttgtctcacgtgagcagagggatgactttgagttctgtctagctatcttgtttaggaatataatgagaggcaggtttgcgtgcagtttccagattgacttttccctttggcttagtgactttgaggtcccaagatttattttcctttaacatttacaaggagaagtgaagaaataagtaaattagagagctagaaggatggaagtttacagttagagagagtgggatgttgaaggtaatactggttgcatatttcttatccaaaatgcttgggaccagaagtgtttcagatttcagatgttttcagattttggaatatttgcattatacaggttcagcacccctaatctgaaaacgtgaaatccaaaattctccaatgattgtttcctttgagcatcacaatggtgctcaaaaggttttggattttagagcatttcaaatttcagattttcagattagggataataaacctatatctcagaaacggtacatttctgaataatgacaaattgtcattatttgccatgagaattgtcattaatgtgggtggagatggggatgattgtaggtcaagagactgaagcaatagggtaggcttgggtgttagtacggcccttcatgggaatgtgttgatgtcatccagggtcacgggaggcttctgagtgggaaggaagctgagagcctatgattacggtcttcactgatgaaggcagacagtaggaggttggcagatggtgggcactgactagactggaagtgccaagaacttcagtggagcaaggttttacccaagacacagaggttgtggtctagagcagcccagggatgaaggatcacccattggagaggactgtggggaaagcagagtcctgggagatgaaccaagcatcagttgaggctggaacagttaaaatgtatacatcaaattctctccaaggacactgtacccttggctgaaaattccctccttagtctacttcccatcccaaattctacccatccacactgtggcatcctaggtctctctagcagctgaacaggcaggcctctgtaacaactgtttcagcgctgactgagtggttaagttaaatattaaaagttgaaagagccagtaaccttatacaaaggctggaatagaacaaaagcccaccacaagtttttgcctaagtctttcctgtgccttgaaccatgacaagaggaggaaggaattcttaaccagacccatttaggattaagtaagtttttattggctgggtacggtggctcacacctataatctcagcactttgggaggctgaggcaggcggatcacctgaggtcaggagtttgagaccagcctcctggccggcatggtgaaactctgtctctactaaaagtaccaaaatgagccaagcatggtggcgggagcctgtagtcccaactactcgggaggctggggcaggagaatcgcttgaacccagaaagcggaggttgcagtgacctgggatcacaccactgcacttcagcctgggcaacagagtgagactccatctc

SEQ ID NO: 1438 - DNA, 1975 bp, Homo sapiens
gcatgttgtccatgccaaccagagggtacctaggtctcagggcacggaggcagaactgaatgcccgtctgcaggccctgactctgaccccaccaaatgctgctggcttccagtcctccccttcctccatgcctctcctggacaggagtccagctcatagccccccacggacaccaacccctggagcttctgactgccactgcctgtgggagcaccagacatccattgatagtgacatggccacgctctggctgacagaggatgaggcaagctctacaggtggcagggaacctgtcggcccttgccggcacctgccagtctccactgtgtctgacttggagttgctgaagggactccgagcacttggtgagaatcctcaccccatcacacccttcaccaggcagttgtaccaccagcagctggaagaagcccagattgctcctggcccagagttttcagggcacagcctagaactggctgcagccctgcggacgggctgtattccagatgtccaggcagatgaagacgcgctggcccagcagtttgagcagccagatcctgccaggaggtggcgggagggggtcgtgaagtctagcttcacctatctgctgctggaccccagggagactcaggacctgccagcccgagccttctcactgaccccagctgagcgccttcagactttcatccgtgccatcttctacgtgggcaaagggacgagggcccggccatatgtccacctctgggaggcccttggtcaccatgggcggtcaagaaaacagccccaccaggcctgccccaaggtgcgtcagatcttggacatctgggccagtggttgcggtgttgtgtccctacattgcttccagcacgtggtcgctgtggaggcttatacacgggaggcgtgtattgtggaagccctagggatccagacgctcaccaaccagaagcaagggcactgctatggagtggtggcaggctggccacctgctcgtcgccggcgcttgggggtgcacctgctgcaccgtgccctccttgtcttcctggctgaaggcgagcgacagcttcatccccaggacatccaggcccggggctgagtgctggggagttggccatccagcctggggagaaatgtttgaatgttccagctgccccatgctgacagcagcccccatctctggtttcagaaggggtgtgtgtgtgtgtgtgtgtgtgtgtgtgtgcgtgtgtttgtgtgtgtgtgtgtgtgtgtgtagggagcacccaggcagatctcccccaggctgagagaggactttgttacagatggtactgctggagaggtagtaagtagtgagctccccatcgtgggaggaggacaagaagggaagcagaaggtgctttggaacagtccggtgcttctgtaagaggcgtttgaacctgggcaactccacctggaataggagctgggtaaaatgaggctgaaacctactgggctgcattcccagatggttaaagcattctaagtcacgggatcaggtaggaggtcagcacaagataacgggtcataaagaacctgctgataaaacaggttgcagtaaagaagccggccaaaacccaccaataccaagatggcgacaagagtgacctctggtcgtcctcattgctacactcccaccagcgccatgacagtttacaaatgccatggctggccaggcgcggtggctcacgcctgtaatcctagcattttgggaggccaaggagggcagatcacctaaggtcaggagttcaagaccagcgtggccaacgtggcgaaaccctatctctactaaaaataccaaaattagctgggcatggtggcgcgtgcctgtaatcccagctactaggggggctgaggcaggaggatcgcttgaacccaggaggtggaggttgcagtgagctgagattgtaccattgcactccagcctgggcaacagagcgagagtctgtctcaaacaaac

SEQ ID NO: 1439 - DNA, 2594 bp, Homo sapiens
tggtgcgtcgcggcgtggtcctccggcggctgtccggggcggtaggagttggctgcgggatgtgctcagccggggagctgctgcggggcggcgacggcggggaacgcgacgaggacggggacgcgctggcggagcgggaggcggcagggaccgagtgggatcccggggcgagcccgcggcggcgcggacagcggccgaaggagagcgagcaggatgttgaagactcacagaaccacactggtgagccggttggagatgactacaagaaaatgggaacactttttggtgaactgaacaaaaaccttatcaacatgggcttcacaaggatgtattttggagaacgaatagtggaaccagtaatagtcattttcttttgggttatgctgtggttccttggcctgcaagcccttggactagttgctgttctttgccttgttattatttatgtgcaacagtaaaacatggccgaattgaattgtttgacatttggtagccatatatgtaattgaagaagttatatatttcactttttgacaaccgaaaaagtttgccttgtttcaaatcatgtgctggctgttttgtaagtaaatttatacatggatgtcacttaaaactaaactcttgatcataacagggttgaatatatattttgaatatacattagcttattcaaaactcttgtttcactactgtgatctctgtctcctttatacacctctatccccatgccaaatcttaagtaacaccaccagaaagtgaacagggaaaataacaggacatggaattcaaatcaagcaatatagttcttataaagagttccaataaaacatttcagaagaaaaagtatgaaacaagctaaaagtaagtttcacttagaaaacttctccccactcacactccccaccaaataatctcatattatttgggaaatatttggatttcaattgtccctacccagcctaaactaaggtaaatgataattagcatacactaccttaatattgtgatgaaaatcagtaaagatagaacgttttctaaaggtcgaaaataatatatttattattactggggaaagctcccaggttaaatataacttttttaaaatgtaacatttggacctagacctactttaatatatcatttgaagtttcagacaattttggtgctaattactttttgtgagtttttaaagtctcatagcctagttgactgcaccctatggtaatgccatattttcttgtatctaacaagttgcatattttttcctagagagacattttcagtgtattttttttttagaaatttataattttatagttctttcataacacttattctgagttttgaaacaatgtatttcctatcttgacatggattttttcacaaaaaatttgtattttactgttgttttcaggaaaaaaatcagatcatttttctttgatatctatatcagaaaggtacaatattaacagtataaaaccaaatgcttaaatttggaacttagccaattttgataatctttttctaaggctaaagtcacatcagtaattggctagccatgttattaaggtgtcttaattcagcattttcaggttttatattgaaatacgcatttctttaaatattctttgaaaatggagaatggctttagtgatattttgggttttgttagagaacctaaaatctttacactttcatctcaaagattataaaggaaaggggggtagttaagatttagaattcaagttaaatttcagaaattggggcagtcaggcatttgtatctttggtagggcaacaagtaaaacatgtagagtgcttgctatcccacttcataaagcttttacccaatcttatttctaaacctctgtgcattcttagtgtcttctcattctgaaacagaaaataaggaaaaacatttaacttagttttctaaaatcagataatcctaaacaaaaatgttagtcagggtcactaaaaagtattgcacatttatataaatacagtccttttaaaatttgacttttaaaaaacaaaagactttgtacgatattgtgtttttattgcgtttgcaatatttttatagtagcctttatgaactcagtataagtgcaagttgtttgaaaaggtgtttttattagtgcacaatagaattgtgaggttttcaatagatgtcatgagattttgtatatctacataaaatatcagtacatttttttctaatgctactggaaattttacttttcctttgcaacacataaatgatatgatgtacaaaataacagctctggttccaccagtacctaatgttgaaaacatttttaaagtaatttttaatactaactatttagtatactgtcagtactgtacatctgcacactggtgttaatagggtatatattaaattatataaagaaataagatattttgctgttattctttctacatatattattggtcagtacatcaaataatatttggctttgatatgggaaaaaacaaactttgcctatgtaatggaaataaaatattttcttttatgaaatatattagaatgcagattatactaatatcctgaaataaaactggtaattt

SEQ ID NO: 1440 - DNA, 2778 bp, Homo sapiens
attctttttttgatgagaggcatctctaggtaccatccctgacctggtcctcatgctgccgaggctgttgctgttgatctgtgctccactctgtgaacctgccgagctgtttttgatagccagcccctcccatcccacagaggggagcccagtgaccctgacgtgtaagatgccctttctacagagttcagatgcccagttccagttctgctttttcagagacacccgggccttgggcccaggctggagcagctcccccaagctccagatcgctgccatgtggaaagaagacacagggtcatactggtgcgaggcacagacaatggcgtccaaagtcttgaggagcaggagatcccagataaatgtgcacagggtccctgtcgctgatgtgagcttggagactcagcccccaggaggacaggtgatggagggagacaggctggtcctcatctgctcagttgctatgggcacaggagacatcaccttcctttggtacaaaggggctgtaggtttaaaccttcagtcaaagacccagcgttcactgacagcagagtatgagattccttcagtgagggagagtgatgctgagcaatattactgtgtagctgaaaatggctatggtcccagccccagtgggctggtgagcatcactgtcagaatcccggtgtctcgcccaatcctcatgctcagggctcccagggcccaggctgcagtggaggatgtgctggagcttcactgtgaggccctgagaggctctcctccgatcctgtactggttttatcacgaggatatcaccctggggagcaggtcggccccctctggaggaggagcctccttcaacctttccctgactgaagaacattctggaaactactcctgtgaggccaacaatggcctgggggcccagcgcagtgaggcggtgacactcaacttcacaggaagacgttcagccagggatccactcaggagccttcccagccctctaccccaagagttcacgtacctcaactcacctaccccagggcagctacagcctatatatgaaaatgaaccaagagaacaatcagtggctgtgcatggcagacaacagcattcctcagagcagaaggctcagaaaccctggggacacatatggaggacaaggtttccttagacatctattccaggctgaggaaagcaaacattacagatgtggactatgaagatgctatgtaaggttatggaagattctgctctttgaaaaccatccatgaccccaagcctcaggcctgatatgttcttcagagatcctggggcattagctttccagtatacctcttctggatgccattctccatggcactattccttcatctactgtgaagtgaagttggcgcagccctgaagaaactacctaggagaactaatagacacaggagtgacagggactttgttatcagaaccagattcctgccggctcctttgaaaacaggtcatattgtgctcttctgtttacaagaggaaacaagatggaataaaagaaattgggatcttgggttggagggacagtgaagcttagagcacatgaactcaaggttagtgactctgcaggacttcacagagagagctgtgcccatcattcagtccaagtgctttctctgcccagacagcacagaactccagccccgccacttacatggatcatcgagtttccacctaaaatatgattctatttattttgagtcactgttaccaaattagaactaaaacaaagttacataaaaagttattgtgactccacttaattttagtgacgtatttttgtatatataggccaacctataccacatccaaaattatgtatctattacagcccctagaagctttataaatacagtgtgtcttcttttattcacaaaatttttgaaatcgtggtaatatggtttgaaacctgtatcttaattattttttttttaaattgagacagggtctcactctgtcactcaatctggaatgcagtggcacaatcttgcctcactgcaacgcctgcctctcaggctcaagcaaacctctcacctcagcctgctgagtagctgggactacaggcacatgccaccaaacttggccattttttgtcttacgtagagacaagatttcaccgttttgcccaggctggtctcaaactcctgggctcaagcaatgtattgaattttaaaataaccaggcactcactcttatgaattaataaacatttggaggtatataaagtaaaaagttaaagtctttcctgtaagttaacacaaatgttaactattgttaaaaactttacaggtagctctctagatatttttctatttttgtatgtatacttatgcatacatgtaagtatataaacatttagaagtgtacctatctaacaaactattatgaaatactttcaaatctgtaaatagatctattatactattttaaaagtctctatagtagtgtgttatatagataaatcataacttttttctttttttattgtagtaaatatgcacaacataaaattgatcattttaaccatttttaagtgtacaattcagtggcattaagtactatcataatatattttaatccttctcatcactggtggacattaaggagactctcaaaaaattcatattataaaaacaaagttcaaacaaatgtctttgtactagcatattatggcactcctgctggattatctgaaggataaatttgtaaatctagtattgctagattatgcatattaaatattcttgttaaatagtc

SEQ ID NO: 1441 - DNA, 2375 bp, Homo sapiens
tgaaatgaagtttcctgcaattgcaaaacctattaataagtcccagttcattaagcaacagagaactcacaacatagagaatgcccatgtatgcagtgaatgtgggaaagccttcctcaagttgtctcagtttattgatcatcagagagttcacactggagaaaaacctcatgtatgcagtatgtgtgggaaagctttctccagaaaatccagactaatggaccatcagagaactcatacagaactgaaacattatgaatgcactgaatgtgacaaaaccttcctcaagaaatcacagctcaatatacatcagaaaactcatatgggagggaaaccttacacatgtagccaatgtgggaaagccttcatcaagaagtgtcggctcatttatcatcaacgaactcatacaggagagaaaccccatggatgcagtgtatgtgggaaggccttctctacaaagttcagtctcactacacatcagaaaactcatacaggagaaaaaccttatatatgtagtgaatgtggaaaaggcttcattgagaagaggcgtcttactgcacatcatcgaactcatactggtgagaaaccctttatatgcaataaatgtgggaaaggcttcaccttgaagaacagtcttatcacacatcagcaaactcatacaggagagaaattatatacatgtagtgaatgtggaaaaggcttttcaatgaagcactgtctcatggtacatcaacgaactcatactggagagaaaccttataaatgcaatgagtgtggaaagggcttcgctttgaagagcccactcatcagacatcagcgaacacatactggagagaaaccctatgtatgcaccgaatgtcgaaaaggtttcaccatgaagagtgacctcattgtacatcagcgaactcatactgcagagaagccatatatatgcaatgattgtggaaaaggcttcactgtgaagagccgccttattgtgcatcagcgaactcatactggagaaaaaccctatgtatgtggtgagtgtggaaaaggctttccagcaaagatccggctaatgggacatcaacgaactcatacaggagagaaaccttatatttgcaatgagtgtggaaaaggcttcactgagaagagtcatctcaatgtacatcggcgcactcatacaggagagaaaccctatgtatgcagtgaatgtggcaaaggcttaactgggaaaagcatgctcattgcacatcagcgaactcatactggggagaaaccttatatatgcaatgaatgtggaaagggcttcaccatgaagagtactctcagtatacatcagcaaactcatactggagagaagccatacaaatgcaatgaatgtgataaaaccttcaggaagaagacatgcctcatacaacatcagcgatttcacacaggaaagacttcctttgcatgtactgaatgtggaaaattctctttgcgcaaaaatgatcttattacacatcagagaattcacacaggagagaaaccgtacaaatgcagtgactgcgggaaagccttcactacaaaatcagggctcaatgttcatcaaagaaaacatacaggagagaggccctatggatgtagtgattgtgggaaagcttttgcgcacttgtctatccttgttaaacacaggagaattcacaggtagtcattttgggaaagcctcttgccagatgtaggcccttaagatatctgcaaagaagagtaatttcatgaatgcagactacatggttgtttatttagtgatcagttacttcatgttttgtgtcagagaaaacatgtacaaaacatttgagaaaatattttaggacattatgtctaaaaattgtatactgagaaaaatcctatgaatgtggcagactataaaagcctttggtgggaagataaaccccctcagaagtgatcatagatcatgaataaactactaattcgtggaaatgtaataattataggaacgtctttgcccaaaaataaaacttcaacagattgagagagttcacactggagaaatactttcctctggcaaacccctgtggcagggttttcagtaaaatgttttgcctcatcgtgtgctaggaaataatgcagaaaaaacttatgaaaacattcaatgtagaagacttttaggaaaatatcagagaatttaatgaaggaaagaagccttggcaaaatgatggatgagagctttctgtcacaattctaaccttaacagataatatgcctcatgtgcatttgggaacaggatagcttgagccatattcctagttgccttgtcactgattttatacattttaaattgtgacttcctctaatcacgaactaaaatttaatattgtatataataccggagt

SEQ ID NO: 1442 - DNA, 3430 bp, Homo sapiens
gactgtggcggcggcggcctcgaggtgacaactgtctccgtcgcaggctccggcgggggcgcaggaggtcgcccggcgcgtcactgtcgggtcggcgagccacgggggccgccgcagcaccatggcgaccaccgtcagcactcagcgcgggccggtgtacatcggtgagctcccgcaggacttcctccgcatcacgcccacacagcagcagcggcaggtccagctggacgcccaggcggcccagcagctgcagtacggaggcgcagtgggcaccgtgggccgactgaacatcacggtggtacagagagccttctccatggacgaccgcattgcctggacccacatcaccatcccagagtccctgaggcagggcaaggtggaggacaagtggtacagcctgagcgggaggcaggggggcgacaaggagggcatgatcaacctcgtcatgtcctacgcgctgcttccagctgccatggtgatgccaccccagcccgtggtcctgatgccaacagtgtaccagcagggcgttggctatgtgcccatcacagggatgcccgctgtctgtagccccggcatggtgcccgtggccctgcccccggccgccgtgaacgcccagccccgctgtagcgaggaggacctgaaagccatccaggacatgttccccaacatggaccaggaggtgatccgctccgtgctggaagcccagcgagggaacaaggatgccgccatcaactccctgctgcagatgggggaggagccatagagcctctgcctcgatgccgttttgcccccgctctttggacacgccgacccggcgctccccaaggaatgctgtcccaacaagattcccgtgaaagagcacccgtgtcgccccctcccgtggacttctgtgccgccccgtccacacctgttcttgggtgcatgtgggttttcggttcctggcggtccaggacggggcgggggctcccctcccatctcgtgctgggaggtctcagcgcgctctcctgtccctgggacgtgcgtctctccttctcatgccgttctggaaaatgctcttgctgtagagagcagctgcttctgccagggtgttggaggtggtggagcgccttccgattccattcatggcattttgtgatgtgatgtaattggaatagagctgttgatttaaggcacacacaatccctcacactgtgggtttttttttagaacttcccagacgaaaactcacgcccttgccctaacgcgctttgctgtgagcctggcccctgcccagggcttgggtctggtgagctgagcagcttcctgtggatggtgtggggccggcctctggcctggctcacctggccactgtccagccagccttgtgacagactccggcctgaaggcagaatgaacccacacctggagtgaggaagggggcctggcacggttggccaggctctgcctgattgccagccagcgggcatctgaagccgggtccttcgcccgccggaggctgccgtccgtctctcctgctgcgctcgtgccagctccgtgggtgtcctcccagggagcttctcttctcaacaggccttgcgaggctggggtgagaggtgatagaggcagcactgtgcatgattccgagagggtgtggtggcactgccagccgactgctgacagcttgggagctgctgtgcccaggacgtgggttcagcgtgggcgaggaaagcctggcgagcgtggccctgtaaaagctttctgaggcgggaggcgctcacttacctctgactgcctgggcgctgcgtgtagcatcttggcctacaggacagattttaggtgacacctggttatgacagtcagaaatttgagaagcttctcacaagtgatgcactttaaataatctgcatgccattgagacacctgcatgtctggtgtttgtggttcaagcgtcttgccgccggccttcggatgtaaacccactgataacggacagaaagagaatgcccacaagtgggtcttctgtggaagatgcagaaggaggaagttagtgcttacattttagtctttttctccctcaaaaaaataggttaagtttcagtgccagctagaaaatactgctttctgccatcgattgggggtggtttttgtcaaatatactgttgataaatatttatttttgtaaacttgaagtgtgtggtggccgtgggggagggacatgctggcagcaggcgccttcttcagctgtgggtcctaaaggcctttgatcctttgaagaagaaagacatggtatttgttcagcagacgccgaccactcagacggaggggcccctgggattccctgtctcagatggcctggtcttacgcctgtgtagatttcttctccattgggaatgaaggtgtcaggtgggactggaacgttctagatggtatgttccgtgatattaacaactctaacccaggacagaccacaagccacactcagaggcctcactgtgctgggggcttcggtgtccaggcgcccaggtgtggccaccagcaccggtttctgccttcgcgttgctggggtgcagtgagactgccacacgcgtgcacatgtggctctgtgggtgtctcctagagaggacgtggcccctgctgccagcccttgagcagcccgtgtgggggcccgagggacccacacagtgggggccagcctcgctggagggagagcaaccctttgccgatgaccacgcttgccgccatctcttagttttctttttcacaagcgctttatttttttaatagacaaatcacattttgcaaggcctttaattaaataagattcttctttccttcattttatgctttatttcctgtttgaaggcttactgtagaagtggcttactgtagaggcagcttgctgagcccctccgagcggtccccagaattagctggttcacaacccccaccctcccccgcccccgcctgtgtcaggtgtggatgaggtcgtcacactcagaaggacaggcttgtctgccagctcacaaggggaggctgcagtgggtttgggagctgggtttaggcccctggtgtctgagggcccaggccttgccagcctctgctgctcctgctcctgggtttgaagatgcaggccgatcgccagctccgtggcagcggtcactaaggacagcctgactgtgccatcttggagcctcaggcggggctccggagatagaagacaggtcgccggaggctccccctcctctcctctcccctctgcagatgctccctgggcgctaccctgcagggtgccaggcaggagtgttctcagaacgtgcgcttctgattattttactggggtccattgtccagatttttctttgattgtaaaatatatttttactttttagtcttctaatttaataaatgatccatataaaaatagagaaataaagtcctttaagggaaggtt

SEQ ID NO: 1443 - DNA, 2889 bp, Homo sapiens
atcgcacagatgtttttaaacatgacaaagctggagaaggaagcccaggtggaggccacaagcaggaaagaaaaggccaagcagaggcccctggccctgaacactgtggagatgctgcgtgtggccagctcttctctgggcatggggccgcagcacgccatgcagacggctgagcggctctacacgcaaggctacatcagctacccacggacagagaccacccactaccctgagaactttgacctgaagggctctctgcggcagcaggccaaccacccctactgggccgacacggtgaagcggttgttagcagaaggtatcaaccgcccgcggaaaggccatgacgccggcgaccatccccccatcacccccatgaagtctgccacagaggccgaattaggatttgcagtgtgtcctgcacagcggctctgtaagcaggagcttgctgctcgagcgagagtactgggggctcctcacggccagagcccccagctggctcccaactgactagccctggcctgttgcagggggtgacgcgtggcggctctatgagtacatcaccagacacttcatcgccacggtcagccatgactgcaagtacctgcagagcaccatctccttcagaattgggcccgagctcttcacctgctccgggaagaccgtcctctcaccaggcttcacggaggtcatgccctggcagagcgtgcccctggaggagagcctgcccacttgccagcggggtgatgccttccctgtgggcgaggtgaagatgctggagaagcagacgaacccacccgactacctgacggaggccgagctcatcacgctcatggagaagcatggcatcggcacggatgccagcatccctgtgcatatcaacaacatctgccagcgcaactatgtcacggtggagagcgggcgccggctcaagcccaccaacctcggcatcgtcctggtgcacggctactataagattgatgcagagctggtgctccccaccatccgcagtgcagtggagaagcagctgaacctgatcgcccagggcaaggccgactaccgccaggtcctgggccacaccctggacgtgttcaagaggaagttccactactttgtcgactccattgctggcatggatgagttgatggaggtgtctttctcgcccctggcggccacaggcaagcccctctcacgctgtgggaagtgccaccgcttcatgaagtacatccaggccaagccaagccgcctgcactgctcccactgcgatgagacctacacgctcccccagaacggcaccatcaagctctacaaggagctccgctgccctctggatgacttcgagctggtcctgtggtcatcaggctctcggggcaagagctacccgctgtgcccctactgctacaaccacccacccttccgagacatgaagaaaggtgagtgcagccactccctcctgtccacaggtagctgcagtctcttttcagtgccaacccctgccttgcaccaggctggactctgaggggacccctcaccctggcctttcctgcactcattggcactgagacgagagaccctggatgtagctggggcactgcttaggcctcagccagtggtgccaccctctctctgtgtcagaatcgagcaggcaaccctagtccaccctcaggacctgggcacaggtgtgcagtgctccctctggagctgagtgagcaagaggatgcagcagtcgggggacccacccggtgagcgggcacccccagtcagcgtccaccaccgtcctccatcctcatcctcgtcctcattactggaggagggagcgcatgtccaggcaggcaggacagagcaccgagccagaccaggaatcagcgggagtgaggcatctgcccacattcaccgtgtgctctgcagaaagctccctcaggcctcagtctgcacccaggctgccccggagtgagaccccatccctgccctcctgctgccgccagagtagctgacagggtggttccatgtggcccagtgacatgagggtcatgtggcattaccagtaacaagctggcagcaaagcaaaggggggatggagtcagctgaaacccactgggatggtgccagcgaggggccttgaaagttgaggaggtttcaggtaagcagaaaacaggggtaatggcagccaggagccgaaacatgagcaaggctgtccccaagagcaaggccaagaagagttccttctgctgggacgagggatccaggagcttgaggcattgggagcaggcagcagagggcaggtgggcacagtgggcgtgcctttacagggctcccttctcccgccaggcatgggctgcaacgagtgtacgcacccctcctgccagcactcgctgagcatgctgggcatcggccagtgcgtggaatgtgagagcggggtgctggtgctggaccccacctcgggccccaagtggaaggtggcctgcaacaagtgcaacgtggtagcgcactgcttcgagaacgcccaccgcgtgcgggtgtccgccgacacctgcagtgtctgtgaggccgccttgcttgatgtggacttcaacaaggccaagtccccactcccgggcgatgagacgcagcacatgggctgcgtcttttgtgaccccgtcttccaggagctggtggagctgaagcatgcggcctcctgccaccccatgcaccgcggtggaccagggagaaggcagggtcgagggcggggccgggccaggaggccccctgggaagcccaaccccagacggcccaaggacaagatgtcagccctggccgcctactttgtatgatgaccctgtcctccctcacccaggctgcagtgccatgcagacacctcatggcacttcaaactattaaaatgcattttatctt

SEQ ID NO: 1444 - DNA, 2100 bp, Homo sapiens
ggggaagcgatcacccggcctcgcagccgccgccgccaaagtttcccggaggagccgcgggccgcccttcctctccggccccgcgctctgccgcccctcaggcccgcaccgccccgaggcgcccggcccggctccattgagctgaccgtcatggacgtgtacgacatcgcgtcgcttgtgggccacgagttcgagcgggtcattgaccagcacggctgcgaggccatcgcgcgcctcatgcccaaggtcgtgcgcgtcctggagatcctggaggtgctggtcagccgccaccacgtcgcgcccgagctggacgagctgcgcctggagctggaccgcctgcgcctggagaggatggaccgcatcgagaaggagcgcaagcaccagaaggagctggagctggtggaggatgtgtggcgaggggaggcgcaggacctcctctcccagatcgcccagctgcaggaggagaacaagcagctcatgaccaacctctcccacaaggatgtcaacttctcagaggaggagttccagaagcatgaaggcatgtcagagcgggagcgacaggtgatgaagaagctgaaggaggtggtggacaaacaacgcgacgagatccgcgccaaggacagggagctgggcctgaaaaatgaggacgttgaggctttacagcagcagcagacacggctgatgaagatcaaccatgaccttcggcaccgggtcacggtggtggaggcccaggggaaagccctgatcgaacagaaggtggagctggaggcagacctgcagaccaaggagcaggagatgggcagcctgcgagcagagctggggaagttgcgagagaggctgcagggggagcacagccagaatggggaggaggagcctgagacggagccggtgggagaggagagcatctccgacgcagagaaggtggccatggatctcaaggaccccaaccgcccccggttcaccctgcaggagctgcgggacgtgctgcacgagaggaacgagctcaagtccaaggtgttcttgctgcaggaggagctggcttactataagagtgaagaaatggaagaggaaaaccgaataccccaacccccacccatcgcccacccgaggacgtccccccagccggagtcgggcatcaagcgactgatctttacagccataatgcctatggtagcagcgggactgataatagatgaccccacactgcagcctgtccgacgacttgtttcccttgtttagcttcttctcccgagataagaagcgcctggccaacacacagagaaacgtgcacatccaggagtcctttggacagtgggcaaacacccaccgcgatgacggttacacagagcaaggacaggaagccctgcagcatctgtgaccttggcccatctccaccctccaacctggactgcccgccaccagcgcctgcaaccgaactgcagcccaggggtcattgctgcctcaagcctctcggtgcagatgcaccctgaaaactgacccctcaaacagactgtctgatttgaggatggacattgaaaaactgacgccaaactctaaagaaatgtttatttatacccagggctatcactgtttctaatagatgactctgatcccgtaggatatatatttaataatcccacaaacggaggccagacttctgcgttaacttcagtaacacaagcttctttaagccaaatacatcacttgccactaccattgctgtttgacttgctttgtataaaatgctatgtgtagaggttttattatcacaggtgacatagttcagcaggaggcatggaagggctagatcttcattagttacattcatgaaattgtgatggtaacgtattatacagaatgtatccatcaggcagacaaggggtctgaagtcacaggctcagtagcccaactcagacacaaagccacagacaatatggatgatggtcctcttacccagaaactggagacaactttgcaggcaccctggctgcgttcctgataatgcctagagcatgtagcaatgttcaaggcaggtgccttggaatctgctgtgagttatgcagtactaaccaaacaaagttgctaaggatgagatgttgc

SEQ ID NO: 1445 - DNA, 2553 bp, Homo sapiens
atttatggggtggggtgaggggtggggatgggatgagagaggctgctttcctgggcctacaattggagttcccttctccttgccatccccagaaactccaagagctgaccctctgtcttactaactcaaacggcccagaaacatcaaagtctgaccaaaaaccgttaatggtagtcagctccctccctttcacagaggtctcactactgtcggggggcgccgggcgcaggccgggcatggggcctgagcttaggccaggtggaaaggtggaaggacctagtggggacagacgaagagaccgaggagccgcccgcccggctaaatggacacaggaaaggcctgagtcaggcttctcataataaataaactgcacgtgaataattcagcagtcgcgcgggggccggttgcatcagcgccgccgccgccgcgcggcgcccaattccccgcggaggggagtagccaattaaggcacttgaaaagggagtcgggtggaagatcccccgcccaccagtatcctggatttacccaggtcgagttcagagagcctccccggtcccaaccccctcgggccccatgggtcagggggccgcctgctgggaagtgctacctcagctaagccgctcaggtgtcccgagactccgggcaagggaagacaggcggcgagacggagccagaataagggatgcggacgtctgacctgtggaaaacccagcatctgcagtgcccagccgcacagggaacgtgggcggcgtggttccaagcacagtgaagacgccaggctcggatctgtgctcagagccgggatccctccgggctgcttcgtcctggccaggactttccttgccctgaagtgaggcgccagggaagctgcagggccctccgccctctctgaactcccacgtacttgggcctctcccagcctttcttggacctgtggatgcaattcctgcaggaccagactcccctgtctccccgcggccccctaggtacactccgtaacttccgaaaccttatttcgtttgggcgaaacccggcccctttggctcttcccacttcccacaagtccctgggttcccgatcctgagggattgcattcatcccatctcacacccaccaacgctcaatccctccagttcctccccagccccttcacttccattaattaggtcgactcccttccttcgccgctccctcctgtccccactcagcctccctacacctatgcggcgagcctcgggccaagacctccgccctggctccgccagtcctgcgggggccggcatgcaccagacctcaaaagggatcttcacgggaattccgcatagccagatcccaagcctccagggaggccaccagccctcccccatcttcttcttcctcctccgtctcctttcctcttccctccgcctctacgtatttctttctattcgtttcttttcgtttggtgaggtgccacccgccacagccctgtcccctagggagaggcctggactaactttgccgtcctcgtggccttagcccggactgtgagtctcgagcggcttccgagaggcagctcgggtgtcttcgcagagacagatgaggtgggctggcgattccctagcctcagatggctctgccaccagtcagctctgtgatcctggccgatggggtgccaggcattagaaaccttccctccaatcctcaccatgtctccattttgccaaagaagaaactgaggttaaggtcgcgatgctctggccagcatcacaggtgggattcgaacgcagatggggtttggagcggctcttgtgtttaagccacacagtctgacgttagacgggtgaatccagccctcgcagggcctggagtgacctaagccgagaggagctgggctgaatctccaggcgttcctttctttctgccctaggaaagctttgaaattcttattttcaggtaaacgattttggcagtgcccggagaaagatagaagtaagacctaaagaggaactttccgcatgttatgggagagcccctggggcgaggaggcgagggcagccttccccaggccaagggagcagccatcgctcttggatctgtttttcctcaagcgtctgtcctgtggggcctagtccccaagcggcagtcctggacctaacgggagaaggggctgggggaagagggcgcacccccagcccgggacccacagcagccctagccagtcccccactctctccctctgtaggggcctctctctgagatcgggtcctcctcctgcagggcagcagagtggaagccagggcctgggaccctctggctgggcaaggagggactggagtccggctcccggtgaccccgtccccagtgccagcggtggggtcgcctgtggcggcccggacaggccacgggtccctctccccaagtcccattacgttgtatttatgtttcattttatagtttttttttcctcctcccttattattgtctcactctgggggaggcaaaggatataatatattcatctttattataccaaatctgtgtgaagcatttaataaaacgctgtttccacac

SEQ ID NO: 1446 - DNA, 2922 bp, Homo sapiens
ctttctgccgccatcttggttccgcgttccctgcacaaaatgcccggcgaagccacagaaaccgtccctgctacagagcaggagttgccgcagccccaggctgagacagctgtgctacctatgtcttcagccttgagtgtcactgctgccttagggcagcctggacctaccctcccccctccttgctctcctgccccacaacagtgccctctctcagctgctaaccaggcttccccattcccttccccctctactattgcctcgacccctttagaagttccttttccccagtcatcctctggaacagccctacctttgggaactgcccctgaagccccaaccttcctaccaaacctaatagggcctcccatctccccagctgccttagctctagcctctcccatgatagctccaactctgaaagggaccccttcctcttcagctcccttagctctggttgccctggctccccactcagttcagaagagttctgcttttccacctaaccttcttacttcacctccttcagtggctgtagctgagtcagggtcagtgataactctgtcagctcccattgctccctcagaaccaaagactaatcttaataaagttccctctgaggtagtccctaatccaaaaggcacccccagccctccatgtatagtcagtactgttccttaccactgtgtgactcccatggcctctattcaatctggagtggcctcccttcctcagacaacacccacaactaccctagccatcgcttcccctcaagtcaaagataccaccatttcctcagttctgatttctccacaaaacccaggaagcctcagcctgaaggggcctgttagtccacctgctgccttatctctttcaactcagtctcttcctgtggtgacctcttctcaaaagactgcgggtcccaacacccccccagattttcccatttctctgggctctcatcttgcacctttacatcagagttcttttggttctgtccaacttttaggtcaaacaggtcctagtgctttgtcagaccccacagagaagaccatttctgtagatcattcttccacaggggcctcttatccttctcagagatctgtaattcctccccttccttccagaaatgaggtagttcctgctactgtggctgcctttccagtggtggctccatctgttgacaaaggtccctctaccatctctagcataacctgcagcccttctggctccttaaatgtagctacctcttcttcattatctcctacaacctctctcattctcaaaaactctcctaatgccacttatcattatcctttagtggcccaaatgcccgtttcttctgttggaaccaccccacttgtggtgactaacccctgtacaattgctgcagcacctactactacctttgaggtagctacttgtgtttctcctccaatgtcatcaggtcccataagtaacatagaaccaacttcccctgctgccttggttatggcacctgtggctcccaaagagccttctactcaagtagcaaccactctgaggataccagtctctcctcctctgccagaccctgaagacctcaaaaatctctccagttcagtattggttaaatttccaacacaaaaagacctccaaactgtacctgcctctcttgaaggagcccctttctctccagcccaagcaggactcaccaccaagaaagaccctactgtattaccgttagtccaggcagcccctaaaaattccccttctttccaaagtacatcctcttctccagagatacctctttctcctgaagccaccctagcaaagaaaagccttggggagcctctccctatagtggctgcatttcctttggaaagtgctgaccctgccggggtggctcccacaactgccaaagcagctgcctttgagaaggtccttcctaaacctgaatcagcatctgtctctgcagcacccaccccaccagtctctctgcctcttgctccctccccagttcccactctgcctcctaaacagcaatttctgccgtcctctcctgggctggtgttggaatcaccctctaaaccccttgcccctgctgatgaggatgagctgccgcctctgattcccccggaaccaatctctgggggagtgcctttccagtcggtcctcgtcaacatgcccacccctaaatctgctggaatccctgtcccaaccccctctgccaagcaacctgttacgaagaacaacaaggggtctggaacagaatctgacagtgatgaatcagtaccagagcttgaagaacaggattccacccaggcaaccacacaacaagcccagctggcggcagcagctgaaatcgatgaagaaccagtcagtaaagcaaaacagagtcggagtgaaaagaaggcacggaaggctatgtccaaactgggtcttcggcaggttacaggagttactagagtcactatccggaaatctaagaatatcctctttgtcatcacaaaaccagatgtctacaagagccctgcttcagatacttacatagtttttggggaagccaagatcgaagatttatcccagcaagcacaactagcagctgctgagaaattcaaagttcaaggtgaagctgtctcaaacattcaagaaaacacacagactccaactgtacaagaggagagtgaagaggaagaggtcgatgaaacaggtgtagaagttaaggacatagaattggtcatgtcacaagcaaatgtgtcgagagcaaaggcagtccgagccctgaagaacaacagtaatgatattgtaaatgcgattatggaattaacaatgtaaccatatggaagcaactttttttggtgtctcaaaggagtaactgcagcttggtttgaaatttgtactgtttctatcataaataaagttatggcttcttgttggatg

SEQ ID NO: 1447 - DNA, 2313 bp, Homo sapiens
agtcggcagctgctcagctttgctgcagttttcctgctcgatgtgtgctgctggtgaggccaccaggcctgttcttgtcaagagagaccttccgggaacaacagatgttacaggagagactggggatgcatggacagcttttcagaggtccggtgggcggtggcctccgtggtgggcggctggctgctgtgtctgcgtgaccgttactccttcttccacaagctcatccctctgctgctcagtagcctcaacgacgaggtgcctgaggtcaggcagctggctgccagcctctgggaggacgttggcctgcagtggcagaaggagaatgaggaggacctgaaggacaagctggactttgcccctcccaccccaccccattaccctccacatgagcgccgccctgtgctgggctgccgggagctcgtcttcaggaacctctccaagatcctccctgccctgtgccacgacatcaccgactgggtggtggggacccgagtgaagtcggcacagctgctcccagtgctgctgctgcatgccgaggaccacgccacgcagcacctggaggtcgtcctccggaccctgttccaggcctgcaccgacgaggaggcagccgtggtccaaagttgtaccagatccgcagagctcgtcgggacgtttgtcagccctgaggtgtttctgaagctgatcttatcgacgctgaagaagacgccctctgcctccggcctcctggtgctggcctccgccatgcggggttgcccccgagaagccctccagccgcacctggcagccatcgccacagagctggcacaggcccacatctgccaggcatctgaaaacgacctctacctggagcgcctgctgctgtgtgtgcaggctctggtgtctgtgtgtcatgaggactgtggcgtggccagcctgcagctcttggacgtgctgctgacaatagtggccctcgcaggtgctaccggcctgagggacaaggcacaggagacgatggactcactggccatggtggagggtgtcagcagctgccaggacctctaccgcaagcacattggtcccctcctggagcgggtgaccgcgtcgcaccttgactggaccgcacactcgccggagctcctgcagttcagtgtcatcgtcgcacagtcaggccctgccctgggagaagccctgccacacgtcgtgcccacgctgagggcctgtctgcagccctcccaagacccgcagatgcgcctgaagctgttctccatcctgtccaccgcgctgctcagagccacggacaccatcaactcccaagggcagtttcccagctacctcgagacggtgacaaaggacatcctggcccccaatctgcagtggcatgcggggaggacagccgcggccatccgcacggctgccgtgtcctgcctctgggcgctcaccagcagcgaggtcctgtcggcagagcagatacgggacgtgcaggaaacactgatgccccaggtcctgaccaccctggaggaggattcgaagatgacgcgactgatctcatgccgtattatcaacacgttcttaaaaacctcgggcggcatgacggatccagagaaactcatcaagatttatcctgaactcttaaaacgcctagatgacgtgtccaacgatgtgaggatggcagccgcctccaccttggtcacctggctgcagtgtgtcaagggtgccaacgcaaaatcctactatcagagcagtgtccagtacctgtaccgagagttgctggttcaccttgacgatccagagagggccatccaggatgcaattttagaggtcctcaaagagggcagcgggctgttcccagatctcctggtgagggagacggaggccgtcatccacaagcaccgctcggccacctactgcgagcagctcctgcagcatgtgcaggccgtgccagccacacagtgaccacgctggtttcagccacggcacacccttgtccccacctgagccagagtttgtggtctttaaatctcataaacaaggcacctctgtgccagcagtgagactgtgacagcaagaatgtactcctcaggacacctgcccgctctttccctggaataacagcctctgagtggattctgcatgttatgtgatttgttctgttcatcgagagggctcccaaacatctgcagctgatttgaaattaaaagtaagtcgcagccgctcctcccgcagccacttcagcagcatcttagattttaagcctcacgtgcgcagctggttcatgaactattggctgcatcctgcttaggtgcccaccaagaaggtttttacctacttaac

SEQ ID NO: 1448 - DNA, 2141 bp, Homo sapiens
gaaactgaaacttggccctctgggggcggagtggccactggggatttaaagagctgccacttccttaggcctccagagggcactgggaagtcacagctgctgagggaccactctgctcccccgcctaagccatgcacctctgtgggggcaatgggctgctgacccagacagaccccaaggagcaacaaaggcagctgaagaagcagaagaaccgggcagccgcccagcgaagccggcagaagcacacagacaaggcagacgccctgcaccagcagcacgagtctctggaaaaagacaacctcgccctgcggaaggagatccagtccctgcaggccgagctggcgtggtggagccggaccctgcacgtgcatgagcgcctgtgccccatggattgtgcctcctgctcagctccagggctcctgggctgctgggaccaggctgaggggctcctgggccctggcccacagggacaacatggctgccgggagcagctggagctgttccagaccccgggttcctgttacccagctcagccgctctctccaggtccacagcctcatgattctcccagcctcctccagtgccccctgccctcactgtcccttggccccgctgtggttgctgaacctcctgtccagctgtcccccagccctctcctgtttgcctcgcacactggttccagcctgcaggggtcttcctctaagctcagtgccctccagcccagcctcacggcccaaactgcccctccacagcccctcgagctggagcatcccaccagagggaagctggggtcctctcccgacaacccttcctctgccctggggcttgcacgtctgcagagcagggagcacaaacctgctctctcagcagccacttggcaagggctggttgtggatcccagccctcaccctctcctggcctttcctctgctctcctctgctcaagtccacttctaacctggtcttcggagctgggttggccccttctttgggctcaggaagcagccttagcacacgggcctctcctccctcactactgggtgctgccctgcgtggctgaccagctggcccaggatttcacagtcgaaaaggaagccaccactgatgcctcccactgtgacaggccctgtcaccaccaatatcttatttcaacctcacagttgacctgagaaatcgagattatcactccactttttcagacaaggaaactgaggctcagggaagccaagtgacaagtccaaggtcacgaagactttcttggagcccgaaacaccaccctctgctcctccttctcctgtcctggcccaggcatcctaggggctgaaatcctggaaaccgtgggctggtgtgagaaggtttgcatgctcagagcagagaagggctctccccactgcttcgtgattccagggccagagccatgcagtcccagaaaccccaacctagctggggcaggtccagagtccaagccctggtgggtagaggccaagcagaagccctgaagtggacccttgcttcccctagtagtgttttcagtgccaagaagctgaaactgtgagctggagttggggagaggtctggaagaggaccatctgggatttctacagcctgggtacccatagccacaccaaggcttctgggagattctgcagggtcagctttccaggctgttcccaaatagctccctgcctccccactgcccctaaagccacagcagaagagccattcatctcataaacaaaaaggaagaggaaagaatgaggaaggaccctgtgcaaggttatttgcaggcagggatgggcttgtacctgacagcacccacccctgtgtggcccccaggccctcatcaccctcagacccctcctaagcagttccctcattgctctttggactaggctgacagcaggaagagcagggcccatgaccgggtggaagttcagttttggtgtctgcttcaagagggggttttacactctgattccaggacaagcactctgaggcgggtgggggagagaaaccctggctcttcacccaggtttcacacacatgtaaatgaaacactatgttagtatctaacacactcctggatacagaacacaagtcttggcacatatgtgatggaaataaagtgttttgcaatctttt

SEQ ID NO: 1449 - DNA, 2674 bp, Homo sapiens
agttcacccgcggcggagggtaactttgctgtgctgttttttgagcagttgtctggtccctggaagtgtagcatcgagagagttttctaattacgtttacaaaatatcttccctttggccatacaagtggtgactgccatgtcgaactcgcggcccaggtcccgccgagacgccgggggtggcgctggggcagccggccgggacgagctggtgtcgcggtccttgcagagcgcagagcactgtctgggcgtccaggacttcggcactgcctatgcccactacctcctcgtgctcagcctggcgccggagctgaaacacgacgtgaagaatgggctttagggatgaagcagctgggtattttcataaagcagtgaagctaaaccctgatttcagtgatgcaaaggagaatttttatcgtgttgcaaactggttggtggaacgctggcactttatcatgcttaatgacaccaagaggaatacaatttataatgcagcaatccaaaaggcagtttgtttggggtccaaaagtgttttggacattggagcaggaactggaatactaagcatgtttgctaaaaaagctggagcacattccgtgtatgcctgtgagttatccaagaccatgtatgaacttgcctgtgatgtcgtggcagcaaacaagatggaagcagggatcaaactcttacatacgaagtcacttgacatagagattccaaaacatattcccgaaagagtgtccctagttgtaacagaaactgtcgatgcaggtttatttggagaaggaattgtggagagtttgattcatgcatgggagcatttacttttacagccaaagaccaaaggtgaaagtgctaattgtgaaaagtatgggaaagttataccagcaagtgctgttatatttgggatggcagtagaatgtgcagagataagaagacatcatagagtgggtattaaggacattgctggtatccatttgccaacaaatgtgaaatttcagagtccggcttattcttctgtagatactgaagaaacaattgaaccttatacaactgaaaagatgagtcgagttcctggaggatatttggctttgacagagtgctttgaaattatgacagtagatttcaacaaccttcaggaattaaaaagtcttgcaactaaaaagcctgataagattggtattcctgttattaaagaaggcatactagatgctattatggtttggtttgtgctccagcttgatgatgaacatagtttatccacaagtcctagtgaggaaacatgttgggaacaggctgtctaccccgtacaggaccttgcagactactggataaagcctggagaccatgtgatgatggaagtatcttgtcaagactgttacttaagaatccagagtattagtgtcttgggtttggaatgtgaaatggatgttgcaaaaagttttacccagaataaagacttgttatcgttaggaaatgaggctgaactttgtagtgccctcgctaaccttcagaccagtaaaccagatgctgtagagcagacatgtatattggaatctacagaaattgctttgcttaacaacatcccatatcatgaaggctttaaaatggcaatgagcaaagttttgtcttcactgactccagagaaactgtatcagaccatggatactcactgtcagaatgagatgagctctggaactggacagagtaatactgtacagaacatccttgaacctttctacgtgttagatgtgtccgaaggcttctctgttctgcctgttattgctggcacacttgggcaggttaaaccatacagttctgtggagaaagaccagcatcgtattgctctggacctcatatctgaagccaatcactttcctaaagaaacacttgagttttggctgagacatgtggaggatgaatctgctatgttacaaaggccaaaatcagacaagttatggagcataattatattggatgtcattgagccatctgggctcattcagcaggaaataatggaaaaagctgcaatatccaggtgtttactacaatctggaggcaagatctttcctcagtatgtgctgatgtttgggttgcttgtggaatcacagacactcctagaggagaatgctgttcaaggaacagaacgtactcttggattaaatatagcaccttttattaaccagtttcaggtacctatacgtgtatttttggacctatcctcattgccctgtatacctttaagcaagccagtggaactcttaagactagatttaatgactccgtatttgaacacctctaacagagaagtaaaggtatacgtttgtaaatctggaagactgactgctattccattttggtatcatatgtaccttgatgaagagattaggttggatacttcaagtgaagcctcccactggaaacaagctgcagttgttttagataatcccatccaggttgaaatgggagaggaacttgtactcagcattcagcatcacaaaagcaatgtcagcatcacagtaaagcaatgaagagcagttttccaatgaaaactgtgtaaatagagcatcaacaagtacaaaattcttgtcttaattagtgggggtatataaaaattccttgtaatggtcaaatattttttaaaattgacattaataaagcatattttaaaagattct

SEQ ID NO: 1450 - DNA, 2988 bp, Homo sapiens
cttgggttccggcagaacccgccttgcggtagccatggcagcaggctccgaggcgaccactcctgtgatcgttgcggctggggctggaggggaggaaggtgaacatgtcaaaccttttaagccagagaaagcaaaagaaattatcatgtctttacaacaacctgcaatcctctgtaacatggtgtttgattggccagcacgacactggaatgctaaatacctttcgcaggtccttcatggcaagcagatacgattcagaatggggatgaaaagcatgagcacagttcctcagtttgaaactacatgtaattacgtagaagctacactcgaagagtttctgacctggaactgtgaccagtctagtatttctggaccatttagagattatgaccattccaagttctgggcttatgctgactataaatattttgtcagtctatttgaagacaagacagatcttttccaggatgtgaaatggtctgacttcgggtttcctggaagaaatggacaggaaagtacattgtggattggctccttgggagcccacacaccctgtcatctggactcctatggctgtaacttggtattccaggtacaaggaaggaaacgatggcatctctttcctcctgaagatactcctttcctttatccaactagaatcccttatgaagaatctagtgtgttcagtaaaatcaatgttgtcaatcctgatttaaagcgttttcctcagttccggaaagctcaaagacatgcggttacactgagcccaggacaggtcctggaaaggaaatggcaagagggaacacagctcctcctattggtaaagaggagaatggactttggaggaagacagtctacaagagtcattttcatttaggtcaggagaaaatgttcaaggcatgggtactcgagcatctctggaacatttaatcacagttagtatctgttcaattatgatagcactgaacccagacacataaacacaggtcggaatgcctccaggtgtgggccaacgggcagaaggaaccgagaatgtttgcttttaagcaaaaatggatgttgttttcataaattactaactctgaaacatttccaaaggtactgtacatagtgctgcttcccagtgaggaaaatttccttttcaacattggcacttgctgtctgatatttcattaataatttgaaaggttttcttagtcacttaagaagattttattctctcgattatccctctcccttgcctgtcttccatccattgtaccggtctcactggctcttttcctgcttccttcactcaagtactatcaactcaaacaatttcacttgactgagttgcctcgacctgttagtcactctgcattcccctctccccacagcccctgacaacaactaatctttttctatctctagatttgcccattctggacatttcacacagtgcaatattataatacagggccttctgtgtctgacttctttcacatagcataatgtattcaagggtcatccacgtcatagaatgttactagcacttcatttcttttttatggctgaataatattccattgtatggatatacaacattttgtttatctgttcatcagttgatggacatttgggttgtttctgctttgttggctattataagtaatgctactttgaacattcatgtacaagttttgtgtgtacatatgttttcaatactcttgggtatacctaggagtagaattgctgggttatatggtaaccctgtgtttaactttttgaggagttgtcaaactattttccatagcagctgtactattttgcattcccaccagcattgtatgagggttccaatttctttttatctttcccaacacttgttttgcttttttatcattatttttacagccattccagagagtgtgaagtggttgccaattcattttctcttctgtgtttaatagccaaatttgagtgattggttttgcctattgtatcagttttccttacatcctatccattctttaatccactcaaacccagctctttctgtcaccacttttctgaaactttactctgataggacatgcataacctactaatgactatcaagtggccttttatagtttccagttttcctgaaaggatctctctttctatttcccagtcctgccttgttcacagcaaataccagtagtttcctaatgtgaagcccaaaagcttcacatcatttccatctactctgctcttaataggaaatctcatactgagtctggatagatgccatccttcttgactctgcccattgcttttgtttattataccttcctatttatatcttaacgtttaataagtggacctttgcaagtatctcctgtccttctcagactctctcgataccactattttaaccatccccctacttagaatttctcaacaactcctagtgcctaccagataaaatctagattcttattctgaagtccgctgtccctaaactaattcccctaccttatctcccattattccctctgtgatagtaagactgacctacttgctatcttctgtagtcctacctccctcacctgtacctcttatccttcctggcatgtcctcattctttctgtgtctaaattctctcctagcccgggttcaaatcacacttcatccatgttgcccctgacctccctagttcatgcctgtttcacccacctctgaaattctgaaacaccattgtcccctgatttaccacttctataatgccacctttctatactttatcttctcattggctagattttgagctgtgagaaaacagaagccacgtcctatgtgttttacctatgccctttctcagaatgcatgcaactattttgtgacggaaaggaggaaaaattagaatctcagaatcatgtactaagatttaggtgcagacaaagaaggcccaggattaaagagaatagagatgctggcagtatcctttgtagaacatgtgaacttgtc

SEQ ID NO: 1451 - DNA, 2240 bp, Homo sapiens
agtggttgcggctccctcagtctggcgtcatctaggtcgctgctcagggaaatgcggaggccagtaggcttacgtgtttaccgcgtagggcaaagccttgccaaattcccggccagcggagcggcgagggtggggactcacgggaagttaaacagcctcgtcggcgtcctcgaggctccaaaaccaggctctaggcggggacgactgcagccgttatggaggccaccgcggctacggccgtggctgaggcctccccaggtggagcggtggcctggaggggaatcttgatcctgggccagccacctgtcaagaggaggcggagcgtcatgcctctggaagactggatgaatattctccaggagcctgacgaaggcgtgagtaatagggacgtgcgccgccttgttggtgttgatcagtccaccaaggagaagcagctggtcgcagtggccgtacctgtaatcccagcgctttgggaggccgcggcgggaggatcgcttgagcccgggagttcgagaccagcctgggcaacatagtgagaaacccgtctctaccaaaaagaaaaaaaaaaaaaaaggaaaaaaattagtgcggtgtggtggcacgcacctgtagtcccagctactcgggaggctgaagcgggagggtcccctaagtctaggaggtcgaggcttcagtgagcggtgattgtgccactgcactccagcctgggcgacagagcaagaccctgctttcccctcttgtcctccactaccctcaggaaaccaagaaagaccagcgtggagagttggtcgcccatctgctctaagctgctgtgtattcccctgtaatgtaaacatcgtgaaggtggagacccagttaaccttttaggtggaaggccagatgacagagggcggcatctgacccggaaggccctctgcaaccaggccaaatacatctacagggaaccaatgggaaacatctggggaggacaacccaaataagtatcatgcgagcaagggatggtttgagaactttaaaaatcgctgctgttttgcaacatacgaagttgatggggaggaaggacccttaaatcctgagtgggtatcgagtattccaagcaactggagagaggctttgtgcctcaacaggtcttcaacgccaaggagatgacccatcttttgcagtgcatgccttcctacttttggggcaaaagacaaaaatctggaaagcttagaggaagctaaggacaggatttccctcatttttttgtggcagtgcctcaggtgacaaaatgataaaaccactgctgctttacaaagactctaacaccccacttgtcttttagagataaacgccttcctgttttcttgtaatcacacccagaatcaccactgccactttttggattagttttacaatttttttatccatcaaatccgaagtcatttaacaaaaaaaatctggaaatcagaatgttgctaactgtggacagaggtcccaatcacccagattcattattctttgttcattctaatgttgatactgtgtttctccctcaggaaggccctagctttcttcagcccttgggtcagggtataactgaagcatttgaacataatcaagcatatgtttgaccactttgctgactgtattgaaaaaaccctcaccttactctgaaagaagcatggcaacagtacaatattgccgatgctttggtagtgataaaagaggtgatgggtgatataaaatcagccactcttaagcttgctggaaactgtgggaggatgtgtgaatgatgcatatttccctagagctaatgaagaagttaaaaaaaatcttagtgtctgcaaaacaggtgggtttaagatttattgatattagggaaagtgaaattaatgagctactcaagtttctgtctttggtcatcactgagagtctatttccataggaagaagtctttgcagaggaaattgaatgctgtctgatgctacaattcatatggatcctttcctggattgaagcctgacttttaaaaaaggtttcaataaattgcttatacctatgaagagatgcaaaagaaccttcaaaataaagcaaaggacttgaagaaagagaaggaagacatgaagaagaggatgtcatttaggtgaaggtgatggatacagaatctgagtctgaggggagcctggttgacagagagacaaaaaaagaaattttttttttctgactaaaaaaaaaaaggaaattttgttaacaaaatc

SEQ ID NO: 1452 - DNA, 2241 bp, Homo sapiens
ctttctttccgcgccgatagcgctcacgcaagcatggttaacgtccctaaaacccgccggactttctgtaagaagtgtggcaagcaccaaccccataaagtgacacagtacaagaagggcaaggattctctgtacgcccagggaaagcggcgttatgacaggaagcagagtggctatggtgggcaaactaagccgattttccggaaaaaggtgagtggtagttactatttgacgtttcccagttaattgccgtaaggatatgcacttgtctctagtccacacacttcatgatataggtatagcgttagtttagcgaagttttcactgcactgatatatctagtaggtgatggagctgggaatgcaactcatgtctgactagtccacaatactgcactatttcagtgtttacgattttttatcctttcccttctgaagaggcaaaaaattgaggaatgtgccctgctttcctaagaactgaagtgtgagtacactggtaaatcctttcatttgccttgttccttatctgtcaatatgtctgaatcctcgcttgttggttgcactaagaattgttctgttgtttctcatcacagaaatctgcagtcaactacctgttctcgtgaagtcttaaaactcttatagaatagccatttaggcctttctgctagcctcctgaattctgtattctcaggctgagcgagtttctgtttactctcaaaccttaggtgatttggctaactcttaaagtaattagcacgatgattggaacggagcattctctccaacacagcatttcttttggcactttgcttcttgtgcagtttagctccagaaagtattaaggaatgactttagtgctcatttggatgcagtaagtggtttgatctcagggtggcaaaaagaatgctttttttataccttttcacattcggataacttgtttagaagacagaggttctaactaggttttggcctattaagaactgcaaactagcagcagcagaactctggctaaaggggcaagcttattaggaaattgagtatttaaaagttgagctaccatatgatccaacaatcccactgctgggtatatacccagaagaaaatcggtatatcaaagagatatctgcactcctatgtttgttgtagcactgtttataatagctaagatttagaagcaaccttagtgtccatcgggatgaatggataaagaaaatgtacctatacgcggccaggcacggtggcttgtgcctagcactttggaaagccgaggcgggtggatcacctgaggtcaggagttcgagaccagcctggccaagatagtgaaaccccgtctctagtaaaaatacaaaaattagccgggcttgtggtgtgggcctgtaatctcagccacccgggaggctgaggcaggagaatcgctggaacctgggaggcagaggctgcagtgagccgagatcacgccactgtactccagcctgggcgacagagcaagactccatctcaaaaaaaaaaaaaaaaaaagagggaaaaagaaaatgcacctatacacagtggtactattcagccataaaaagaatgagatccagtcatttacaacaacatgggtggaactggagatcgttatgttaagtgaaataggcacacaaagacaagcatcacatgttcttgtttgtgggatctaaaaatcaaaacaagtggacttgtcatatagagagtagaaggatggttaccagaagctgagaacttctggtggcgggaggtggggatggttaatgggtacaaaaagaaaaaagaatgaattagaccaactatttgatagcacgacagcgtgactaaagtcaataacttagttacatattttaaaataacttagagtgtaattggattgtttgtacctcaaagaaaaaatgcaataaaactttacagtggagaaacctaacaagcactacctcagccaggtaatcaaggttaacatcaacagtcacgagtcatgttgatatatacccttgataaggtgtgatgaaaatgacacttaaacctaaaaatccataaccctatctaatgagaaaaataacaaatcccaagaggggcattttacaaaatacttgaccagtagtgcggaaattgtcaaggtcatcaaaaaagtctgagaaattgccacagccaaaggagtctagagacatgatgactaaatgttaggtggtgtcctgcgtggggtcctagaacagaaaaaggacattag

SEQ ID NO: 1453 - DNA, 3307 bp, Homo sapiens
ataaagtgaagattttgaaacagctcagtctcttggatagcagatgggaggcattgcttaataaagctgaaacaaggaatcgtcagttggaaggtatctcggtggtagcacagcaatttcatgaaaccttagaaccactgaacgagtggcttacaaccatagaaaagaggctggtgaattgtgaacccataggaacccaagcatctaaacttgaggaacaaattgcacagcacaaagccttagaagatgacatcatcaatcacaataaacatttacaccaggctgttagcattggccagtccttaaaggttttgagctccagggaggataaagatatggtgcagagtaaattagacttctctcaagtatggtacattgagattcaagagaaaagtcacagcaggtctgagctcctccagcaggccttatgtaatgctaagatttttggggaagatgaagttgaactgatgaactggctgaatgaagtgcatgacaaactgagcaagctctcagtccaggattacagcactgaggggctatggaagcagcagtctgaacttcgggttctgcaagaggacatcttactcaggaaacaaaatgtagatcaggctttactaaatggtttagaactacttaaacaaaccacaggtgatgaagttttaataattcaagataaattggaagccattaaagcaaggtacaaagacattactaaactgagcactgatgtggccaagactctggaacaggcgctgcagcttgcaaggcggctgcactccacacacgaagagctgtgtacctggctggacaaagtggaggtggaattactttcatatgaaactcaggttctgaaaggagaagaagcaagtcaagcacaaatgagaccaaaggaactgaaaaaggaagctaagaacaacaaagccttactggactcccttaatgaagtgagcagtgctttgctggaactggtaccatggagggcaagagaaggacttgagaaaatggtagctgaggacaatgagcgctaccgattagtgagcgacaccatcactcagaaggtggaggagatcgatgcagccattctgcgatcacagcagtttgaccaagcagctgatgctgagttatcctggattactgaaacagaaaaaaaattgatgtctctgggtgacatcaggcttgagcaagaccagacttctgctcagcttcaagttcaaaagacattcaccatggagattttgagacacaaggatattattgatgaccttgttaaatctgggcataaaatcatgaccgcatgcagtgaagaggaaaagcaatcaatgaagaaaaaactggacaaggtactgaagaactatgataccatctgccagattaattcagaaaggtatctgcagctggaacgggcacagtccctggttaaccaattctgggaaacatatgaagaactttggccatggctgacagaaacacaatcaatcatctctcagcttcccgccccagcccttgaatatgaaactctaaggcagcagcaggaagaacatcggcaactgcgtgagttgatagctgaacacaagcctcatatagataagatgaacaaaactgggccacagttactggaattgagccctggggaaggcttttctatccaagagaagtatgtggcagccgacaccctttacagtcaaattaaagaagatgtcaaaaagcgtgctgtggcactggatgaagccatttctcaatcaactcagttccatgacaagatagatcagatccttgagagcctggaacgcatcgtggaacgtctgaggcagccaccctctatctctgcagaggttgaggagatcaaggaacagatcagtgaaaataagaatgtgtcagtagacatggaaaagctacagccgttgtatgaaactcttaaacagaggggagaggaaatgattgctagatctggggggactgataaagacatatctgccaaagctgttcaggataagcttgaccaaatggttttcatttgggagaacatacacacactggtggaagagagggaagccaaactactggatgtgatggagctagcagaaaagttctggtgtgatcacatgtcattgatagttaccattaaagatactcaagatttcatccgggacctggaagatcctggaattgatccttcagtagtaaaacaacagcaagaagcagcagagaccataagggaagaaatagatggactacaggaggagctggatatagttattaacctaggttctgaactcattgcggcatgtggggagcctgataaacccattgtcaagaagagtatagatgagttaaattcagcatgggattctctaaataaagcttggaaagaccggattgacaaacttgaggaggcaatgcaggctgccgttcagtaccaggatggactgcaggcggtatttgactgggtagatattgcaggtggtaaattagcttcaatgtctccaattggaacagatctcgaaactgtcaagcagcagattgaagagctaaagcaatttaagtctgaggcctatcaacagcagatagaaatggaaagactgaatcatcaagcagagcttttgctaaagaaagtaacagaagagagtgacaaacacactgttcaagacccattaatggaactgaaattgatatgggatagcctggaggagagaatcatcaacagacagcataaactggagggtgctctattagccttgggtcagttccaacatgccctggatgagctcctggcatggctgacacacaccgagggcttgctaagtgagcagaaacctgttggaggagaccctaaagccattgaaattgaacttgccaagcatcatgtgctccaaaatgatgtattagcccatcagtccacagtggaagccgttaataaagcaggaaatgatctaattgaatcaagtgcaggagaagaagcaagcaaccttcagaacaagctagaggttttaaatcaacgctggcaaaatgttttggaaaaaacagaacaaaggaagcagcagctggatggtgccttgcgccaggccaaagggttccatggcgaaattgaggatttgcagcagtggctgactgacacggagcgtcatctgttggcatctaaaccgctgggaggtttaccggaaacagccaaggagcagcttaatgtccatatggaagtctgtgctgcctttgaagctaaagaagaaacatataagagtctgatgcagaaaggccagcagatgcttgcaagatgcccaaaatctgcagagacaaatattgaccaagacat

SEQ ID NO: 1454 - DNA, 1962 bp, Homo sapiens
gtagcgctgccctgggcgggcttgcacccccacacccaagtgagcggcctgctcactcctcagctgcaggagccagacatgtggagtcccagcagaggccaacctgtgtctcttcatctccgtgagaaaggtgcccccgaagtgaaagagatggcctggtggaaagcctgggactcaggaattctcccactccggaatgccttgctgctggggtgaccaggtcttcacttgtgaaacaggagtcggccacctcagccctgcgcctggcctggtggaacatgggtcaccgccccaacctggggcagccgccccatcccaacgcagttgctgccgctctccatgcctccctgtgcccagctaaccgggggacttgtcccctgggaaaacctgggtacccaggctgcctttggtttcagcccctactcctcttcccgggctgcctgtgctccccggacggcccctttccccgggctgtgttcacatcagctgggaagggtcccttgcagacagatcttggacgaggtcgcgtcccccctcgtgaccagcaaactcctaaaagcggcccttgccccagagcccctgtagcctccaaccggcagtcaggaggcagcgccgtctcagcgccgcttagtggcgccaggcgtgcctggaaatccgctttcgcagcgccccctcgtagccgcctccgcccgcagaaaggcgttccctggacagagaagcgggcgcgcgggggcgggcgcgcggggccttgccggagaacctgactctccgcagcagcagtggaagccggagtgacgcgttgtgttgaacaccagttttctggagcgctgtgtgttctcaacagctgagcagtctgtttctccaatcaggtttcaaagccacttcaactgcactggcccctgtgggtcactgctgcaccgccctggcccatgtgggtccctgaggagcgacctgccggggccacctggctggacgaaaaagacacaccttggacttaagccgtgagaaaaaaacttcatcagtaagaaacaagtcaatagacaagtaaaagactaggagaaaatatgcataaaacataaaaaagtgtcttgattcctgattctggagtatttaagaattcctataactcaacaaaaagttcagttttttaaaatgagcaaaaggcttgggtaaactattcacaaaggaacgtagacaaatgccagtacacacatgagaagcgcatacacatccacaaacttcaaacaagcccacctcatgtatttctagtgagtaaggaaaagaacgcaaacacttttgaaaattgtttggttgtttcttgtaaatttaaacaaataccctattatattatccagcgagtccatccttaggtttttatccaaggataaagaggtgaaaactcatatctaacaaatagacttctgaaaagatgaaaatagaagctttattcataaaagacaaaaactggaaataacccaaatattcattcacaggagaatgaataaacagactaggttgaatccatacaatggaatggtagcagacaataaaaagaaaatgaactattgatgccccctactgcacagcagaagctctgaatcgtgttcctgaatgaaagaagtcaggtatgaaagaataaacattgtatgattccatttatatgaaaatgaatctgtgatttaaaaatcagactagtattaggttggtgcgaaagtaattgcgttttttgcctttttttttttttaatagttgctttggggtttatggatggagtggcatggtagaggttagctgaagggggcatgaaataactttttgggggtgctagagtgttgtaaatcttacagtgggggagggacaggagtgcaggcatttgacaaaacacattgaattgtgaaatttaagatttttgaatttctttgtatgtaaattacctgccaataaaaacatgacgaatagagc

SEQ ID NO: 1455 - DNA, 2189 bp, Homo sapiens
gttgctgcggagccaggaggggaagcgatggctgggcccgcgtggatctctaaggtgagcgctggcaggccggcgtgtggcaggcaggcaggccgcgagggctggcaggagagccggtcgcgtgccgggtgtgggcgggcgcgtgggccagacagggaggcggtggctgcccgcggggacagcttgggagccggtcctggtcgcccgtgccccgcgctccgtggccggctcgcagtgtatgggccgccccgggccgggtcagcagcgcagaggcggggacggcgtcaaggtcaaggcgggggggcgccggccctgctcctgccgagacccggctgccgtcacccgcatccgcccaggccagagcccaggcttcgcgccgagcccgggaaggtcacgggagcctctgtcccggctccgccatccgggccgcttccccggctgcggccctgctgcgggactgatcccctcagcactgcccacacctctcatccgctgtctgcgcggcccttggccggggaaccgcaggtgccacgggcactggcgttgagcttgggaggttttcccaggtgagagaatccgggggcccttttccctatcagattgttttccctttggcgctcttcccagtcagacctccagtgctcttgtagctatttccccttcataggatagggcatcttacacctcggaattaccgtctgaaccttcggagagagagaccagcagagccttccttttacctttcattggtgggaatcctgcaatctggagcgctttagctctccttgacagctcagatgccagagctggaaagggtttcagatcatctatgcagttccgtagcttctcagtggaactaacctgtgcctgaagaagaatttgctcaaggtcacacaggaggtcggtgtcagagcagggagaggaacctaggtgtcttggttcccatttcccaaggtcacatggcaaatgatggtacaggccatcaggcctcaagtctcctgttgctatgaaagggtggtcccctagaaatctataaacaatttaacgtttttctgtaagtttgatactacttttctcccattttttcggtttaaagagaggtccagagatgcactgttatttaaggaaaagatctctgtactggaatttaggagtctcagatttaaatcctagcaatgccactgattggctgtgtgaccctaagcaaattactaaacatctctaagccttaatatgcccatctgtgaatatctatacttacatcacagaattgtttgagtattaaataaaataatgtatgtgaaagcacttggtatgtacagaaggaaaacaaaaatctgaagctttcttatcaatatgtttatctgtctccaacagacagtggttttcatgggcatcattaactggtttttttgttcaataactagattctactttgtcaccctcttcagacccagatttgcttgtgatgataactcttatgtcacatttgctcctaaaagtaaagcaacttctgtgtcactgtgaaaactgaactcagtcctttaatctctgaacttacatttaacacccaattcatctttggtaggtacatttgccttcacagtgaggcactaaagcaacacttgataatgattgtgctggtaaatctgttttgcctttagtgtgatctgcatgaaaaaaccctcatagtaggtattcagaaagtgttgggttgtggagtcagaagatgaggttctctgacatgcactccctgtgtgacctttggcagagtcatttgacttctgggccagcttctcactttagggattggagcagaaggtggctcagaggctgaccccaggatggtggaggtgctgagctggatgccggtttcaatcaggacagttcctctgttgagtttccatttcaggttgtggccaggcatggtggctcgtgcctgtaattctagcactttgggaggccaaagtgggcggatcacttgaggtcgggagttcaagaccagcctggccaacatggcgaaaccccatctctactgaaaatacaaaaatttgctgggcgtggtggcgcacgcctgtaatcccagctactcgggaggctgaggcgggagagtcgcttgagcccaggaggtggaggctgcggtgagaggagatcatgctcctacctgggtaacagcaagactctgtctc

SEQ ID NO: 1456 - DNA, 1932 bp, Homo sapiens
atgcattcttgccaagctgcctacagtgaactgactgctggatactccctcagaatctgtcgtccagcctttgagaaaatcgcgtggtcacgaatttgaccaccaagccaaagcaaaggatgcagcccctcggagcccaggcagctgtgtccagtgagaggtgccttttccaggatgccagggaggtgaggcaggacttacatgccggcttctccttctatctctccgcatcgccaggaccacattcggattcatagtgtgggcagtgggtggagggctgccaggaaacatggtgcaagtgcacgcttcacaacacctcatgccaggggccggcagaaaagggcctgcctcctgaggggtgtgtgtggcggggtgagagagagagaaacggggagaatgtgtgtgagacagagtgtgtgtgtgtgtgtgtgtctgagagacagaaagagtgtgagagaatgtgtgtgcatttgttgggggagagagtgtatgaatgtatgtgtgtgcttgcgtgtgtgaatgtgtgtgcgaggaactgtgtgtgtatgtggggggagagagtgtgaatgggtatgagagtgtgtgtgtgtgaatgcgtatgagtgtgtgagtgtgtgggggagtgtgtggtgtgtgtgaatatgtgaagggagagtgtgagtgtgtatgtgtgtgtgggagtatgtgtaaatgtgtgagggagagtgtgcatgagcgtgtgtgtgtgagtgtgtgtgggagagagtgtgtgagagggtgtgcctgtgcatggcagggggctctgggtttgggaagcagaggttcttccgctctggcttccgcactggccccctatcctccaacacagccccggcaaatgagcggctccgcgtctactccagcctgcttgcttggcgggaaggaaagaacaggagcacccttttgccgtattccacgcacattgtgcttgcagctcagccttgtgtcctggatgtaccacagggacagcagcacctcaccacggggccccagtgctctcacccaacccttcacccttcttcttcactagcccagccttccagggctttggattgtctccagagttgcaacagtcaaatatttttactcattgttctgtttggcctcagcctgtgtttccagcctcctaactcctccatggtcatgttttccaatcaaatctgactgcttattgctatcttagtctgttcaggctgtcacaacaaaataccacaggctgggtggcttaaacaacagacacttatttcctcacagttctggaggctggaagtcccggatcaaggtgcccgcctggctggtttgtgtggagcctctctacctggcttggggccagactgcgtagtgctgtgtcctcacacgacctttcttctgtgcacgcgcagggagagatccatctctgctgtctcttccttttttcacaaggacacttatcctaccagatcggagccctgccctttaccacctcatttccctccattatctccctaaaggctttctctccagtgtagtcacatggggattagggcttcagcctgtgaatatgagactcacaattcagtccatggcactatctcaacacatttttccttccgtgcctctgcttaccccaggcctccatctgggccaccccctctcccctgatccccactctctagcagccgaaatccaggccgattcgcatcagttccctgaccctcctgtccgaggggctgtctccctttatttaccctccatcgcacttggaacctctacggatgtgtgttttctgccttgagtactgggactggtggatttacattttctcccttccgagaccgggagctacctggaggaaaaacacatgctttgctacatttttagccatctcagtgtctgacattggttgctcaataaatagttgctgactttaatttt

SEQ ID NO: 1457 - DNA, 2338 bp, Homo sapiens
tctatctcttttgcctaataaatacggagggctgtgtaaaggtcagggcccttgtccactagaggcaaggtgccccctgaccccttcttccaaatatacgcttttgtcttttattcctgcattcgcccgctttgttcagtccccctaggtccatgtgggttacatagtggcgccgcagaacagggacttcaaggacgtaaacgaagaaggtctgctggagcagaggaactgaaattgagaaggtgaacggggaccccaggccgagtctgccgacagggatataaggtcggtgccctaaagaggtactgggagcagtgctttaaagaagtactaggaatgggaagttttctgaatcagggtaacatgagtcagaatttgtctgttggagaaaaacattatgcgcagttgcttaaagttttgttgaaacaaactggtgctcaggtcagttctcagacattaagatgctgccggaggttattacgcataacccatggtttccacaggcactcttgatgtggaaaattgggatagagcagaaggattaaaacaggctcatcaaaaaggttttaaagttgattcttcagttttttccactcagagttcagttcgtactgtacttctgccattatctcattattatgcggggtagcaggctgaatctaaaaatctgaaagaatctgttgtcccacccacagatccaattgaaaataaaagacaggagagggagaataaaaattggcctataccacctcctccagttgcagaaacatctgtactgcctcctttggtggcaaaaatagagaccccccaatacagagaatttatgctctgctgtcatagccggagagcccttaggaccttgtgcttttcctatttccgtaacgcctgatccaaataatccgcagcaggttattcacgaacacactccactagagtttaagttgttaaaggaattaaaagcgagtgtggtaaataatggcatacagagcccattcactttaggattgctagaatcagtgtttggtgtcatacatcttttaccctttgatgtgaaacacttggcgcgaacttgcttgtctgcgagtgcatagctgatgtgtaatttcaattggcaagaaaagtgtgcagagcaggctagacagaactgtgctgctggaaacggagacattacagaggatatgctattgggtaatggcccttattcagacctggaacgtcaaatggcactcccagacgctgcttatcagcagtgcgcataggccactaaatgcacttgggccacaattcctgaagagggagtcccagtacaatcctttttacatatcatgcaagggtcataggaaccctatgcacagtttccttcaagattacaagacgcagtgaagcgtcagattcctcataccatggctgcagaaatgctaaccttaactctagcttttgagaatgcaaacacggattataaaagtgcactggcacctgtgagatgtacaaaaaacttgggaaattttctcagagcttgtcaagatgcaggaactgagcttcatcgctcttcaatgttagctgaagcaatggctaattagtagttgacaaatctaaaaggagccaagggtcaagctctaaaatgggaaaatgttataattgtggaaaaactggacatttaaaaaaggaatgccaccagatctcaggacagaaaggatcttacaatgcagttcccccatcagcggaaaaaacgccaggactttgtcctcgctgtaacaaaggaaatcactgggctaatcactgctgctcaaaatttcatcggaatggcacccccctgtcgggaaatgagatgggggcctggacttgggtcccacaaacagtgagggcattcccagtccagaccttaaccccgttttaggcatgggttcctggaggcacattgattccatcaccccaggaacaccaggaagtgcaggattagatctacctgccagagaaagaatcacattagttgggggagacaaacccatcaaagttcccactggtatttggggaacttcaccagcaggatacatgggactaattttaggcaaaagccgccttaacttgcaaggcatgactgtagtcccaggagctgttgactctgattatgaaggagaaactcaagtagttttaatgtcacaagatctttgggtttttgaactgggagaatatattgctcaattattgcttattccctgcaaattacacccttctccatgaaaggagaaacgaggaaataaagggtttgggagcacaactacatgggaaatctatctatcccgacccatagcctctaatagacccacctgtgtagtac

SEQ ID NO: 1458 - DNA, 3112 bp, Homo sapiens
atgcctgcacctacctaggcttggactccggagcccggcctgtccagctgtctctgttttttgacattctccactgcatggctgagaacgtgaccagggaggacttcctggtggggaggcccccagagttggggcaaggcgatgcagatgtagcgggttatctgcagagcgcccgggcccagctgtggagggagcttcgcgatcagccccttaccatggcctatgtctccagcggcagctacagctacatgacctcctcagccagtgagttcctgctcagcctcacactccccggggctcctggggcccagattgtgcactcccaggtggaggagcagcagcttctggcggccgggagctctgtggtcagctgcctgctggagggccctgtccagctgggtcctgggagcgtcctgcagcactgccacctgcagggccccattcacataggcgctggctgcttggtgactggcctggatacagcccactccaaggccctgcatggccgggagctgcgtgaccttgtcctgcagggacaccacacgcggctacacggctccccgggccacgccttcaccctcgttggccgtctggacagctgggagagacagggggcaggcacatatctcaacgtgccctggagtgaattcttcaagaggacaggtgttcgagcctgggacctgtgggaccctgagacgctgcccgcagagtactgccttcccagcgcccgcctctttcctgtgctccacccctcgagggagctgggaccccaggacctgctgtggatgctggaccaccaggaggatgggggcgaggccctgcgagcctggcgggcctcctggcgcctgtcctgggagcagctgcagccgtgcctggatcgggctgccacgctggcctctcgccgggacctgttcttccgccaggccctgcataaggcgcggcacgtgctggaggcccggcaggacctcagcctgcgcccgctgatctgggctgctgtccgcgagggctgccccgggcccctgctggccacgctggaccaggttgcagctggggcaggagaccctggtgtggcggcacgggcactggcctgtgtggcggacgtcctgggctgcatggcagagggccgtgggggcttgcggagcgggccagctgccaaccctgagtggatgcggcccttctcatacctggagtgtggagacctggcagcgggcgtggaggcgcttgcccaggagagggacaagtggctaagcaggccagccttgctggtgcgagcggcccgccactatgagggggctggtcagatcctgatccgccaggctgtgatgtcagcccagcactttgtctccacagagcaggtggaactgccgggacctgggcagtgggtggtggctgagtgcccggcccgtgtggatttctctgggggctggagtgacacgccaccccttgcctatgagcttggcggggctgtgctgggcctggctgtgcgagtggacggccgccggcccatcggagccagggcacgccgcatcccggagcctgagctgtggctggcggtggggcctcggcaggatgagatgactgtgaagatagtgtgccggtgcctggctgacctgcgggactactgccagcctcatgccccaggggccctgctgaaggcggccttcatctgtgcagggatcgtgcatgtccactcggaactccagctgagtgagcagctgctccgcaccttcgggggcggctttgagctgcacacctggtctgagctgccccacggctctggcctgggcaccagcagcatcctggcaggcactgccctggctgccttgcagcgagccgcaggccgggtggtgggcacggaagccctgatccacgcagtgctgcacctggagcaggtgctcaccactggaggtggctggcaggaccaagtaggtggcctaatgcctggcatcaaggtggggcgctcccgggctcagctgccactgaaggtggaggtagaagaggtcacggtgcctgagggctttgtccagaagctcaatgaccacctgctcttggtgtacactggcaagacccgcctggctcggaacctgctgcaggatgtgctgaggagctggtatgcccgacttcctgctgtggtgcagaatgcccacagcctggtacggcaaactgaggagtgtgctgaaggcttccgccaaggaagcctgcctctgctgggccagtgcctgacctcgtactgggagcagaagaagctcatggctccaggctgtgagcccctgactgtgcggcgtatgatggatgtcctggccccccacgtgcatggccagagcctggctggggcaggcggtggaggctttctctatctgttgaccaaggagccacagcaaaaggaggccttggaggcggtgctggccaagaccgagggccttgggaattacagcatccacctggttgaagtggacactcagggcctgagcctgaagctgctggggaccgaggcctcaacctgttgccctttcccatgaagctggcttctctctgcaacaggagaaaacctggagctacagtgtcccccaccttccttgccccatgggaacctccacctcctactccccacccacctctgcgaatctgctcccaaaggaagctgaccagagcaagatctgggcaagcagagagtgcctgggacaggactgtgacctggtggacaggggcctagatgtagcctctgttcctcctggacataggaaggtcccaagcttagtatcccacgtggcctttacaaatcctatggctggccttctcattccacaagggccctggaaagggttgacagccagccttggcatatggctgggagtcccttagcaaggccaaccctgaagaggccctttgaggcattccctatggcttagagttgtagacttacactcaaccctcatgtgagcgtgggagtgagggtggcggtcccttgccaagttggtagcagtgacccagtgattcactgccatcccaggccttaactagcaaaactacggagcgtgccaagtgacctggtgcctgtgggaagtgggttctcaggactggcattcttggaataaattcactctgtccttgc

SEQ ID NO: 1459 - DNA, 2068 bp, Homo sapiens
ttggcttgtattatgcttggctagatgagacttctgggcagatagtaatggaaattacctcttccaaagagataaagtggagaagaaactcctgtaagtttataacctgcccttggtagcctgtctccattaaaccctatctaagtgagctagacaacccccaggggttggcagactttcgctgtaagaggctggatggtgaatattttaggcattgtgggccacatgcagtctctgtcacgtattcttggtttaaactttcttggctcatgggccttgagagctatggtttgccaacctcttatctagggtttagggtctttaaagaacctattagaaccccctttcctccatgggaaaaaaccctgagatgtttgagaacctttatttactcattatttttctttccttctctcaatcagcagcacccacagtaggacaagatatggggtggagacctgcgggtagttaggcagataaccttggggcccacctgcctagtggtgtgtcagtgaaagttaatccattttcagtctcctgggtacatcttttttaactcccactttcatttttctctgcctgtttcccttcagaaatcatttctaccagttcggagagatccggacgatcactgttgtgcagagacagcagtgtgctttcatccagtttgccacacggcaggctgcagaagtggctgctgagaagtcctttaataagttgattgtaaatggccgcagactgaatgtgaaatggggaagatcccaggcagccagaggaaaagaaaaagagaaagatggaactacagactctgggatcaaactagaacctgttccaggattgccaggagctcttcctcctcctcctgcagcagaagaagaagcctctgccaactacttcaacttgcccccaagtggtcctccagctgtggtgaacattgctctgccaccgccccctggcattgctccacccccacccccaggttttgggccacacatgttccacccaatgggaccaccccctcctttcatgcgggctccaggaccaatccactatccttctcaggaccctcagaggatgggagctcatgctggaaaacacagcagcccctagcaccttgtcaccactctggggctctgtggaagaaagggcacttaaaactcccagtaaatcttggaataaatatatttttccttcccttgtagtttccatggtagctgaatgtgctcagatgtgagcagtcagagactgacagccatgctttcctatacttgttcaaaggatcgatggaccgtaaataagctgccattaacacatctggttactgctgtaacatgactaataaaaccgaacgcctgttccccttacccgtgtgggggacacgcagatgagtgaattggaatgtccagcagagttaccctcccaattatatgttcattttgtatattttttggtcgggggaaaaattgacctgcagtaaaaaaacctttgaccatttttatgtccattggatactttcctttttatcatcttaaaaaaagataactagtactaatcattgtagtggcctaagtgtgatttaactcttgaagtcacaccctccgaaagatgagtagaaaccagcaccagcacagcccagatcttctctttcctctccttttcctcatttattcctaaaggaatctgaccattttacgtctctacggcccaaaaaaaagacaaaaataaaaattcctttttattcctgtcaactggatggaaacacaaatttcatggagctgtgtaccatcgaagaaacctggtgtctggcatgaaattactgtaaagaacttcctgtaaaacacgttctttaacaaactgaaatgaaaagcattggagcgtctgaatgaaagacgtgacctcctgctgggactctgatggtcttcagcattcaccttcgtgtgtcttcagtgtctcattgtcatccctgcttctgtttggtcttagagtgtttggatataactgaattgtagatggtaaaggaaatttgatgtgttttttgtttttaaataattaaaacgggtcaattttt

SEQ ID NO: 1460 - DNA, 1957 bp, Homo sapiens
taggcacttccagaagtcttattaacctgacaacagtgttgagaaacaacccaaaaacgaatggccaccaggtggaaggcttccagcgacatccccacattcccagcagagtgttgatagctcagggccacagccaggacagcacagcgggggctggggagaggtgctactgttcataccccattcttgaaacagcataccttcagcagacacttgtgaagcagttcatcatcctaggcactcgtcatgcaaaaactgaagatggccagtaaaaggccccgtgcacttccccaaaagttgggctcctatctccatgacccaggctcccggcctcagcctcctgccttggtaggccgccaggaggcctggtcagcaattctctggcctggctggcatgtttgttgtgcactgcctgcagctcacgttaggatctgtgacttttgcagtgtgatttgttcatccaggagggggcccgtctgggaagaacccccgctgaagtcgtctcaacctgcgacatcactttcgcctgcgtgtcggatcccaaggcggccaaggacgtaaggaccccctccctcccctcagcaactccgggtcacagccaggattgctggctggcctcttcccctcctcccctgcacaccaagtgagtgtccacatgtggggggctgaatttcccatcaggggccatctcccattgtgaagggtgtttgcattaattgaatacagacttcctttaattcagatcaaagaatgaacactactagggcccttgaagtctgtgctgaaatgtgtcttgaacaggcttcatgtgttcttgttgaactagaagctttggaactgaatgtgcctttggtccaggtgccaagcttctatgtttagctgtcactgtatttgtatattttagaagttcaagtgtggtagtcatcttattaaactggtgactagcctaatccaagtaaatccaaagaagtccccaaagtaaatgctgaggtttattcttttaaatggggtttgtttttttttttttttaaataaaaagaaatgcacacactcacatagattctttttaaagataaatgggagcatgcgggaagtacttttctatcccttgcttatttcattgttcttcccttttcagctgatagaaatcaggaaatgagccaaaacagcagcaggattctgatctgaggtctgtagggctcctgagcatctgcccgggagcctgggctattgcttctcccttgtgtccccacagctggtgctgggccccagtggtgtgctgcaagggatccgccctgggaagtgctacgtggacatgtcaacagtggacgctgacaccgtcactgagctggcccaggtagcagccttccttgggctggctctccagcatcttttctatcagagcccaagacccaggcttacaagagtgggcagttaagttactctagagccaaagccagagagggaagaggagaggcgagtagccttgggactagcctatcccgtgctccaccttcaaaccgcagctagtctgaacagccatgggcagtcgctgcatggctgggatgggcatcaagtcctggagctgccagccttatgatgagaagcaacccaggccgcccgcctggcattggggtttgagcagctgtctgcatttgacactggcaaagcatccctcctccccgagcatctggcccaaataagggagtggggactttgggacccacatatgttctgaggggagggcagcatccacaggggaggtgtgtgttcagccgagccattgacatggtcacatctggttctagttgttggtctctaagaaattccagtccgggcgcggtggctcacgcctgtaatcccagcactttgggaggccgaggtgggcggatcacgaggtcaggagatcgagaccatcctggctaacacggtgaaaccccatctctactaaaaatac

SEQ ID NO: 1461 - DNA, 2641 bp, Homo sapiens
agtgtttggtaaacagccagggtccggagctctgggaacagcctgatttagctctttgtttaagttttgtgttagaggctcccaagaagctgatgcaggggaaagaaattaacaaccatggctcattcacagccaggcagccaaatggacagctctataagactcaagccgacagcggagagagtgcaaccaaacagccttggcccagctttcagaggagaacgttattcactccaactgctctgcatctgcctggatgtctgccaagatctcagtcttctttccaccaatgacccctcgcgctgcttccagaagccaagaaagtgggctttgtccttggggatttaggaggcggagcggcgcccccttgaggccacatggtggaggcagcgatgagacctggagtctaaaattcagactgaatcacaggaagaagctatttacacaagtcaaacatggtccaatcttggcaatttcataaggttccaatccttaagggatcaaaacctggccaactgcttccaccgagaggtgtgcctttcaatgccaggcttggagtgtccctctttatttaaaaaggagaggattccacagcagagcttctcaaactcttccacccaaatcccctcaccacagagggacaggagtcctgggcatgtagcctaaagcagccaggagaaaaaaaccttgaccttaatttttttaatgatttcacatgaatcagtggaatgtgtttatgataaaatcatctcctcctgaaatacatgtgtaaaactgctgccccagttaaacgcacttagtctaaccaagccctaggattggcctctccagcatgagaagcatttccagcactccagctccccagctcccactctgggatcccacctcagaccctcccacttccttgcactctggcctctcgctcttgaccctgctcccgccacgctctttcctcagagtccatcagtcctgtcttatcttcaccttggtctctgccaagtgtgggtccaagtcatatatttgggctgtgatcacaggaaccccaagccccagacctcccaaagcgccctatggagagaccttaccctcctggacagaccctctccccccagctagacctcatcctctgggtagacccatctccccaaccagaactcaccctcctgagtaaaccccatccccctagctagacttcatcctcctggacagatcccatccccccagctagacctcaccctcttgggtagatgcatctccccaaccagaactctcctgggtagaccccttctacccagctagacctgatcctctggacagaccccatcatcccagctagacttctccctcctggactgtccccatcccccctccagccagacctcacccctctgggtagaccccatccccccaactagacctcaccctcctggatggactctaccctcctggagataccttcccctcctgggtatatcccacgtggctacacactccttcccctgtcagctttctcccccagggttctgggcagcagagtctgtgataaaggatactaagtgattccccaatacttcccgtttccagcctccagtgggctctccctggggctaacggttctttttgctatttctccaggctttgcctgatgacaagtatactctgagagtgtcctaatgatacagattttggaccctatcccagttctactgaatccaagtctctgggggaggagttggggctctgcatctggacaccttcctgcagggtccctcctgggaggcaagcccggggagcaccgctgaggctcgcctcagtgcccatcctagaccttcagcagctagcagaggatgtccccaccatccctcagcccacactcccactgtcgccccagccaggcttggcactgcctcctttctcagaagattaagaccatctgctgtttcccaagtttcccaccctccaccctaaaaatttctccgtttcccagtctttcctcgtctctcagaaaataaacatcttcccaggctgcctccccagtgggtctgcactccttgctgtcttcccagcacctgcccttccagcccgccctctgtgtgtccagtgtttccctcaccaaaggactcgctttgtttttcaaattggaggttttgtcttctccctaaaaaccaaaacatctccctgagaagtaactccctcaagctactgatacggaaggggggcggggaagtgctgggaagggaagggtgtggtccctggctagggctccacccccgggcctgtgcccacagacctaggtgaggacaggcatttctgttttcgtgcttaaatgttggatttcccaagactaccctggcctaccacaccctcattctgtgcctgtaaaaaaacctgagagcttagcaggcacgcacacaagcctctggacgtcaagaggaacacaccggtgtaagagcagactgatagtggcccacggcaggctggcaggccatcgacaggcagaaccactcagtgcagctggaggacagcctggccacggagcggtccgacttcagaggggaaaaccacctccccactccgtctcccttctggctcccccatctgagagctacttccactcaataaaaccttgcactcattctcc

SEQ ID NO: 1462 - DNA, 1648 bp, Homo sapiens
agctcagtgtcacagacctttgtggaagcaacaacagctcccatccttccaacctttctggagaagccgtggcctgatggtgagccgaatgggctggggggggagaagaaagcggctggggcggtggggagatctggggcccggatcggtgcccctcctccccatgccactgccacctcctcctcctccttcatgccggggacctgggggagggaggatctccatcttctctctgtcccctgcccctcatacaagaagctccccctcctcattttcccctcccaccgcagggcccccttgctcagtgctacaggggacaggggcttctcagtcttgccacagtgctctccctatcccagccacccccccaacacaggctcaacctgcaatgacacctgcctctgcatctccctcctggggatcccactccaccccacccctggccccggcaacccccactccctcacagcagtgcccccaggactctcctgggctgcgggtaggccctttgatccctgaacaggattatgagcggctggaggactgtgaccctgaggggtcccaagactcacccatccacggggaggagcagcaacccctgcttcatgtccctgaagggctccgaggctcctggcatcacatccagaacctggacagtttcttcaccaagatctacagctaccaccagcggaatggctttgcctgcatcttgctggaggatgtcttccagctgggacaatttattttcattgtcaccttcacaaccttcctccttcgatgcgtggattacaatgttctctttgccaaccaaccaagtaaccataccagacctgggccgttccacagcaaagtgaccctgtcagatgccatcctaccctcagcccagtgtgctgagaggatccgctccagcccgctgctggtcctcctcctggtcctggctgccggcttctggctggtccaactgcttcgctcagtctgcaacctcttcagctactgggacatccaggtgttttacagggaggccctgcacatccccccggggaagggaagggaagacactgggatgtactggagaggccagcctgggggacttgactaacctggactgggaaagctgagtgaaactgggctgaagtgaggtttgcagccttcaaatgagatctgacagtgccccactgccagatgtggacatagcccaggtcctgggaaggcttctggtgacagagccgaagatggcctggagtcgggtggggctgggagtgtaaagcatgcccaggcagaaggtggggaggattctgttccagagttggtgggtgcactagaaatgggaaggagagattctcccacgaactgccagacattctggttttttgtttttttgtttgttttgtttcttttgagacagggtctgggtctttcacccaggctggagtgcagtgctgtgatattggctcactgcagcctctgctccccagtagctgcaaccacaggtgcacaccaccacgccctgctattttttgtatttttagtagagacagtgtctcaccatgaggcaggagaatcacttgaacttgtggggtggaggttgcagtgagctgagatcacgccactgcactccagcccgggcggcagagggagactccgtttc

SEQ ID NO: 1463 - DNA, 1862 bp, Homo sapiens
gtacccagggctgccaggcagggccctgcaggggacagacccaagggctgatatggggacacctgctgaggggggaatttaccacggtaagggcagggctgggaggctgggcagccagtttcaccctcgcacgggctgcctggcaagaccagcggctggaggtgatgtcctcagtagagaacggtggccactggaaacgtgtggccagaaggggaaacgctcgggcctctggtgggggccagcctggggtggggtcggccagggtcagctgcctttccttcatgctggggaggagatgttgtgtgcatgtgagaaagcatttgatagcatgccaaaagtttcctccattatgtgcgtgtcaagcgtttgaccaggtcagaactcttgttctatgcgaatgtgctcacgcagacagaagcggaggggctccgtcgctctgccctcacgccgctgaaccgcgagggtctcccgctcctcaggcttgcggctcggccgcgaagtgtgtcaggtgtgcatcctgggtgctcctttgtgctctgtcctacggtgacacaggcggcgtggggttagacaggtaccggtcagactacggtgacacaggcggcgtgcggttagacaggtaccggtcagattacggtggcacaggcggcgtggggttagacaggtaccggtcagattacggtggcacaggcggcgtggggttagacaggtaccggtcagattacggtggcacaggcggcgtggggttagacaggtaccggtcagattacggtggcacaggcggcgtggggttagacaggtaccggtcagattacggtggcacaggcggcgtggggttagacaggtaccggtcagattacggtggcacaggcggcgtggggttagacaggtaccggtcagattacggtggcacaggcggcgtggggttagacaggtaccggtcagattacggtgacacaggcggcgtggggttagacaggtaccggtcagattacggtggcacaggctgcgtggggttagacaggtaccggtcagattacggtggcacaggcggcgtggggttagacaggtactggtcagatgcacgggctccctaaacccctgctgtggcttcggcagtaaagacaggacgcacccatgtcacaagaggagcacaggcaggggtgttggtgttggggcagccctcagggtctccagaccccagccccactcacacagcagcctaggaaggaagggcagagtcccaggtgtcagctggtgggtctcccaggagctgcccctccctggaagtcacaggacaggaatgacagatcagggaactgcaggaagctgccacctctggggtcagaatatgcccagcctgcgggggctctctatcggggtcttcgagagccagacagcctgccttgtgctgcatacctggctttgctctgtgcagaacccagcacacgtgattttgtgtgacatgccagcagcctggctcccaggacaggaggcctgccctgggggaggggctgcaggaggagggggggcaggcacccatgagtctgtccagccttgtcacagatgcatcgcccagcctgcggtcctgatttcagctcacctcagagtaaatcagaataaactgcacccagactctcacgaatgcatgttgacgctttcagttcacccctttctttgctaactttcttcctattttcttctaatgcgagagcttattaattccatatttatcattttgaataacttttctcctttttagtaacaaaatgtacttcactcttagtaaaatgtatttactattttagtaacaaaaatatacttgcctaatcatgtttaaaatatagtgatgtgaaaaattc

SEQ ID NO: 1464 - DNA, 2824 bp, Homo sapiens
atttaaaaatgagccaggcatggtggtgcacacctgtagtctctgctattcaggaggctgaggcgggatcattgtttgagcccaggagacagattgcagtgagctatgatggcaccactgcatggcagcctgggtgacaaagggagactcagtctcaaaaaaaaaaaaaaaaaaaggtgacaggctgggtgcagtggctcacacctgtaatcccagcactttgggaggccgaggcaggtggatcacctgaagtcaggagtttgagaccagcctggccaacatggtgaaaccctgtctttactaaaaatactaaagttggccaggcgtggtggcgtgtgcccgtaatctcagctacctgggaggttgagacaggagaatcactggaaccccagaggcagaagctgcagtgagctgagattgtgccactgcactccagcctgggtgacagaccgagactccaactcaaattaattaattaaatttaaaaaaaaaggcaaagagggagtcctgcctgggtacaggagacctggggttgggtcccagccctgccgctgacctgccctgggactgcaggaagtttctttccctgccgggccccaggtttcttctcatccatataatgagattagtcataacacctgccctgcccatctctggggacccaaggagaggatgagtcgatgagcaagaacgtgttttcaaaaaggggaaacaagcccttcccacattctgatgtctgctttcaactgccttttgaaagggagtgagagagggaaaaattgtattacacaggccggacatggtggctcacacctggaatcccagaacttcaggaggctgaggtgggaggatcacttgagcccaggaattcgagaccagcctgaccaacatggtggaaccccgtctctactgaaaatacaaaaattagctgggcgtggtagtggacgcctgtaatctcatctactccagaggctggggcaggagaatcgcttgaacccaggaggtggaggttgcagtgagccgagatcatgccattgctctccatcctggacaacagagtgagactctgtctcaaaagaaacgaaagaaaagaaagagagaaagagaaacaggaaggtggggagagacagagagagatactggagaagccagaggggagaggactgcatacccgcacacacaggagaactgggggttggctgggaggccccagctgccaaaaggactggccagcagggacatctgagtgggctgggtggtgggggtagccctggctccctctgaccccccaccttgggaaccctccagcccagacctgggatggcggattcgtgcaggaacctcacctacgtgcggggctcggtggggccggccaccagcaccctgatgttcgtggccggtgtggtgggcaacgggctggccctgggcatcctgagcgcacggcgaccggcgcgcccctcggccttcgcggtgctggtgaccggactggcggccaccgacctgctgggcaccagcttcctgagcccggccgtgttcgtggcctatgcgcgcaacagctccctgccgggcctggcccgaggcggccccgccctgtgcgatgccttcgccttcgccatgaccttcttcggcctggcgtccatgctcatcctctttgccatggccgtggagcgctgcctggcgctgagccacccctacctctacgcgcagctggacgggccccgctgcgcccgcctggcgctgccagccatctacgccttctgcgtcctcttctgcgcgctgcccctgctgggcctgggccaacaccagcagtactgccccggcagctggtgcttcctccgcatgcgctgggcccagccgggcggcgccgccttctcgctggcctacgccggcctggtggccctgctggtggctgccatcttcctctgcaacggctcggtcaccctcagcctctgccgcatgtaccgccagcagaagcgccaccagggctctctgggtccacggccgcgcaccggagaggacgaggtggaccacctgatcctgctggccctcatgacagtggtcatggccgtgtgctccctgcctctcacggtgagtcccctccggagctgggaggagtggggagaggaggagggcagctctgtgggttgtgcccatgtcacagatggggagactgaggctcaaaagaggtgagacatcgtgggcatggtggctcacgcctgtaatcccagcatgtagaaaggccgaggcaggaccggatgcggtggctcacacctgtaatcccagcactttgggaggccgaggccggcggatcatttgaggtcaggagttcgagaccagtctggccaacatgatgaaaccctgtctctactaaaaatacaacaaataaataaataaaaagtagccggacgtagtggcacatgcctgaagtcccagctacttgggaggctgagccaggagaatcgcttgaaccccggaggcggaggttgcagtgagctgagatcgtgccactgcactatagcctgggtgacagagtgagaccccgtcccaaaaaaaaaaaaaaaaaaataagaaaaaaaagaaaaagaaaggcgaggcaggacgatcacttgagcccagaggtttgagaccagcctgggcaacatggtgaaaccccatctctatgaaacatttaaaaattagcctggcatgatggcctgtgcctgtggtctcagctacttgtgaggctgaggtgggaggattgctccggcctgggaggttgaggctgcagtgagctgtgattataccactgcatcccagcctagctgacagagcaagaccttgtctc

SEQ ID NO: 1465 - DNA, 2922 bp, Homo sapiens
cctggcctggcagagatccagcccgcggctccgcacgcttagacggtgggggtcatgcagaacaagctttactcagaggaacagcaaatggccccctcccatccctgctggccagggagatccgccctccccgctcctccccagccctgggatggcgcggtccatcccctcatcgggatcctcgcgctcactgctccgtcgtggggtgcggcacagaatccacgcaccctcgagggcggccctggcgccgtgggcgccgctccagggccctgcgtgtgacggtgcagcagcggctctggatggcgcccggcgaaggtcgggtgggcacggtggggggaggggcggtggcctgggagggttcagggaagccccgggcctcacccgccgggtcgtctcctccacggaaccccgtcccgctcaggagagcgcccagcccttccggccgcagcagcaccgcggggagtaggcccgcccggtcgccgtacctgcgaggggcggggtgtggttagggccccgcccgcctcggctagcctgccctgcccacgcccgctcccgcgtacctgcatagccaccagccgcggtctgacgtttccaacacgcgcacgcgcgcccccgcgggcacggacagctcatctgcgcggctgctctcgtaggcgcgggaagcacagaactggggacctggtgggagtgggtgtttggagtcaccgcggggccacagaggacgaggcccgcccgcacccttctccacattctccttgcttgagtctgctgacggcggggccgctctaagaccggttcggggcttcctctaggtgcggagaccaagcacgggctcctggcccgccctgcccgcggtgcttctggcccagtcttgccacacggtcaagccgcagtggtggcgtgaggggtggggttaggcgcataccgctgctccctagggacgggcctccctcccggccttggcccggggccgcctcctccaggtagggcgctggaaaccaggcggtctgccggtcttcgttctccaccagccaccagcctgtgcgcaagaagcgggcagggactcaaatctcgaggctccctcgggtccaggagcagaggagcaaatccctgggttcttggggggccctacctgaggggtgccgcagcagcacgtccaggctctcctgggcctgcgcctgaaaaggcctatcccgcgtgtcctgggtacagaagggctgcaggcagcgcaggctctgagcctccagactgtggatggagaggcggcccgcagcgcgagaaagaggctgctcctctggggtgggcaggatcacccggctgggaagggcagcccgtacgagtgagaggtaggcggatggggagggtgaaactgggggcgccaccccggcaagaccgccagcctcccactctctgcccctattcgctggctgttcccccccaccctggacctctcccagctccaaacgccgctgcatgctgggagtttggggcgagtcaggcacctgccgggtggcagcgcgggctccaggtccaggggttgcggtgcgaagaagccagtgatcgtcgggctccgtgccacgcgctctgcagtcgccagcagcctccgagaataggtttccaacagctgcaggcgcgccaggccgcggctcgtgcgccccacgcgtcccaacagtggtgcatcttaaggcaccacaaaaacgtactgtgatacgccgctttgggcttcactggtccctggcgcccccaggcaagccaccgccttccccgctcccgtacccaggctggcctgaccgagaagctttgggagaacgcggtcagatctccgcagcaggcccgcctccaccgggaaggtctccttgagggtcttctgagggcgggaaccagggcattggtcttccagagcccactgtgcacccttgagagggcggggtccctcacccggatggcaggggctgggagcttcagcagggacgaagggcctccagtggaagtcactgatgggaggcagtccagtgggaggcagccgcgtggggaagccgccaccgcggcatcagggtggcccagggtcactcaccttgagctgcctgaattcgtcccaactcctgcgcacgaaggtgtcgctgccgtctgaccagcgcacagagaaggcaaacgtctgggggacaaaaagttgggagtgccgtggaggtgctggtccaggcacccccttcctatcccttggggccactaaggacccagccaggtcttacttggagcctcttgatctgcaccagggctgccccttgcactgaaactgggtatcgggggcctgccatggctgtggcttccaggctgcagattcctgaaatgggcgaggacccttctgcctccccgtgcttgagagggctctgggggacccagaaaaccccctgggatagaatcctggcaacacctcaagcctgtggggtccttgtggagccgccccagctgagtcctttgcagctttcttgctgtcccccaagcccacgatctgggggcaggagcacagggattgggggacttccaggcagagctgctgggaggaagaagaagaatgagctttccagccctggaggcgtgcaagactgaagaaggggcgaagggtaggcgggactgctgcctggggccctcctgcctgcctctggccacaggaggagggaggagaaggcagggctaatcaaagcgccacctgtcctgcccacctctctggattcccctaccctgtgaggtaattgccctgccagggtacgcccaacaactttgaactggcctggggatttctgtgcagaaccaaggactcagtgcttacagctttaagtgctttgtctgacttaatcctaatgctggaggaaaggtctcttaatgtccccaactcatagaggaggaaatgtgtgttaaatgcgt

SEQ ID NO: 1466 - DNA, 2821 bp, Homo sapiens
ataactcagctttggtactggaggggaattggagctttggaacaggatggtggaaccattccctcccaactccccccgaccaacaccatctaaccctgcccaagaaggaaaaaatctttccttttcttacatatgggagccttggatagagaaacggtttcagttcatctggttttgttttgtgttgtttttccatgtgtgcatgagagccacaaaacaaaaaaaataagaaaagaacaaaaccgggagtgttcactttgttgttattgctacagagatgtttattctaaatttaaataaacgcataaaggaacttctctaaactttttgctcagaggaccaaacttgaacttcaattggtgaaggaatcctggaatactgttcaggggagcagagaatccccactcatatcctctctcttgcccctctcccctaagggttttgatctttgctgtccactgttctccacacacgcaacaaatagacaatgtgtcccaacccaagaagctgaaagtcctgtgaagttcaaacagaaaattgtcttaataggctgcacgtggtggctcacgcctataatcccagcactttgggaggccatgagggtggatcacttgaggtcagaagttcgagaccagcctggccaacatggtgaaacccagtctctactaaaaatacaaaaattagccaggtgtggtggcacatgcacctgtaatcccagctactcaggaagctgaggcaagagaactgcttgaacagggaagcagaggttgcggtgaaccgggattgcgccactgcactccagcctgggtgacagaatgaggctcccgtctccaaaaaaaaaaaaaaaaaaagaaaagaaaagaaagagaaaagaaaagaaaattgtctgaaggctgctgagaataaacagagagtagcaaggctgcagagaggccagaactaatcaaactgacagtagctcccactgtttcacaggcagccaccatgcccatgctgtaaatggattatcccacttgaatatcacaacaacctagggaggaggtgctacatttatccccccttttacaattcatgaaacaggcagcgtaggatgggggtccagtgctcagtttctaacctcacacagtgaggtgtatgtcctgaccttggcaaaccaactctatcctgtgccgcagttttcttctctagaaatcaagtatagtaatagtaccaagagtttctgtgaagagtaaatgagataagaaacacaaagtgcttagggcagtgccgggtacacagtaaattatattttatcattataatctcattcactcagttgggaggccatggaaccaggattagacccacatccggccaccaagacctctggctcctggttgtacaattggattccaggaaggaaggagcctctgacaaagccctggaggctcggccttgcttctcttgcttcaagtacctgctgctcacacaggtctgggttttcactccacatgaaggctgggccaaggctcaggtggcttctgacatgcgtccatcagcagtgaaccacaaacacacacacaaaacctgtgagttcccatctgtctttgcagtggccagtctgtgatgcaaatccctgctctgacaagcgattctgggaggactttgctgtacctttcagccctggtgtcctgccaagcactgtgcttgaggcagcctcattctcgagccctggccttttgggcaccagtcttttctatgaaaaattcaaagagctctttcttcagcccagccatgcatcagcgaagcacgacatgggcttggctcagcactcccaatcagtgggactgctggactccaatcaccagtgaggctggccctcctcctactggcagctctttctggggtattcccctggctggtgagttcaccctggtaacaattccaaagggacctctgtgattgttgctagagcaaccatcccccacccccacatccactgtcaggcagtgcttccctgagcttagggaaagtaggccccagatttaagcccatgtcactgcttagtggagaggattgagggacatcaaggaactactgcccccagtgttttccccactggttagcattcagcctgagtcttttcgttacaggccttcctttaggttatacttaacctaaacctgtgtcccaggttgctaggacatacctagtttatacctgttatcctggaataattgttaatagggcccctttcagtctcaaaagtgtcttcatttttgtgataaactatatggtcctcccagcttcagtacatgttgtctgtgggagggtcctgttaagattcacatggtccttgggcattggtatttactagcttagttaactgagggcaggaaagtacttatggagatttggaggaattgctctaggtttgttaatctggtgtgggggttggggaaggtaggggacagacttcagattaactaggtttaagaaaagacctgaggcttctgatttggtttggctgtgtctacacccaaaatcttatcttgaattgtaatcccaatacccataatccccacgtgtcaagggtgggaccaggtggaggtaattggaccataggggcagtttcccccacgctgttctcgtgatagtgagtctcatgagatctgatggttttataaacgtctggcatttccctggcttgcactccctgtcctgctgccctgtgaagaaggtgcctgcttctcttttgccttctaccatgattgtaagtttcctgaggcctccctagcaatgcagaactgtgagtcaattaaacctctttcctttataaatt

SEQ ID NO: 1467 - DNA, 2970 bp, Homo sapiens
acgtctgcggtgttacccacgactgcctgggacctggccaagggctccacacaccaagaccaaggcagcaggaaggagaaaggagggaaggtaaaagactactgaaaagctttcagctggggctgggcatggaggctcacacctgtaatcccaacactttgggaagccgaggctggtggatcacttgagcccaggagtctgagaccagcctggccaacatggcaaaaccctgtcgctacaaaaaatacaagaattagccatgtgcacctgtggtcccagctcccagggccgggagcctgaaaccaaggtgtccacagggccctgctgcccccagaggctctgggcagagcccttccgcctttccagctccccctggttcccgtgctcctcggcctgtggccccatcactctggcctctgccttcatctcatgccgagatccctgaagcgggcccagctccgttcactgctcccccggcctcctgctgtttcccacacgcagccatggtacagggcagctcatcccaccacctccccaaccgcagcctccagggatgtacaccctgcctcaggggctgtgcctgggccctggctggtggagggcacagccgtcagggaaggccctcagctgcaggatgccgtgcctcagagaccaaccaggccctcgaaggcactgtggccggcccagatgtcagcagctccagcaattaggctgggacagatggtgcctggtgacacaaggggactgtgggggccacaggggaccctgctcacctggacctaccgtggaggccagggagggagatggactcgaagggcggaagggcccagagaaggcacatttgcagagcagcggccgcatttccagagctcgggagcccaacaggaatcccgtctggccatgggaccaccgcccttggggctgggggatgccgcaggggacggcagagggcagacaggccaggaaaaggggagggcagagggcagacaggccaggaagagcgcctgcaagtgcccaaggaagggaccaaacccaggcccctggaccagagcggccgcctggtggggcaggctggaaggggccaaggccagcgccaagggggagcaggtgagggaccctggtgggcatctgtgggaacaaggccacgtttctccctgcgcacgctttaatcaaggacattcctgtggttctccaaaagtgtcgcacactacatgggtgtcgtgagctgggctccgtgagagtgtgcgggtggctgggggcagcaagggagcagcaaggcctcaaacccgggcggcggcctggcctgcgcgccaggatgtgcggtgtgagtttcccgagctgcaggaacaaggcccacagactggggagcttcacacaacagaaactgcctcgcagttcccgaggccagagcccatcggggtggctccctgaggccgtgagcccggactgtcctgggccgccccctcttccacaggctgagatcatccttggcgtctgttggcctgcggccgcctcgcccaacctctgccctcatgtccacacgggtcctccctgtgtgcatgttggtgtctggatctgccctttctactgtggggcaactgtcgtcgaggatagggcccaccacacaacacggcctcatcgtaactaagtatagtcagcagtgatcctatttcccaataaggtcccattctgaggtcctggacttcaacatgtgaattttgggggccacaactctaccctggcatgcagagagagaaggggggcgtggagtccccctggggggaagtcccttgggaagtcacaggcccccttggtggggcaattgggacgtgggtgtgagggtcctgggtacagggagcctgcctaccaaggctctgccgacagctatttctaaattcctcgtggaaaataccctgtggccctcctcatctggagcgagcgacgggctggagggtgtctgagccaggctggtgccggggagcagatgtgggtggcccaacccagccccttgttcttgttccccacctcccaggaaagggggagggtgggcggagccggccctcctgggctctctccttgggtcccggagccacctggggaggggaggctcaaccccctaccttggccagctggctgcaggtctctcagggctggcacagaacagctgggctttgccaggtgtcccccatcctgatgcacggcccggtggtgcggtctccaggcctcccaggattctcagctgcgccgtctccccagtccccaaaccccagtggtggccgccaggggactggaccgtcagtctgtggagctggggctgcagctggtggtgtttccaacaagggtcttttggctgcctggccccagggagaggcctctggaggcaaggggtaacctaccgggaaagcctcaaaggcacccccatccccgccccgcacagactccaccggccccccatggttcctccaggccctcttcagtcatgacaggcagtgcctgggtgcccggcctgctcagtacaccctgggcctcagccccacccaagccttggcctagcatgggagccaccacgggaacacacacacgggctggagggtgtctgagccaggctggtgccggggagcagatgcgtcagatggaggagaaaagccctggggcagcggcttctggagctctggccaaggatgggctctgagcacacccctgcccggcccagagcaccaggccggggcagggtcaggaacagcttgaagccccctgcaaagtctgtccctcctcctggagcctcagctgcccctccaacacagccctctgtgggagcctagatggcccccgtgtggccatgagacatgggcgggcgctggtggattcctctgtgtcaggtgacatggtggcaccccggccgcaggctgtgccccggctgtggcgttaagaagggctatggatctaaataaaatccagtctctttgctgg

SEQ ID NO: 1468 - DNA, 1993 bp, Homo sapiens
aatagtttaatagtagcgcggtccccatacggctgtaatcagtgaattagaaaaaaaacaccctagcagcgatattctatgatagattttttttcctctgcgctcgcctttttcctaggccttgcccccccaaagcccctccaaaagagggaactttttctctgagggggctccaaggagaaggccatgaattacgaatttgagcgagagattggttttatcaatagccagccgtcgctcgctgagtgcctgacatcttttccccctgtcgctgatacatttcaaagttcatcaatcaagacctcgacgctttcacactcgacactgattcctcctccttttgagcagaccattcccagcctgaaccccggcagtcaccctcgccacggcgctggcggccgccccaagccgagccccgcgggcagccgcggcagcccggtgcccgccggcgccctgcagccgcccgagtacccctggatgaaggagaagaaggcggccaagaaaaccgcacttctgccggccgccgccgccgccgccaccgccgcagccaccggccctgcttgcctcagccacaaaggtcagtccaaagacttggccccaggtctctgggaccctcttccttctccgggctgccccgagagtggctgtcgggggaggggagagtgggctgggagagaaggaggagagggagagatgcttggttgccttgtccctgcccctgtgggttcaggagtgggtttgatggagaggaaaggggatcctgcgctctacaatgagacatatatatttttaggaagtggggggaaactttcccgaacttgtgtaatgtgggatgatttatttgagtcagaactgacctcctcctgtctagttgtcctagagtttggctttttgacagtaatgaagagtgatagatcgctcttgctcagctaagcagctgacgcattaattataaattgtgttgtggctaatataaagtttgctcccggatgaagaggttggggggagccacaggcatgaattcgatagagatggaggagacggggtctgcccaggctgggctcccaggaaaggcagcacaatagctctactgcatccaggggcggccattttgttgcagttgatcttttctgctatatttattctccagtggaataaccccgctcggacccctccacctccaactgtgcgtgtgtctcttgttggtttccctttccgcagaatccctggaaatcgccgatggcagcggcgggggatcgcggcgcctgagaactgcttacaccaacacacagcttctagagctggaaaaagaatttcatttcaacaagtacctttgcagaccccgaagggtggagattgcagcgctgctggatttgactgagagacaagtgaaagtgtggtttcagaaccggaggatgaagcacaagaggcagacccagtgcaaggaaaaccaaaacagcgaagggaaatgtaaaagccttgaggactccgagaaagtagaggaggacgaggaagagaagacgctctttgagcaagcccttagcgtctctggggcccttctggagagggaaggctacacttttcagcaaaatgccctctcacagcagcaggctcccaatggacacaatggcgactcccaaagtttcccagtctcgcctttaaccagcaatgagaaaaatctgaaacattttcagcaccagtcacccactgttcccaactgcttgtcaacaatgggccagaactgtggagctggcctaaacaatgacagtcctgaggcccttgaggtcccctctttgcaggactttagcgttttctccacagattcctgcctgcagctttcagatgcagtttcacccagtttgccaggttccctcgacagtcccgtagatatttcagctgacagcttagacttttttacagacacactcaccacaatcgacttgcagcatctgaattactaaaaacattaaagcaaaacaaagcatcaccaaac

SEQ ID NO: 1469 - DNA, 2132 bp, Homo sapiens
ttttttgtgaacatcactgaagctctgaagctttgagcagcaggattaggtgttgctttgttctggtttgttgctaatagttgtgtatgttgaagctgttgtttcaaaagacgacgcccaggttccattgctctatctgggggggctgtggcccctcacactggcgatctcctgacatgaagagtaatttatatttttttcaggtgtctagaaggctcccaaaagcctattccttggaaaacagcatggcacgggaatcagagagagaaaggaaccagatcagacgaggagctctctctcaagagtcctgcagaaagaacagaacttacccccaagatgtggcaacccttggagccgtgaatcagccctttgcttctctgcagaaacgcactggctcattggtgccctgcagaggctgatgaaacagaagcagtcagtaatccagccggtggcagcagttcatgctccccaccgtctcagcctagtacacattccctctccttggccgaagaattaaagaggacaccttgaaagggtttctgaactcgatacctaccaaaaagaaaaagttctcccttccctttgcaggagcctgaagtctcccccttggttttttcattgactttagtgctgcggatgatttgggatgttggtctagctggtgactcatctcaaccacaagtgttttagaaatgagcagcatgggccgggcatggtggttcatgcctgtaatcccagaactttgggaggccgaggcaggcgggctacctgaggtcaggagttcgagaccagcctgaccaacatgtcgaaatcccgtctctactgaaaatacaaaaattggccgggcatggtggtgggcgcgcctgtagtcccagctactcgggaggctgagtcaggagaatcacttgaacctgggaggtggatgttgcagtgagctgagaccatgccattggactccagcctgggcaaaaagggcaaaactccgtctcaaaaagaaaaaaagaaagaaaaagaaaaagaaatgggcaccatgcctgccttaaagtaaaccagcagtctctgagctcagagatggggaccatcttggagcgatcaccttgcagctattggggaaggagtagtgggggtctctcatgctctgttgtaggggaatgggctttcaaagaagtggaggtggcatctccattagagagatgatttgcagttagtgtggagcacagggggagttggggggccagccgtggtgatggcagggcatagagatgatagactaagttgcatccactttgccaggggaggagaggccgctctgttgggaggggctggcggcttggctgttggggatcatccaggcttttgctcactctgcttggttactcaccttagtgggtacttcacagagggtcattccctcccagggagggaggaaggaaaataaaaatccatctccaggcagaagggtggatgggggagttcagacgtgcttgttccccctccgccgtgagaagcagttcgtgggctttggctgctctggatctcaagtctcatgtgaacccagcaggcttggaaccagctcatatgtttggaggggtgaacaaaactcaccaaaaaggaggggagttttcaatgagggaggtagagggggtgccttgagaggttgtctttatctaagagttctctgatttaattccaaatggcagtttttagggcaccatacacatgttcattttccttctttttaatttttaatgttttggtttctttgagacaaggtctcagtttgtcacccaggctggagtgcagtggcatggtcacagctcactgcagcctcgacctcctgggctcaagcaatcctcacacctcagcctccctaggagctaggaccatgggtgcctgccaccacacgtagctaatttttaaaaaattttttatagaggcagagtctcaccatgttgcctaggctggtctctaaccactcaagcaaacaccgtgtttgtgttctagtgttttgtgaaaggtagaacttgagagtgatgaaatcagatttttggctgaggacatttctatgcaatgtattgaaagtgtggcttggctcctcctgactgcttataataaaatgtgagagagaaatg

SEQ ID NO: 1470 - DNA, 1923 bp, Homo sapiens
acctaagcgatgaaatccaaaggtgaatcttttggttggtgattttgatgatagccacaaagcaagcagggtaatgctgatgcttcaagtcttggaaccacacttcgagaatcactgttataatgtacagcagaactgcatgatcagctgtatggtagccttgaaaaccaacaggccacaatcacagtgaaaacctcaggttggcagccactggaggatacaaaatgagtttggatctccttcaatgccccattcccagagaactgtcattatttgacctgctggtagttccctaaagggcgtgcaaggatgtttttatttgactggacacttgaagcttgccctgtatgaacagcccccatcttcccatgcttgtcaaaaatcagaggcaactaacactgcggcttcctgagagtctcactctgtcacccaggctggagagcaattgcacaaacacttggctcactgcagcctcaacttcttgtcctcaagtgatcctcccaccttagcctcctaagtagctgggaccacagtgaggtcaaaaaatgtttgaaagccactgagatagaaggaccagccactttgaacgccttagaggcaaaaagagctttgtgagttgtaagaggaaaaagaagaccagcatggctgaagcgagccctggggaggagtgttatgaaagaagatgagtctggaagtgttagttgcaaagatatgcatttacttctctggctacaaaaaagaatagaaatgcacaaagcagagcagtgtgaagaagaagaggcgatgacccctagaccgaccaaagcccgtgctccactgcccagtgcctatgtcccaccactgtcgctgccaccctgcccgagagaaaggctgaaggggatgctaaaggagataaaaccaaggttaagtaggaactgcagagaagatccacaaggttgtctgctaaacctgctcctccaaagccacagccgaagcccagaaaggcctctgcaaagaagagagagaaggtacctacagagaagaagggaaaagctgatgctggcaaggaggggaataaccctgcagaaaatggagatgccaaaacagactaggcacagaaagctaaaggtgctggagatgccaagtgaagtgtgtgcatttttgataactgtgtacttctggtgactgtacagtttgaaatactattttttaatcaagttttataaaaatgcagattttgtttagcttttttttttttttttaagctatgttagtacacagaatacttcattgttgttttggggagaagggccatatgtcactaatagaaagcccctgaagctggactgatgtggggaaaacaccttttccttctggttttgagagacttcctcttgggtcccaggaagagggattccctgactttgatacacatggccaccttggtataaaagccttgtggtatggaaaaacaaattcgttttttatgtcctcttctctgtttctacctttcagaatggacttaaatcccttaaacccagacatcttctgggacctgacccccaataattggttaccagtgtgtcaggcaatctggactttgccctcaaaagagcagtggttcctgtttctaggttgtggatcttcagataaattctgtcattttcctttcacttcctgaaagccagggtcggttcatgaaaagctatgaaacagcatgctaaatgtgaaatgtcaaccctcactaaactttgccggttcagagcatcagatgaagacttcattgggttttacagtggctttctgatttttggtagtccattgaagaagggagtttgaaagttgttgtatactgttaacgattgtctgcccatgtcctgcccaaaataccatgattctttatggaaattatctttaataaagctggatacagtttggcttggg

SEQ ID NO: 1471 - DNA, 2293 bp, Homo sapiens
gtttgcgccgcgggggaggcggcggccgcagcagaagcagctgagtgtctcctgatacccggatgtgaggcgatccgctggcgctagtctgaccctccgccaggcaaaaggaagattgtctttggctatagagttttttttttaaagattactaaacatacaggaagtgataagaagtatcattcatcagaagcatcattcatcaatcaacttgaagaaaaaggtgatatattatttctttaaggtgctgtgtgatgtgttaagagcatattagaaggaatggttttgtctaattttcttcatgagttatggtggctgagacatcgagtctatattttggggcaaaaactaaacggcagcacaaaaggaaatctatattaatagaatattttgttgaacaaaggaggttagataagaactgcaaaccaacagactcagcaaacaaggaaagaaacgtgttagccataagacatgtttcaagtgaatcgaagtccaataactgtagacttcagaagaaaaaagttttcaaaaattttatcaaaacaggtcactgataaataactcctccagtaatagagctaggcctgaaaccaaaattaattaaaaaattaacaaaacagattgaacctgaattaaatttcttttgataaaaaaacttattaaaaataatcaaaattttcctcaaatttttattaccttgtccaaagtaaagcaagtgtcttttagcattcatgccagcttttctcatgttctaggaatgacagaaaccttacttgaagcaaactagtatttttgttgaaaatgtatatcagcatcagttaaagttgatttttcagacctgctcctcagtaataatactagctagtcagcattcacgcctaccaggacacaaaaatcctcttcaaaactactcagaaaagaaagtcattactcaggaatgatgtccattcaggagaaatcaaaagagaattcctccaaagttactaaaaaaagtgacgataagaattcagaaacagaaattcaggattctcaaaagaatctagcaaaaaatcaggtccaaaggagactataaaatcacaggctaaatcttccagtgaaagtaaaataaatcagccagaattggaaacacgcatgagtacaaggtcatcaaaggcagcatctaatgataaagctactaaatccattaataaaaatacggtgactgtgaggggatattcacaagaatctacaaaaaagaaattatctcagagaaaattagtacatgaaaaccctaaagcaaatgaacagcttaaccggagatcacaaaggctacaacaattaacagaggtttcaagaaggtcgttacgcagtagagaaattcagggtcaagttcaagcagttaaacagagtttgccaccaactaaaaaagagcagtgtagcagtactcagagtaaatctaataaaacaagtcaaaaacatgtgaagagaaaagtactggaagtaaagtctgactctaaagaagatgaaaatctagtaattaatgaagtaataaattctcccaaagggaaaaaacgcaaggtagaacatcagacagcttgtgcttgtagttctcaatgcatgcaaggatctgaaaagtgtcctcagaagactactagaagagacgaaacgaaacctgtgcctgtaacttctgaggtgaaaagatcaaaaatggctacttcagtggccccgaaaaagaatgagatgaagaagtcggttcatacacaagtgaatactaacacaacactcccaaaaagtccacagccatcagtgcctgaacaaagtgataatgagctggagcaagcaggaaagagcaaacgaggtagtattctccagctctgtgaagaaattgctggtgaaattgagtcagataatgtagaggtaaaaaaggaatcttcacaaatggaaagtgtaaaggaagaaaagcccacagaaataaaattggaagagaccagtgttgaaagacaaatacttcatcagaaggaaacaaatcaggatgtgcaatgtaatcgttttttcccaagtagaaaaacaaagcctgtgaaatgtatactaaatggaataaacagctcagccaagaagaactccaactggactaaaattaaactctcaaaatttaactctgtgcagcacaataagttggactctcaagtttcccctaaattaggcttattacgaaccagtttttcaccaccagctttagaaatgcatcatccagtgactcaaagtacgtttttagggacaaagctacatgatagaaatataacttgccagcagg

SEQ ID NO: 1472 - DNA, 2114 bp, Homo sapiens
acttcagccagagcgcggggttagggcttcattgccttgtgtcctctgctccgggagacttcggtgattctgccactcactccgtcgctctgtgacctgctggcattgaatgatttatagctaagactccaggacacccctgaagccgagaaatggaactcttaacattcagggatgtggccatagaattctctccagaagagtggaaatgcctagaccctgcccaacagaatttatatagagatgtgatgttggagaactacagaaacctcgtctccctggtggaaaagcgagattgtctttgaccatttgctatggacattgtcagggatggtgcagcctgaatgagaatgtctgcggtatttcccgaaataagtatccctcaaggatgatactgtggacctcactcaggaagaatgtgtccttcagggaaagctgcacagagacgtgatgctggagaagcagtcatctggttactttagtacatgacttcaggctcctatgtgcagaagtcctcaacccccaggctgcagaccagtacctgtccatggcctgttaggaaactggccgcacagcaggaggtgaaatgattattgcagtttcgaggggagatgatgtcacaagatctcgaacccatatctcagaaccgcctgcctcctcccacacactctggctgtcctgaccatcacttcaagcccaccagccctgcagcaaaaaaaatcaaacgagtagttcagaaggcaaagtctgcaagggaaggaagtatattgggaggtacagtaagtattcctgtctggagaaggtcttctttggggctagaaactgagccagtgctaaagccatgcaggaaggaggaaataatcagtgagccacgggctgaacttgtggaaaagaaatggagggcaaggtcacaaaccagtccctaactgcttctaatttaatgtaatcctcactgtttgtcattattgcttttgatggccatgaaatctgttttttcccagttctctagtgtaatttggaattaatttcccagctgctttattttttttctagaagagtcggggacattttcaggattagtagaggtgtttctacaacaccttcatgccttcgatagtgtgtaagagttcaccaattgaattaccttattctgttcagaagtagtaactatggagtttaaccactctggacatattatatacttaatggagaccatagctgtgtggtgactgaaaacatgcattgtctactccttatggtgagactgctttccttcatgaagtcagtaaagaagggtaacttttctgtagatttttgtatttttaaaaaaggtcaagatcttcggcagttttctgaattgaattgtttgtgatatttgctctgtttttaaaatcttctaaggccattaccaggttcagtgcttatcttagtacaatttaaattgattccgtgaataatttttcctgcctccagtttcccttttacatagtgggctcatgttttaatatgttaaacaattctgacattgaaataattttattttatatttttgcatccacaaatactaattttctccatatattaatggtgatgtagtttctcctctgcaatatttttttgcctactcatgttttatgtcccctggattacagcactgtcattccactgtgccctatttcttggttatgatgaaaagactcttaattccagtatgaaatcatttctgcattccataaatttcatttggcatctgtggaattaaggcatcttcattgtatttggatctctgaatcataagtgatatttgcctataaattaagcaatgatatttaaataagagattaccacaatcatattttataaatatacaaccatttttaaaaacctgacaaaatctacaaaaaaaagaaaatgaaatatatgtggagttttaggaaagactgactaggtccaaggttgaggcacatagtggttaagcacattgtcagctccggactctgcctcttacaaggaaggagggggctttagatgttatttagctgttatttagcctttctacacctaagttcccctcacctgtaaaaaaaaaaataataataaattgcttactttgt

SEQ ID NO: 1473 - DNA, 840 bp, Homo sapiens
gtacgcgggcaagatggaggcgactacggctggtgtgggccggctagaggaagaggcgttgcggcgaaaggaacggctgaaggccctacgggagaaaaccgggcgcaaggacaaggaagatggggagccaaagaccaagcatctcagagaagaggaggaagaaggcgagaagcacagggaacttaggctgcggaactatgtcccggaggatgaggacctgaagaagaggagggtgccccaggccaaaccggttgcagtggaggagaaggtgaaggagcagctggaggccgccaagcccgagtccgtcatcgaggaggtggacctggccaacctcgctcctcggaagcctgactgggacctcaagagagatgtggccaagaagctggagaaactaaaaaagcggactcagagggccattgccgagctgatccgtgaaaggctgaaaggccaggaagacagcctagcctctgcagtggatgctgccaccgaacaaaagacctgtgactccgactgaggcatgccctgccccaccactcgcccatcaggcctgtcctgcaggggatggtcttgggcagggatgggggctaggcttgccatcacctccagtttggcttctgagcagagactccctgcccatcaagtctgaaacccccatggatgaggtcagctccttgtctgctgggtggcccctgccattctgaatggaggcagaaccagcaacaactctgggcgtgcctgtgtctgcacatgtggatgtacatatgtctgtatatatgtatatattttgaactttctaaaaaaaaatctggaaatagaaacaagtaaacccctgtgtgtggc

SEQ ID NO: 1474 - DNA, 2244 bp, Homo sapiens
gatttagggtcttcacgctgcttggattttgaatataaacctaacagtagcttagttggaaatgcaagttgatctagagaaccccttgtgctggtctactttgagtcacacttggggcctgggattgttgtcctgcagcagggtgtgtgttccctcccttcccaacagcctgaagtgttgcccacctcccaggcacccacctccaactcacttctgaagcaaaatttactgatagtcacactaaggtgaatcgatagaatgagttcaaggcaggttttgctgtcaaacttaaattgcagtatgaaaattttttttaagttttcagaactttttggttttgaatgcagataaatgtgctaaatacatagatgctttattctagccaatcaggctataaaagtacatttcagaacattgggggtccatctctccacagagatccacaagttttcctttatagcacaagaacaaaagggaccatactgtggggccatcaggacactaaactcacagtgccaggatagcacagagtttctgtaaacctcatcatttgccaagttgtatattcaagtttcttgaacttgctatcttacctactcctgatgtctctttctctttcagtcacagtacaagagtcactttgttgcagccagtttaagtaatcagaaggctggaagttctgctgctggggcaagtgggtggactagtgcagggagcttgaattctgttccagctaactcagcacaacagggccataacagtcctgacagccccgtcaccagtgccgccaagggcatcccaggctttggcaatactggcaacatcagtggtgcccctgtgacctacccgtctgccggagcccaaggagtcaacaacacagcttcagggaataacagccgagaagggactgggggcagcaacgggaaaagagagagatatactgagaaccggggcagcagccgtcacagtcacggagagactggcaatcggcatagcgatagtccacgtcacggagatggtggtcgccatggagatggataccgccatccagaaagcagcagccgtcatactgatggccatcggcacggggagaacagacatggaggaagcgcaggccggcatggggagaaccggggtgcaaatgatggtcggaatggggaaagcaggaaagaagcttttaatcgtgagagcaagatggagcccaagatggaacccaaagtggacagcagcaagatggacaaggtggacagcaagacagataagacagctgacggctttgctgtcccagagccgcctaaacgcaagaaaagtcgatgggacagttagaggggatgtgctaaagcgtgaaatcagttgtccttaatttttagaaagattttggtaactaggtgtctcagggctgggttggggtccaaagtgtaaggaccccctgcccttagtggagagctggagcttggagacattaccccttcatcagaaggaattttcggatgttttcttgggaagctgttttggtccttggaagcagtgagagctgggaagcttcttttggctctaggtgagttgtcatgtgggtaagttgaggttatcttgggataaagggtcttctagggcacaaaactcactctaggtttatattgtatgtagcttatattttttactaaggtgtcaccttataagcatctataaattgacttctttttcttagttgtatggccaggcagtccccattttaggagttggcttctgcaaattcaatccattgagctaactgttggggagcaatttggtagttgtagacatttgcagggaagggagatgtctgattctaaatgggagttgatgctcaggtccccagccaggtttgcatccagccctgagacatgtaggaaacacctttcagacccaggctctgaagattcccagaagccacaaggattgaagggaaaaggtgatcctggtaactgttccaggattgctccaggtttgagatggtattgctaaatttaaaattaaacaagaaacccaacaacagcttttaaagtgtcttctatctcattgtattttttttaacttgccccaatgatagaaaagtcttttgctgaaatgattttgatgatttttgtttatcgtttataaaaaggaaaagaaatatacaaactttgacttttgtgactttgtgaaggtttctttaagatgtgcattcctttctgcttgctctctagtaaatgttttactaccggg

SEQ ID NO: 1475 - DNA, 2450 bp, Homo sapiens
tttttattaatattccttaagtgttgttttatcaggtgatttctctttgccagttgatacaatacaaatggaatataatgcatctaacatttcaaattcaagacatgattctgataaaatcagtggtaaaatgaatacatatatgaattctacgacttcttctaagaaggatactggtgtgcaaacaggtatttgtgtggaaattgtggtttggtttaaaatttacttaaagtcataattaaagcagttagaattaagttcaatttaaaagttcaaaaattaacgaaacttgaggttttcagtaagagttacaaaataaagggataacagctttgttgaaacatgtcatgtaccacaaaatttatcctacagtttagtcttttttggtattcagtggtgcaaccattaccacaatcaattctaaaacattttgatcactctagaaacactgtacccattacttgccactttctatttctcttttctcctccagttaacattctgtctctgaatatttttgcctgttgtggacatttcacgtaactggaattagaccacataacggtcttctctggcttctttctctcttagcatgttttaaggttcatccatgttgtagcatgtgtcagtacttcattcctgtttgtcactgaataaatattacatttataataccacatttttattcatgagttgatgaacatttgggttatctccactttttggctatgaatatgctgctgtgaacattcatatatagatttttgtggatgtacatttttagttcgagagaagagtagaattgctgagtcatgagtaacaggtactgtatgtttagcattttgaggaaccaccaaactcttctccaaagcagtggtaccattttacattcccaccatcagtgcatgtgggttctgattctctatatccttgccagcccttgttattctactggttgtgaagtggtatctcaggtggttttggtttgcatttcccccccagtgactgatgatgttgagcatcttttcatgattatcagttcatagaaatggaaattagagtggtggctgccagtggttgggagtatgtggttgttctttaatgagtatagaggttcggttttgttgaaaattaatgaaagaaaaaagtcttagagggcaataattgtttaatgttttggggaaaattatttaatattgaaaattttgtttacaatttttaaaaatcatttgcaacttttttttagatgacttaaatataggaatattcaccaatgcagaatcacattgtggatcattaatggagagggacatcacaaattgttcatctcctgagatttcggcagaacttattggacagtttagcaccaagaaaaacaagcaagaactaactcaggataaaggagccagcttagaaaaagaaaacaatcggtgtaatgaccagtgtaatcagttcacaagaatagagaaacaaacaaaacacatgaagaaatatcctaaaaggcctgattggaatataaataagccacctaaaaggtatattccagcatcagaaaagtaccctaaacagcttcaaaagcagagagaagaaaaaaaagtaaggaggcagatgggattgcttcatttggtagaaaaaaataatcctgggcacctctctcaaaacagaggcatttcaccagaaatttttcattcatctcatcaagaaacggagtcaaagttgaggtggcatctagtcaaaaaggaagaagagcctctgaatattcattcattcagcaaggaaaggtctccatcatcaccagttccagtagtgaaaaacagaacccaacaaactcaaaatacattacatttaccactaaaaaacagtagctatgagagagagaatttgatctcaggaagtaatcaaacagaattatcatctgggatttctgaatcatcccattttattccgtatgttcgaacaaatgagatctattaccttgatcccgatgcaccattgtctgggccttcaacccaggaccctcagtaccaaaattcacaagactgtggccaaaaacgacagctatttgattctgactgtgtcagggatccacttcttaatcctaacatggtgaaaaatagggatcgacagcaagcaatccttaagggactttcagaactgagacagggccttctccagaagcaaaaggagttggaaagtagtctcctgcctttagctgaaaatcaagaagagagttttggttcttcattttaaatgtagaaaatcaaatccttcacatttgatttgtgtcttccaaattataaaatgtgctcactggctcaactgtatttttcaaatagcctagatttacttatttttttaaatgctcattaaaaacttgtatactatgtagtaaaatgctgtacttgttctatacaataaaacagatacttcttttgtaaaagcttagtagt

SEQ ID NO: 1476 - DNA, 3029 bp, Homo sapiens
ctggccaccaacagcatctacccaccttcggcagcacccacagcggtccagcaggccccaactcctgccaatcgccagatctccacatacatcacagtgcccccgtccccactgatccagaccctggtgcaggggagcatcttggtgagcgatgatgtgctcatgtctgccatgtcagccttcacatccctggaccagcccatgccccagggccccccacctgtgcagagcagcctgaacatgcattccgtgcccagctacctcacccagcctccacctcctcctccacctcctccaccactgcccccaccgccaccacctcagcctccaccacctccaccccagagcctgggcccccctgggcgtcccaaccctggtgggaacggtgtggtggaggtgtacagtgctgctgcgcccctggctgggagtggaacggtggagatccaggcactggggatgcagccctacccacccctagaggtgccaaaccagtgtgtggagcctccagtatatcccacccccacagcgtacagccctggcaaacagggattcaaacccaaaggaccaaaccccgccgcccccatgaccagcgccaccgggggcacggtggccacctttgactctccagcaacgctgaagacccgacgagctaaagctgcagggaagccaaaggctcagaaactcaagtgctcatactgtgacaagtcattcaccaaaaactttgacctgcagcagcacatccgaagccacaccggtgagaagcccttccagtgcattgcatgtggccgtgcctttgcccagaagtctaatgttaagaaacacatgcagacccacaaggtgtggcctccaggacacagtggtggcaccgtgtctcgaaactctgtgaccgtacaggtcatggccctgaaccccagcaggcaggaggacgaggaaagcacagggttgggccagcccctgccgggtgcgccacagccccaggccttgtccacagctggtgaggaagagggggacaagccggagtccaagcaggtggtcctcatcgacagctcctacctgtgccaattctgccccagcaaattcagcacctacttccagctcaagtctcacatgacccagcataagaatgagcaggtgtacaagtgtgtggtcaaaagctgtgcccagacgttcccaaagctcgacacatttctggagcacatcaagagccaccaggaggagctgagctaccgctgccacctctgcggcaaggacttcccctcgctgtacgacctgggcgtgcaccagtactcccacagcctcctgccacagcacagccccaagaaggacaatgccgtctacaagtgtgtcaaatgtgtcaacaaatactccacccctgaggccctggagcaccacctgcagaccgccactcacaacttcccctgcccacactgccagaaggtgtttccttgtgaacgctacctgcggcgtcatctgcccacccacggcagcgggggcaggttcaagtgccaagtgtgcaagaagttcttccggcgggagcattatctcaaactgcatgctcacatccactcgggtgagaagccctacaaatgctcagtgtgcgagtctgcgttcaaccgcaaggacaaactgaagagacacatgttgatccacgagcccttcaagaaatacaaatgccctttctcgacgcacacaggctgcagtaaggagttcaaccggccggacaagctgaaggcccacatcctctcccactctggcatgaagctccacaaatgcgccctgtgcagcaagtccttcagccgccgtgcccacctcgccgagcatcagcgcgcccacacgggcaactacaagttccgctgtgctggctgcgccaagggcttttcccgccacaaatacctcaaagatcaccgctgtcgtctcggcccccaaaaggacaaggacctgcaaacccggcggcccccccagaggagggcagccccccgcagttgcggcagtggtgggcgcaaggtgctgacccccttgcctgacccgctggggctggaggagctgaaggacacaggggctgggctggtgcccgaggctgtccccggcaagccgcccttcgcagagccggacgcggtgctgtccatcgttgtgggtggtgcggtgggcgcggaaactgagctggtggtacctggacacgctgaggggctgggctccaacctggctctggcggagctgcaggccggggccgagggcccatgtgccatgctcgctgtgcccgtctacatccaggcctccgagtgacggacctgaggtgtctgtttcctgggcaggcctgatgctcctgtttgggtccagggcccctgggggcagaccggagatccttaccagtggaagcgagccatcgagccattggcagaaatcctgctgaatgtcattcagaaacctcagcccatggtcgccctcctgtgcccctctcctgccggaaagccctgcaacattctagggttgggggcagggccatccacggtttctgggcagagccatggtggcaggagagagatggctgaagcctgagcagcccagagtcccgctggtctaggctggtggtcggggcccctgggagaggagacagggcattcctccccactctgtctccaggctgcctctgggtagcctctagtctgctgttcttcaggaggcctgccataaactcttcggagtttacgtgttgcaccttttcacagacggttccccacagcatcctcagacagctctgtgatgtagcttttaggaggcactcaggtgtcacggctagactgcagctatgagacagatctggcttcaaatccaagagttgccatgcacttgctgtgtgaccttgggcaagtcacttcacttctctgagccccgtgttcctcatctgtacaatggggcttacgatactactacctcatagggttgtcctggggatccagtatgatgaagtgcgccaggggcttggcatggtgcccggcacgcagaaagtgctcaataaatgtttttgtcat

SEQ ID NO: 1477 - DNA, 2244 bp, Homo sapiens
tccgtttccggccgaggctgcggccatggcagcatcttccctgacggtcaccttagggcggctggcgtccgcgtgcagccacagcatcctgagaccttcggggcccggagcagcctccctttggtctgcttctcgaaggttcaattcacagagcacttcatatctaccagggtaatatcaaaatatatgttcctaaaacatccctgagttcaccaccttggccagaagttgttctgccagacccagttgaggagaccagacaccatgcagaggtcgtgaagaaggtgaatgagatgatcgtcacggggcagtatggcaggctctttgccgtggtgcactttgccagccgccagtggaaggtgacctctgaagacctgatcttaattggaaatgaactagaccttgcgtgtggagagagaattcgactggagaaggtcctgctggttggggcagacaacttcacgctgcttggcaagccactcctcgggtaatggctgtgaagtgctgggctttgtctggggctccagggctggacatgcagacagtggtcacagtgcaattaggccagaaaggatcttgttcgagtagaagccacagtcattgaaaagacagaatcatggccaagaatcattatgagattcaggaaaaggaaaaacttcaagaagaaaagaagtaagttagagaaagtaccgctgggccctgttgcacggtgctggttgcccaggcgcatgcggacggagggtgtggggcacgtgggtctcgggacaggaagcccaggcaggtctcaacctggctgccactgcccacttgccaccctcatcctagagggagcacccagagggtccagcctcgctccccttctcctccacgctccacgcgtgaccccacctcgctccccttctcctccacgctccgcacgtgaccccacctcgctccccttctcctccaccctccgcgcgtgaccccacctcgctccccttctcctccaccctccgcgcgtgaccccacctcgctccccttctcctccaccctccgcgcgtgaccccacctcgctccccttctcctccaccctccgcgcgtgaccccacctcgctccccttctcctccaccctccgcgcgtgaccccacctcgctccccttctcctccaccctccgcgcgtgaccccacctcgctccacttctcctccaccctccgcgcgtgaccccacctcgctccacttctcctccaccctccgcgcgtgaccccacctcgctccccttctcctccaccctccgcgcgtgaccccacctcgctccccttctcctccaccctccgcgcgtgaccccacctcgctccccttctcctccaccctccgcgcgtgaacccacctcgctccccttctcctccaccctccgcgcgtgaacccacctcgctccccttctccaccctccacgcgtgaccccacctcgctccccttctcctccaccctccacgcatgaccccactttgttccaacccatgacgcctagcactgtccccaaagcagcagtgaatccgcaagcaggtgtagggctgtcctagcaggtctgcactgaggacatcccccacagtgggcatcctgagggatggcacccacggggcatgggccacatagctgagcggctgcagaattctgtccctcacagctcttgctataactgcagttgccggcctaaaccaccaacagtgggcatagttaaatatacccagaatactggtattggctgtcaccttagagtcatctgggtaggggagcctctcgtgtaccttctgacacttccaggtagcctcaaggtcactcaggtggggccatcctcccacgcactccagaagtcacagcatagacagtgtgggaggagaggtgaggtgccagcgcagggcactcctggccatgaggcgtctggtgtcccagcctctgcacctgccaacagagtgaacgaacaagctagcgaggcagtcagtgcacacctggagataaacacggccatgtgcagcaggggacgtttccggggtcgcgctggctggggagggctgtgtgcagagcccctgctgtaactgatgacaacagtcagggtctgtggtcaagcctgtgacatcctttctttcagtcgtcacgaccccgcagactgtcctccggataaacagcattgagattgctccgtgtttgttgtgattaccgagttaatacttacaaaaggataaaaataaactcctgcttcccaagg

SEQ ID NO: 1478 - DNA, 2259 bp, Homo sapiens
attgtgcttgcacgacttcccccggcccgcggcctgtgagcccaggtcctggggtgaaccgagcgctcgctcgttcgtcagaccgtagcgctccagcggctgtccttactgtgtagtagccaaagctgagggtgatgactgtgaaccagaacagactgcctcgctgaaaagtcacttggaactcttctgtggcatctgaagcagatggacgaagccaagagggccgagagtatctcagcacctagaaatggacaaggctggttattagaacaaagatttcgcaggtggtgagtctcaaaggcgaagctgaatgatttgatatttcatgaaattcagaaatgatttggagcttttcaaacctgggatatggaagaaactgacactcctgttctctgggaagaggcaagaatctgcatcaaagagccctggaagcaatcatggctcaactgtgatgcctttagaacatgaagtcctccaagaagatgccataggaatggcctccatcccagggcctggagagcagccagagacaagaagagtagcccaggagggcactggcagtcagtgctacactgtggcctgtcagtctcagagccaggatttaatcactggatctcccattaaccagtcataatgaagtaagaacaagaagatggggaagaggaagtgtaaaaccgtggcttaaatttaccaaggataagctgagtgtacttcagcagtcatttgcacagaatccttatcctaattttacaaccagggaaaaactggctggacagtctcttgtcctgtgtttgtaattgataactggtttcaaaataaaagccagaccaccacttagagagagacacagaatgttcactgccagggaactgcatgattcctctgccaaaggccacccatttacaagaatccaggaaaaccaggtggaatctcccaatgatgaccctgagcagaacttcttgtacccaggaagttctactgggtggagctggccactcttccgtggagacacaggggactcccaattaacatgatggctcaaataactgtagccttatggattaaaaggaaactaagctgtgatttggagtatccaggtgatacagaaaatggcccttgtcgatgtagatcagcattatttccttatccttctgcatctcctcctcagtattctgaaagggacaagcctgagatgggggaaagccagcatgcaaggccctcccctttgtgctgtgttcatggtgtgcacggagagaggcagcagcaggaggaacagaaaggttattttctttactgactctttcaaggacatcagcagaatggttgggaatgtcatcatgagcagcctcagcctcagaattaccaggagaagctggtcttccaggatcaggttctaatgtatatgagtcacaggatttagggaagcaggcactttcccttcagtcccagcagcatggttgatgttcccaagtaatggagagtccctgtgctctcagttgtggcacacacctttgcaaatagtgatcagatctccacaaacgcctcttgggtaggatatgcagcaacatagctggctgcagagcaacccagttcccaaatccagcagctcttggatgagaagtctgcaagtgtttactgctgggaccaggactgtgtttctaggaaatggtgctaggcttcagagagcatcatccacaggtcatcccacaaccatccacacagaagcctgaggaaaagggctctgcagagcttgcacataaagatgctgaactcaggaaggctctgtgagctgctggtctcttctggtagggcagcagtgtcctgagaaggtggagctagagtatggagaacaaaactaacaagcaccaaggcagcaagcaaggcaacccccaaatgacagcagttgccaaatccaaagcaatctgtgcttcagaagacagaggctctgcacagtccctgtctcagacattgtctcctccttagaagatacctaacaacagcactgtgggaggctgaggtgggtggatcaccaggtcaggagatcaagaccatccttgatctttagtagagacggtgaaacactgtctctactaaaaaatacaaaaaaaaattagctagccgtggcggcgggcacctgtagtcccaactatttgggaggctgaggcaggagaatggcctgaacccgggaggcagagcttgcagtgagctgagattgcgccactgcactccagcctgggcaacagagtgagactccatctc

SEQ ID NO: 1479 - DNA, 2116 bp, Homo sapiens
taaaagcggaagttacgcagggactcgcgagcgctgtggcggccctgaaaggatataggccgtggagggaagggggcgggcagacggcataggaaggcgccggaagtggtcccgcagaggcggggtgggagtggggctcccgaggcagtgcagttggctgtagctgggcgcctcggttaggtgcgctgtcagtcctttccgagtgcctggcccagtctctcccgcctcggcccaacatggacttcagagaaattctcatgatagcttccaagggacaaggtgtcaacaatgtgccgaaaaggtatagtttggcagtggggcctccaaaaaaagacccaaaagttaaaggtgtccaatcagcagctgtacaagcttttcttaaaaggaaagaagaggagctgagacgaaaagccttagaggagaaaaggagaaaagaggaactagtgaaaaagcgaattgagctcaaacatgacaagaaagcaagagctatggccaagaggacaaaggataatttccatggttacaatgggattcctattgaggaaaagtcaaagaagaggcaggcaacagaaagccataccagccaaggaaccgaccgagagtatgaaatggaagaagagaatgaattcctcgagtacaatcacgcagagtcagagcaggagtatgaggaagagcaagaacctcccaaagttgaaagcaaaccaaaggtcccccttaaaagtgccccaccacccatgaacttcactgatttactcaggctggctgagaaaaagcagtttgaaccagtggaaatcaaggtagtgaagaaatcagaagagcgacctatgaccgcagaagaacttagggagcgagaattccttgaacgaaagcataggagaaaaaaacttgagacagatggaaaactacctccaactgtgtccaaaaaggcaccctctcagaaagaaagtgtgggcacaaaacttagcaaaggttctggagacaggcatccttcttccaaaggaatgccccttcctcatgctgagaagaaatcaagacccagcatggccaatgagaaacacctcgctttgtcttcatccaaatccatgccaggagagaggatcaaggcaggatctggcaatagctcccaaccctcacttcgtgagggccacgacaaacctgtttttaatggagctggaaagcctcattccagcacctcttcaccaagtgtcccaaagacttctgctagcaggactcagaaatctgctgttgagcacaaagccaaaaaatctctgtcccatcctagccattccaggcctgggcccatggtcaccccacacaataaggctaagagtccaggtgtcaggcagccaggcagcagctctagctcagcccctgggcagcccagcacaggggttgctcgacccacagttagttctggccctgtgcctaggcgccagaatggcagctccagctcaggacctgagcgatcaatcagtgggtccaagaagccaaccaatgactcaaatccctctaggcggacagtcagtggtacatgtggccctggacaacctgcaagcagctcaggtggccctgggcgacccatcagtggttcagttagttctgcaagacccttgggcagctctcgtggccctggccggcctgtgagcagtccacatgaacttcgacgaccagtgagtggcttgggccccccggggcggtctgtcagtggccctgggagatccataagtggctcaattccagctggacggactgtcagtaattcagtcccaggaagaccagtgagcagcttgggacctgggcaaacagttagtagctcaggtcccactataaagcctaagtgcactgttgtctccgaaacaatttcttccaagaatatcattagccggtccagcaatggacagatgaatggaatgaagcctcccctatctggctacagagctgcccaaggtcctcaaaggcttcccttccctactggttacaaaaggcagcgagaatatgaagaggaagatgacgatgatgatgaatacgactctgaaatggaagattttattgaagatgaaggagagcctcaggaagaaatatccaagcacattagagaaatctttggttatgaccg

SEQ ID NO: 1480 - DNA, 2533 bp, Homo sapiens
gctgctgctgctgaaaaggccagccgggctggagagacctggcattggcgcatctgggaaccgacgtccgtgcgcggctggctagaatgctggactcgcctccgcagcgctggcctgcagggattagaagacatgtggggtcaaggaacaggaagctgacctggatggaagttgaacagtgatctttgctctctgcctggctcctgagtcctctgccatgttcctggagaagaggagccagccaggtcttcattcaaaccaaaccttggatgggatccatctgcctctgcaggtgaccgtaacaacatgcaaatggtgagttctgctggggggtcatggaagctccctggaggaggtgtatctggacaacagggaaagaaaggagctggagaagagaggcagaaaaattgggtcctggttcaggtgaagttttcccagctggaacaatgacaatgtcaatatcccacaaaggcggcttttgtttatttagcgcttgctgtgttcccacaagtcttcctctacctgccctctccccagccctcatctcactctcccagagccccagagcacaccaatggacaccatcacctctcgggcagatcagcacagagacgtgaagcacacaggcagctgctggaaaaataacaaggaattgcaatggtgtgcccctccgttgaatgcaagctctcttctgccttctcaccttgggcaagttaccttccgttccaggcctcggtttctccatgtgtgaaatgaaagggctggagagaaatctctcactattccccaatctacattcattgtatcccaaaccttctaatatctgttcaacgaagtgtaccaaatctcagctattggactgagactcaggggtctatctgacttgaattgaaaatgcaaattactgaagagggagggagggaggagtgctgaagattgaatggatttatcagatttccttctcctatggcccagatgcaggcctagtccaggcgattcccctggctcagaatctgccaggctcaagcattcattgacagcctactatgtaccaatcctgggctgagtcccaacccggggatgacttagaggaggccaggatgtggcctcatgttctggttgctctcacatttaaacaggctaaacccactttgcattgtatgttaggggtggtgcttgtgggacaaagggggctgtcagaacattctggctgccacatgaagttgactttgccaggacagactgggttgtgggggaaggcagctactgtaataatttggccaagaagtgggctgagcaggagcagggctgagggagggagagagggaatgagtaagaaaggcccagggtactgatttgactgggacttcagggacaggtgtggggcgagagggatgctggaagtgaaggagggaaagtgcagaggctttctggggattaataggcaatgatctctatgagggcgtggtgagtaggccccaaacatccggggacttccctgcctgccatccctctgtctctctcttcctttcctactgcccagggcctggccctgctgcacatgccctgccctggcccccagagtccccttctttcctggctgggagattaagactctgctgtgcctacagcattctcaacctcaagtcaaggtggccctttggagcccaggaggccacatggctgagtcagggctgagtcaccaccccccaagggccttgccatttcctgtggagaagcctctttactggcagggttctgtgctcaggtgggaaatctggagaggtcgggggcagggcttcatctacttttacccactaactccctagacactccactgggggtagagggttcctacacgtatgatgatcaaaacatgtgtctgtgcacatgggcccttatgcattcacaggtgtttgcctatgcgactgcatgtctgaatgttttatgtatatttgaatatagatagggaacaaatatttatggagcacatattatgtgtgcagccttttacgtgtgttactttctaataaccctaggaggcgtagatgcctcccaggctatggttgaaaatactgacatgcccaaggtgcaggaggtatgaatacctccccactgtggctggtaacaccccaggtttctccaactccacagtgatgggctttcctccagagccggttcctcaggggcaggagtgagaagtgtgtgtgtctgtatttatccttccaccagtggctgtgattggtcctgtggttggaaacagggtcaagtaaggcccttgggagtagctgggtgaatggacgatggtggcgtccaccttggacatggcacatacttctggtcgggtatccacgtggctggccaacccggacctgccctattaggggccatcgccctcatggctcatcagtgctgagtttcattgccttcttcgtaatgcaatactaatggatacaggcatgtatctgccgtacactagatgaaatgtggttatttgctcaggtagaaataaagactaaaataccaaagtggg

SEQ ID NO: 1481 - DNA, 2845 bp, Homo sapiens
tacaggcgtgagccaccgcgccggcctcaatgcactctttaaagagaagggcagttagcgacagggtctcatgttgttgcctaggctggggtgccctggcacgatcatggctgactgcagccctgtgcgctcaagtgagcctctcacctcagcctcccagggtgctgggactgccaacatgagccactggactcggcagtgtaaactacttttttcatgctattgcatatgtattgttcattgataatatatagaaacataactgggttttgtgtatggattttgtgccctgcaactttgctgaaataattaattagggttttttgtatgtggatctttagggttttctacgtagaaggtcgtgtcatttgtgaatagggagaatttgtctttgttttctttttcttgcccagttactctggctagggcctccagtgctgccctgagagcagtggtgagagaatccgtatattgttcctgaccttggaggaagagctttcagtccttcacagttgagcgtggtgtctgctgtgggtttcatgtagaggttttatcgtggtgaagaagttcctttctgttcttcagatatttccttaactattcttacctggatccagaaaggaaccacaagtgcgtctctctctttaagtctccgatagacgcacactggaagctgctgcatttgctggtccctcagggacttgccagaccaactaaaatgcacgaccccagagttttggaggacaaggtctcctgcccaccatggtcccagccagcagctccaggaacacaggctgggctccctgcagtggaggcggggttgaggaatgctggggtggcagctactcaccgtgtgcttcccagggagcatcacctgttcctctgaagccctgcctgggtggcttgagcttggaatcaagctgacccattttgagagagtggattctgagctttttcctagcgtaaggtcgttttgataaaggagtggtcctttggacatccctgttctgccgtcctgatacctctagttgtgggttttatgtgtagcacagggtgaagctttagttctcagaacccacccctgctgtaccctgtgccctcgccctccgctgtgtttgccctgaccctcctgtaccctgcgtccttgccctctgctgtgctcacccgaccctgctgtaccctgcgccctcgtcctctgccgtttgcccctgaccctgctgtaccatgccctcgccctctgctgtgttcaccctgaccctgctgtaccctgcgccctcaccctctgctgtgttcacctgaccctgctgtgtcctgcgcccttgccctctgctgtgctcgccctgaccctgctgtaccccgctgtaccctgcgccctcgccctctgctgtgttcaccccgaccctgctgtaccctgcgccctcatcctctgctgtgccctcgccctctgctgtgttcgccctgaccctgctgtaccctgcgccctcgccctctgctgtgtttgccctgaccctgctgtaccctgcgccctcgccctctgctgtgttcacccctgaccctgctgtgtcctgcgcccttgccctctgctgtgctcgcccctgaggcctcctgtccagagttgctctggctttggtggcttcaggtagattctgagggtcagtcagcacagaagcaactcagggaagcttcagaaaagaccatttctcaggttggagagacaaaaaacattttgcaaatggagatcagaaaccattgaatttgggaacctctttttttcagagtctctggtaagaagagtgaaagcaaagaagccaagaagtctgaagaaccaagaattcggaagaagccgggacccaagcccggatggaagaagaagcttcgttgtgagaggtgatgcctgcaacgcgaggctcgccctgcctgtcggggccggggctccatgcatgctcttcattgcagggaggagcttcccaccatctacaagtgtccttaccagggctgcacggccgtgtaccgaggcgctgacggcatgaagaagcacatcaaggagcaccacgaggaggtccgggagcggccctgcccccaccctggctgcaacaaggttttcatgatcgaccgctacctgcagcgccacgtgaagctcatccacacagaggtgcggaactatatctgtgacgaatgtggacaaaccttcaagcagcggaagcaccttctcgtccaccaaatgcgacattcgggagccaagcctttgcagtgtgaggtctgtgggttccagtgcaggcagcgggcatccctcaagtaccacatgaccaaacacaaggctgagactgagctggactttgcctgtgaccagtgtggccggcggtttgagaaggcccacaacctcaatgtacacatgtccatggtgcacccgctgacacagacccaggacaaggccctgcccctggaggcggaaccaccacctgggccaccgagcccctctgtgaccacagagggccaggcggtgaagcccgaacccacctgaggacggcagtgaggatgagcacctctagcagcctggactccgcagtggctgtgtcagcctcacccttcgtgtgcacccgcatgggagggtcggagggtgctgcccgcccttggtgctggaggcgggcttggtgtccggctcaagtagccttcctctgctctgggaccagtggtttattttcccgcaaacgctgagtgactcggggccggacagttcataaataattgattcctttccccactaaagcagtcgaggagatttgtaatccactttttagtgcaacaagagctccatgttatgcttgtaataaattatttacacggg

SEQ ID NO: 1482 - DNA, 2405 bp, Homo sapiens
tccttccgcctccgccagcgccgaggaatgtggcgaggccggctgggcggctcgaacgcctgggtccccctccgctcccagttcgcaagtgcggaggccagatgcgagagctcccgctgcggagacctggacgagggggagaagtcatcccagggttggggtctgtggcggggaccccaaggagagggagggtcccctggaagtgacgctgactcagccagtgaggagcgggcctgtctccaacaggctgcagagctgggaggagacttggagcctcatcccggagaaagggctgccggaggacgacccggacatcgttgtgaaaggttggctgtaccgggagccccgcggaggaggggcgcggccctggctgcccccgcgccgagcctggtttgtgctcacgcgggactccctggatcagttcagcagcagcgggaaaggggcgcggcgtctcgggagcctcgtgctcaccagcctgtgctcggtgaccggcccagagcgcaggcgtaaggagacaggtctgtggtcagtgactgtgtctggtcggaaacacagtgtccgcctccgctccccacgccaggcagaggctgagcgctggggggtggcattgcgggaagtgatcgcctccaaggcacccctggagacccccacccagctactgctcagggacatacaggaaagttgcggggacccagaggccgttgccctcatttacctgaggaacccgattctgagacacactagtggagccttgtatgccccactcctgcccctgccctatggagtcagcgccccaggtccccccgggctcccggctacccaagaccctgcggccctgcggtactggcaactcctcacctgcatgagctgcaccttccgacctgggggagctgtgcgggggcacctcctggggcacttggagaggaccgagcaggcactcccggactcggaactggcggaatatgcgcgcttcatccggaaagcgcagggccggacgcgcggcagagagctggtgccctcgctggcggagatttccgcgttgagccaacggcaggagctgctgtgtaccgtgcactgtccgggggctggtgcctgtgctgtggccatcgactcccacaccacggcgggggaggtggctcgagagctggtggggcggctgggcttggcccggagccgcaacgcattcgcgctgtacgagcagcgaggggcccaggagcgagccctggctggggggaccctcgtggccgacgtgctcaccagcttggccgcggaggaagctgggttggaggactcgcccgactccggatggagactatgtctgcgtcttcacggacctctgcaccctgaggggctgtccccagacggtcacgaactgcctttcctctttgagcaggctcacgctctgctgctgcggggccggccgcccccacccgacgacacgctgcgcgccctggcggcgctgcgcctgcagagcctgcatcgggacttctctccgcgggtgcccctgccccgcctggaccgcctgctcccgcccccggccccgccgcgcgaagacccgccccgcccgacccccaggccgcccccttccgctgccctgctggccggggcgctctggagcccgggcctggccaagaggcgggcggagcgggcccggcgcggcggggccggccgcactgcgggaagcattgcccgcgagggaggaggcggcgccggcacggcagctgccgtgctgggcggctggaagcggctacggggcatgggccgagctgaggccatggccgcctacctggccctggcggcgcagtgtccggggttcggcgctgctcggagcctggtcggggtgctccacagaagctgtgcctgggcttgggagccaaggccatgtccctctcccggccaggggagacggagcccatccacagtgtcagctatggccatgtggccgcctgccagctaatgggcccccacaccctggccttgagggtgggagagagccagctcctcctgcagagcccccaggtggaagagatcatgcagctggtgaatgcctacttggccaacccctcccccgagaggccctgcagcagctcttctcctccatgccaagacctgccagacacctcccctcccagccagcgcccgggcctggacgagccccagggacagtctggctgcttggggcagctgcaggactgagcctgccaagaggtcacgacttccctcctgcctgcagcctgggccaggactgctctgagatttgagggaaacatggacccttttggccctgcagggacagggcacatcccacacccaagggctacaatgggtgtgggtaattttctagtttgtttcttaatttatttgtagaagagaagcaaaaaaaaaaaaaagtttcttatttacac

SEQ ID NO: 1483 - DNA, 2354 bp, Homo sapiens
aaagcgcggaaggtcgcggtctcggcttccccggaactttttgctcgcttcgccccgcccccttcccatccccgaaccccgctttccggcccgcggcgaccgccggcaactgttgtggctgccgcattgctcccgccgggctgtagctgagcgcggagcccgtgggggccggtgagtttgagttcctgagatctagttggtgagagacatgatgttctactggttgctgtcgattgttggaagacaaagagccagcccaggatggcagaactggtcctctgcaagaaacagcgcatcagctgccgaggcgcgttccatggccctgcccacccaggcacaggtggtcgtctgtggaggtggaatcacgggcacttctgtggcccatcaccaatccaaaatggggtggaaggatattgtccttttggagcagggcaggctggctgctggctctaccaggttctgtgctggcatcctgagcactgccaggcacttgaccattgagcagaagatggcagactactcaaacaaactctaccatcagttagagcaagaaacagggatccgaacaggttacacaaggacaggctcaatctttctggcccaaactcaggaccgactgatctccctgaagcgcatcaacgcagggctgaatgttataggtatcccttctgagatcatctcccccaagaaagtggccgagcttcaccatctcctcaacgtgcacgacctggtgggggccatgcatgttcctgaggatgcagtggtgtcttccgctgacgtggctcttgccctggcaagtgctgcctcccaaaatggtgttcagatctatgaccggacatctgttcttcaagtaatgggcaaaaaaggtcaagttactggagtggagaccgataaaggacagattgaatgccagtattttgtcaactgtgctggccagctattgtggatgctgatggaagaatttatattcggaactggcagggtggcatcctgtctgggggctttgagaagaacccaaaaccaattttcactgagggcaagaaccagctggagattcagaatctacaggggactgggatcactttgagcctctgttgagttcccttctgaggaggatgccagaattagagactctggagatcatgaagttggtgaactgcccagagaccttcgcatcagacatgaggtgcatcatgggcgagtctcccgcagtgtagggctactttgtcctggcaggaatgaactctgctggcctttcatttggtggaggagccggaaagtaccttgccgaatggatggtacatggttatccctcagaaaacgtttgggaattggacctgaaacgttttggagccctccagagcagccgcacctttctgcgccaccgggtcatggaagtcatgcctttgatgtatgatctgaaggttccccactgggacttccagaccggtaggcagttacgcacctctcctctctacgaccggctggatgcacagggagccaggtggatggagaaacatggatttgagaggccaaagtactttgttccccctgacaagggtaagaagtcacattctcatttttgctccttttttttttgtcctgggaattaataaaacgtattttcaaatgcataggctagaatgtgttcacagaagaaaaagaaccacgtggactacactaaactctacagggccttgtgatttttccattccgtagacctcctggcattggagcagagcaagactttctataagccagattggtttgacatcgtggagtctgaagtcaagtgctgtaaggaagctgtgtgtgtcattgacatgtcctctttcacagagtttgagataacagtaagtatttgggaaccaaagtaatagattaggaaactttgcatatttattgaatgccttttgtttttcatcttcaaaactgattcctgactgggtgcagtgggtcatgcctgtattcccagcactttgggaggccaaggggggcgtggatcacctgaagtcaggagttccagaccagcctggccaagatggtaaaaccccgtttctactaaaaatacaaaaattaaggccaggagtggtggctcatgcctgtaatcccagcagtttgggaggccgagacgggtagatcacctgagatcaggagttcaagaccagcctggccaacatggcgaaaccatctctaccaaaaatacaaaaaattaaccaggcatggtggcgggcacttgtaatcccagctactcgggaggcaggagaatcgcatgaactcatgaggtggaggttgcagtgagctgagattgcgccactgcactcagcctgggcaacagagtgagactccatctc

SEQ ID NO: 1484 - DNA, 2414 bp, Homo sapiens
gcacacacaggtctgtgcacacacatacatacgcatgcacaggcacctgtgtacacacatgcagatacacccacagcatcccatctgtgccacacacagacataggtacatggagacagatgcacacacaggtctatgcacacacatacgcatgcacaggcacctgtgtacacacacgtacagatgcacccacaggatcccatctgtgccacacacagacgtaggtacatggagacagatgcacacacaggtctgtgcacacacatacatacgcatgcacaggcacctgtgtacacacacgcagatacacccacagcataccatctgtgccacacacagacgtaggtacatggagacagatgcacacacaggtctgtgcacacacatacatacgcatgcacaggcacctgtgtacacacatgcagatacacccacagcatcccatctgtgccacacacagacgtaggtacatggagacagatgcacacacaggtctgtgcacacacatacatacgcatgcacaggcacctatgtacacacatgcagatacacccacagcatcccatctgtgccacacacagacataggtacatgaagacagatgcacacacaggtctatgcacacacgtatgcatgcacaggcacctgtgtacacacatgcagatgcacccgcagtatcccatctgtgccacacacagacatacgtacatggagacagatgcacatacaggtctatgcacacatgtacacatgcacaggcacctgtgtacacacatgcagatgcacccgcagtatcccatctgtgccacacacagacatacgtacatggagacagatgcacatacaggtctatgcacacatgtacacatgcacaggcacctgtgcacacatatgcagatgcacccgcagtatcccatctgtgccacacacagacatacgtacatggagacagatgcacacacaggtctatgcacacatgtacacatgcacaggcacctgtgtacacacatgcagatgcacccgcagtatcccatctgtgccacacacagacatacgtacatggagacagatgcacacacaggtctatgcacacatgtacacatgcacaggcacctgtgcacacatatgcagatgcacccgcagtatcgcatctgtgccacacacagacatacgtacatggagacagatgtacatacaggtctatgcgcacacgtacacatgcacaggcacctgtgcacacatacatacagatgcacccgcaacatcccgtctgtgctgccctattaggtttgtggccatttggggaatcttcctaaaaccctaaaagctagggcaggtctgcttgagcaggagcagcagggtctgggggacccctgagggcaggacagtcagggacccacagttgagctgggcccgctgagccctggatccttcttggtgtcttatcctggccagcaagcaagtgtgagctcctgtgggtctccagaggcccatgaggaccagtgggccaggtgggaacaaggcttggcgtcctcttcaggggggaacaccagggcaggcctgaggaggcctgtgtccccagcctgtcattgctgtggctccgcttctcagggagcctaggaagaaggtgtggcaagagcccgaggcgctggctgcacctggcggggcctgtgggcgtcagtttagacccatccattctcactgcagcattccagggtttgcccttatgctcggctgtgtgagggtgaggatgatgctgtgggggcatgcatgctgggtgtgtttcagccttctcttccaccaggcatcctgacatcgaggcccaggagagaggagtccggtgtctacttgagaaacagctccccaatggcgactggccgcaggaaaacattgctggggtcttcaacaagtcctgtgccatctcctacacgagctacaggaacatcttccccatctgggccctcggccgcttctcccagctgtaccctgagagagcccttgctggccacccctgagaacatgcctacctgctgggtgccgtcttggccttcaagtcacaggacgcagcgattccctgccctcttcggtgttattacacaggcaggacttcagtgtcagtatccctgccttcagtcttctttagaaatcacatctgtgttcaatccattgtttagagggagtgtatttttcctgttccatgaagaggactttttgttcacaattggatcacaatgcagaggagtctgttcctcccccgtcggcttctcggtgctgggagggtgacctgtcccagatgactcatcaccctgacatgctcttgacaaaggacaccaccaagaggagatggcagctgtaccggtgcagcctctgtctgagggggatatttgcctcagtgtgattaaaaatcagtcatg

SEQ ID NO: 1485 - DNA, 2198 bp, Homo sapiens
cacggcctgagcccacagggtggcagatgggcacaggggcacagaggtacccccagacccctttgtgtcctaggagagcaagagcagcgcatggacctgagtcacccagtgcacgcagacaactgcgtcctggaccctgacacgggagagtgctggcgggagcccccagcctacacctatcgggactacaggtgggcagcccctctagtggtcaggcaggtgggcagacaaaggtcatcccactgccggcctgggcctgggttggggtctcactgcctcttgcttttttccctccccagcggactcctctacctcaacgatgacttccagggtggggacctgttcttcacggagcccaacgccctcactgtcacggtgcgtggagtggggggtgtgacggtgtgacaaagggcccagctgtggggtcaggattcaaaacagaaggctccagaggcaaatgcagggaaatggccagggcttttaaccctttcacttccccgcctccgcagccctcccgctgcttcctccgtagcaaggtctctaagtggccgaatcaaccctaccatcagtatttgtctcgcctcctaaagaagggtgaatgaagcacagcttgcaggtgcctccaggactccatggccctattctagggatttggggaacttgaaatagtccttcctctttgcagcgaggtgagcacagtggctggcgcacagataccagggccgccttgactggggctcggattctgaacctttctgaggtttagtttcctagactggggtgataataatagtacgtattttaaagggtcattgtaggaagtaatttaggtaatgtacctaaaagaatgaggcagcgcctggtaatgataagcaattaatgaatgttaggtgggaaatttccggacaccaggggctaggattgggtaggaggagaggggcagtgattgttcatctgggtgtggggtgtgaaaatggttccaatatctgtatccccttctgcatagagtctggtactgcatgcacagccccagattgcttcaagccctggattcaaagggctgagtgggaaaaatcagggtaccaggggtcaggaaccaacaggagaccatccgtggagacccctttttcctttggttcccaactcctcttgcatttttgctctgcaagttgaagctgatttctcatttgccccaagctagtccctgaattaaggagtaggaagtggtagcgagagagctgatcctctctgtgcccctgtccccatcctgctctagggagtgagggccaagttctctgagagagccaatccctggagctgaacctgccctcatccctccaggctcgggtgcgtcctcgctgtgggcgccttgtggccttcagctccggtgtcgagaatccccatggggtgtgggccgtgactcggggacggcgctgtgccctggcactgtggcacacgtgggcacctgagcacagggagcaggtaaggagcggggtaggaagggatgtggttctcctggtgcgtgaagggtgggcaaggagcccccgagaaggctcacagtcggtgagggtcaggggctgagctgacccagggaaggtgggtgcagggaatgggccacactctcctccccaaccccaggagtggacagaagccaaagaactgctgcaggagtcacaggaggaggaggaagaggaagaggaagaaatgcccagcaaagacccttccccagagccccctagccgcaggcaccagagggtccaagacaagactggaagggcacctcgggttcgggaggagctgtgagtggctgagccagctccttgaggatgtggccacttgacctgtggaaggccatcttgatgccaggacgcacaggaagcccctgtgtgacatcaggagcagaacagcaagctctctgtccctgcacccccaccatcttggggacctacaagggcctggactcagaggacagtgcacaggctagcctggagctcaccaggcctggggagctgggacggggccccgctgccggacctgcagccctggacagatggggaacactgtgcctccctgaacggaaatggcaggggaggaggctgatgctttaaatgaagaggatggtggggttgggaggtataaccctgctcctctctcccagtctgtgcaataaaggtcgtgaagatctctcagccaggggc

SEQ ID NO: 1486 - DNA, 2428 bp, Homo sapiens
ctttctccacctccttggtgactccaagtactcacacggtcatcatccctacccacacacagatggccacttctgcctccatccactcaatgccaacaggcaccattcctccaccgaccacgatcaaggccacagggtccacccacacagccccaccaatgacaccgaccaccagtgggaccagccaatccccaagctcatttagcacggccaaaacttctacatccctaccttaccacacttcctcaacacaccatcctgaagtcaccccaacttctaccaccaacatcaccttcaaacacaccagtacaggcaccagaacccctgtggcccacaccacctcggccagcagcagcaggctacccacacccttcaccacacactccccacctacagggagcagtcccttctcttccacaggtcctatgactgcaacatccttccagaccaccactacctatccaaccccatcacaccctcagaccacacttcccactcacgttccacctttctccacctccttggtgactccaagtactcacacagtcatcatcactacccacacacagatggccacttctgcctccatccactcaacgccaacaggcaccgttcctccaccaacaacgctcaaggccacagggtccacccacacagccccaccaatgacagtgaccaccagtgggaccagccaaacccacagctcattcagcacagctacagcctcttcttccttcatatcctcctcgtcttggctgcctcagaactctagctcaaggccaccgtcatcacctatcaccacacaactcccccacttgagttctgcaaccactcctgtttccacaactaatcagctgtccttctcattttctcccagtccttctgccccctctactgtttcttcttatgtgccctcctcccactcctctccccagacttcatcgccttctgttggcacatcttcctctttcgtgtccgcccccgtgcactccacaaccctgagctcggggtcacactcctcattgtccactcatcccacgactgcatcagtgtctgcatctcctctttttccttcttctccagctgcctctactaccattagggccactctcccccacactatctcctctcctttcaccctctctgctctactccccatatccactgttaccgtgtctcccaccccatccagccacctagcctccagcaccattgcatttccgtccacgcccaggaccacggccagcacccacaccgcccctgccttctcctctcagtccaccacctcgcggtccacttctctcaccacccgagttcccacatcaggctttgtgtcactcacctcgggggtgacgggtatccccacctctccagtcaccaaccttaccaccaggcaccctggtcccaccttgtcgcctaccacacggttcctgaccagctccctcactgcccatggaagcacccctgcttctgccccggtatcttctctcgggacacctacgcccacctcacccggggtctgcagtgtgcgggagcagcaggaggagatcacgttcaaggggtgcatggcgaacgtgacggtaacccgctgtgagggcgcctgcatttccgctgccagcttcaacatcatcacccagcaggtggatgcccgctgcagctgctgccgccccctccactcctatgagcagcagctggagctgccctgccccgatcccagcacgcctggccggcggctcgtactcaccctgcaggtgttcagccactgcgtgtgcagctctgtggcctgtggagactagcagggtcgctgcctgctctcctggggctgaaggactgcagatgacagacaggaaaacacccaccagcccccttcccgcttgtgccagcagctgctttcctggtcaccaggcctggcccccaagtgccctgggccgtggctccctggggcaccggttggagaggggctgccaagcaggggctcagactaccacactcctgcagaccctgagccagcagagagggactgaggcggacagtggtcacggacctcccaggcacacagggcactcccgaccacccctgcccactgtccaacacctcccagcccctgaacttggccccagccctgctgggcccagaaccctgcagatgaagccacagagcaggcgctcgaccagacccatcaggggcgaggagggcacggaaacctgtgccgagatgggggcaagaggcccaggcagccaccagcacagagaagaggagatccccagagtcagggagggcagagggtggcagcgagggcagggcagccgcccccgctcccagccaggcagaaggcccccaccagcaccacacccatccccagcagcctgtccttgggagagggcgtcacccggtcagagactccaaataaaccggttcttgtcaaggc

SEQ ID NO: 1487 - DNA, 2387 bp, Homo sapiens
agaacgaccttccaggcctctgggatgagcgtgtccccagaatctgctctgttcaccttcatccaggcctttgcctctgaaggtgctcacaggtgacgactgagtggctggggcaggcacccatgtcgggacgggatgtcgcacctgtggactccaggggccaggaagaggatccttcagcgacctgcccgggagcctggaagcttccacagggcaggagggtgtgttctgcaaactgtaccgtgcaactgtgagggcagctgctgcctggccccccgcaggccccgaggctcccgtgctccccttgccccgtccatatcttcctggcttccctcccacaggctcaagggcaagagtgtgcaccatgtggacaccgtgtccacccgctggccgtgggtgctccggcgtctggggagcgtctcgggtgctccgggagccatcactctccagttttctctgcaaaggtccatgatgatgttgtggctgagcttagaaagagacttttttttatctgcccaaaatgcttggacgttttctgtccccttcacttcactcctggaaaagacaaggctcaggacaatctgtgggtgtctctcttcttctgaagccaagagccacttttgggtttttttgttcgtttggatggagtttcgttttgtcgcccaggctggagtgcagtggcatgatcttagctcactgcaacctccacctcccaggttcaagtgattcttctgcctcagcctcctgagtagctgggattacaggcatgtgagaccacgcccggctaattttttttttgtttgtagagatgaggtctccctatgttgcccaggctggtctagaacttctggtctcaagcaatctgcccgcctcggcctcctaaagtgctaggattataggtgtgagccatcacgccaggtcaagagccactttctaaagtaacctttggacatgctgcccccccctacccaggccctgggtcccctcccagctcctggggctcctccaccttacagggctctcccgaggaggcctggcccacccaccccactctctgcatggatgggcagaggctctctccctgcccactctgggccttgctgacacctgggccttgcctccatgtcccaggtgagcctggcctctctctccggctttcagaatcacacactagcaggtcccaagctagcggcacagagctcttccttctgcctcaacaccacccacccttctcagcagaaggcccagcacatcctgcccctgctcctcccaccgggctccagagagagctgccccgtgatccatgcacacaccagtgcacaggggtccacaccgccaggcgacagcacgctgggtgcagtgtctgcttgctctgcctcctgcctcaggacctgggcccctcagacacccaactgctccctcccggaggctcgaaagccagcaaaggaagggataaccatcatttattcatctatccatccatccatccatccatccatccatccatccatccatccatccatccatccatgcatccatgcatccatccatccaatccatccattcatccatccatccatccatccacccacccagccacccattcacccatctgtccatccatccatccatccatccatccacccatccacccacccattcacccacccattcacccaaccatccatccatccatccatccacccacccacccattcaaccatccatccatccacccacccattcacccacccatccatccacccatccatccatccatccacccacccacccaatcaaccatccatccatccatctttccatccatctatgtatatttatgtattttaaggaatttcctcatacaattgtggagtctgaaatctgcaaggcaggtggcagcctggagacctaaggagagctgcagttggagtcccagggcctctgctagcagaattccttcttgcttggggaggtccgtcttggttttcttaagaccttcaactgattgaatgaggcccacctgcattttggagagccacctgcttccccaaagtccactgattgaaatgttactctcagccaaaaagcaccctcccagaaacatgagaaccagaattagtgcttgaccaaatatctgggcactgtggcccagccaagttgacacaattacccatcacaatgctggtgccagggaagggaaggaaaagctcttccctgtgagctggtgacctggggtcctgggctgggatagctcaacaggaagtaaatgtccctctccagagacagcccctcctgtgtctacagatgtcctgatgtaacatgtcttttaaaatgagggtttgttcatgaaatttttttcttaaccaataaaatggattaagtag

SEQ ID NO: 1488 - DNA, 2482 bp, Homo sapiens
tttaccctactgatgacgtgttgttgccatggtaatcctgctcagtacgagaggaaccgcaggttcagacatttggtgtatgtgcttggctgaggagccaatggggcgaagctaccatctgtgggattatgactgaacgcctctaagtcagaatcccgcccaggcggaacgatacggcagcgccgcggagcctcggttggcctcggatagccggtcccccgaattgggggtgaagcgatagcgttttgcccgcattcggggcgcgcggagctggggggtccctgtggggctcccggagttaagatggcgtcctcagcggagggggacgaggggactgtggtggcgctggcgggggttctgcagtcgggtttccaggagctgagccttaacaagttggcgacgtccctgggcgcgtcagaacaggcgctgcggctgatcatctccatcttcctgggttacccctttgctttgttttatcggcattaccttttctacaaggagacctacctcatccacctcttccatacctttacaggcctctcaattgcttattttaactttggaaaccagctctaccactccctgctgtgtattgtgcttcagttcctcatccttcgactaatgggccgcaccatcactgccgtcctcactaccttttgcttccagatggcctaccttctggctggatactattacactgccaccggcaactacgatatcaagtggacaatgccacattgtgttctgactttgaagctgattggtttggctgttgactactttgacggagggaaagatcagaattccttgtcctctgagcaacagaaatatgccatacgtggtgttccttccctgctggaagttgctggtttctcctacttctatggggccttcttggtagggccccagttctcaatgaatcactacatgaagctggtgcagggagagctgattgacataccaggaaagataccaaacagcatcattcctgctctcaagcgcctgagtctgggccttttctacctagtgggctacacactgctcagcccccacatcacagaagactatctcctcactgaagactatgacaaccaccccttctggttccgctgcatgtacatgctgatctggggcaagtttgtgctgtacaaatatgtcacctgttggctggtcacagaaggagtatgcattttgacgggcctgggcttcaatggctttgaagaaaagggcaaggcaaagtgggatgcctgtgccaacatgaaggtgtggctctttgaaacaaacccccgcttcactggcaccattgcctcattcaacatcaacaccaacgcctgggtggcccgctacatcttcaaacgactcaagttccttggaaataataactctcttagggtctctcgttgctattcctggccctctggcacggcctgcactcaggatacctggtctgcttccagatggaattcctcattgttattgtggaaagacaggctgccaggctcattcaagagagccccaccctgagcaagctggccgccattactgtcctccagcccttctactatttggtgcaacagaccatccactggctcttcatgggttactccatgactgccttctgcctcttcacgtgggacaaatggcttaaggtgtataaatccatctatttccttggccacatcttcttcctgagcctactattcatattgccttatattcacaaagcaatggtgccaaggaaagagaagttaaagaagatggaataatccatttccctggtggcctgtgcgggactggtgcagaaactactcgtctcccttttcacagcactcctttgccccagagcagagaatggaaaagccagggaggtggaagatcgatgcttccagctgtgcctctgctgccagccaagtcttcatttggggccaaaggggaaactttttttggagaaggcgtcttgctttgtcacccacgctggaatgcagtggcgggatctcagctcaccgcaacctccacctcctgggttcaagtgattttcctgcctcagcctcccaagtagctgggaatacaggcacgccaccatgcccagctaatttttgtattttcagtagaaacgggatttcaccacgttggccaggctggtctcgaactcctgaccgcaagtgatccacccgcctccgcctcccaaagtgctgggattacaggcgtgagccaccgtgcccggcccaaaggggaaactcttgtgggaggagcagaggggctcacatctcccctctgattcccccatgcacattgccttatctctccccatctagccaggaatctattgtgtttttcttctgccaatttactatgattgtgtatgtgccgctaccaccaccccccccatgggggggtggagaggggtgcaaggccctgcctgctccactttttctaccttggaactgtattagataaaatcacttctgtttgttcagttttt

SEQ ID NO: 1489 - DNA, 2329 bp, Homo sapiens
ggatctgcgggggtgggggagcgcacctgcgcacaggctccgcgagctgcgccgtgcgtgggacccgaaatggctcactcgcaagaacgggacccgtgtgcccgggagcgtggacggaggacacgcatcagtacaaaagggcggtgtggggcttctgccacccgcggccagccgcgatgcggaaggggattctgacggagtcgtggtcacaccagctggccctgcgcagccccatgggaaataggcctggaattcctgtcgggaggaggctgggggaaggggagccagcagggattccagagttcctgccataggccggcctttggccatcagggaaagcccagctagctgtcgcctcattgcggcctcccgagtccaaagctcctgcctctcggccacttcggcaggcccagctcccacctgccagtggcctcttcaggcccatggggctcgttcctcacaacggcctttccaggcccagtttttcccttccggcggcctctccgggcccagaacctcctcaagtcggcctctccagagccacttgcaccctccgggcgtcctctccgggcccagctcttcttcctggttgcgtctccaggcccgactcctgcctctcaacaacctctttggactcagtgcctacccatctcctggcggcattggtcggcccacagcttcctcaagccaagctccccaggcccaggtcaggcctcacggtggcctctccaggatgagctcctgccctccgatggcatctccaggccccaaatggtctccggtcggtgggctcctccacgccaagcttgggcctcccggcgaccgctgcaggcccaagttgtcctgaagtcgacctctcctggccctgcctcccagcaagtaagcaagctcttttggctcaactcctgcccagctcccaaccgcctttctaggccccgaactttctccagccaagctctgagggcccacctcctgcctcctggtggcctgtacaggcccagcactggttggagaacagcctctgcaggccccgcccttgcctaccaggggcctctccaggcgcagctcttgcccccacggcggcctcccggggacttgggcctgggaggtcgcggtggggcgagagctgggcctggagactcccctggggggcaacagcggggtctgcacacacccttctccagctggagctgggactgttcagtcactgggagaagggatgtgggtctgaggagcttggttgcagaaacttcggggtctacaaaggccggcgggagctgagccaaaagagcttgtttgctgggaggcgggagatgcagccaggaggaacagctgggccatgcgggaggcagaggccgggcctcctcaagtcggcctctcagacccacttgcagcctcccagcgtccactctgggcccagctcttcctcccggctgcgtctccaggccggactctggcccgactccaggtcccaacaacgtctttggactcagctcctgcccagctcccagaggccctggtaggcccacgacttccctaagccaagctccccaggcccagctcaggcctcatggtggcctctccaggctcagctcctgccctccgatggcatctgcaggccccaaatggcctccggtcggtgggcttctctaggcccagcttgggcctcccggtggcctctgcaggcccaaatcgtcccgaagtcggcctctccaggcccagctccggcctcccggcggcctctgcaggcccaagtcgtcctcaagtcggcctggaagtgggcctggaagagcagcaagtcggcctccccgggcccagctccgtcctctcggcggcctctccaggtgcaaaacttcctcgagtcagcctctccaggcccagctcttcctgcctcccagtggcctctttcggcccagcccagttcatggctctcggcggccttcccaggccccgcttttgacttttggcagcctcttcaggcgcagaacttgatctccagtcggcctttgcaggcccggcctcctgcctctcaaaggcctgcacgggcccggccttggccttggcctcacagtggactctccacgcccagctagctctcgcctcactgcggcctcccccgtccaaagctcctgcctttcggccacttcggcaggtccagctactgcctgccagtggcctctttaggccaagctcattcctcacaacggcctttccaggccccgtttttcccttccggcagcctcttggcctctaatttgtttatcttttgtgtataaatcccaaaatatggaattttggaatatttccaccattatatattttggtaggt

SEQ ID NO: 1490 - DNA, 2100 bp, Homo sapiens
agcgcggggcaggaggagtacctcggccaagaaaattatgcatgcgttagggaagctctgagagaatggctgtggaagctctccactgtggtttgaatccacggggtattgatcaccctgcccatgctgaaggtattaaactgcaaattgaaggtgaaggtgtggaatctcaatccattaaaaataaaaatttccagaaggtgcctgaccagaaaggaactcccaagcgactgcaggcagaagctgagacggctaagtcagctacggtgaagctatctaaaccggtggctctatggacccagcaggatgtctgcaagtggttgaagaaacattgtccgaatcagtatcagatctacagtgagtcattcaaacagcatgacataactgggcgagccctgctgagacttactgacaaaaagctcgagcgaatggggattgcccaggagaacctccggcagcacatcttacaacaggtgctccagctgaaggtgcgagaagaagtcagaaatctacagttactcacacaaggtaccctattgcttcctgatgggtggatggatggggagattagaagaaaggccaccttactattaggacagacaggagtcagggagaatttgttattgtttcttcacagaatttccatcatagaaaatagtatacagatttaagattacttccctttgaaaacttttctcatagctcactagggagaaggatgcacaaataagtaatggatgagcaaacagaattacctgagctaacttcaaggtggtcacgtacagttgtatggattgtgtactgcacaaccccagagaataccagtcacatcaatcagggtacgattgcactcactagagttgtataatgtgcagcctgcacaactgtacagtccagctgtagctatcttcacctgcgccaattgtgagggcgctttagcatttgagtgattcaatagttacgatgaccagtgatataagtggagtttttgttgtatttttgttttgcttttcaccggttagtgggagaaaaacattttagatatgtattactatacatgaatgtattatacacacacactttagagattgtaagaaccccatttagcttcttgaaagtggaataatttttataatagactatagtgaatctaaaactacactgttaagagtatataattcttaacaggaattataaataacttcaatatgatgagagcacttaagatctcaataactgtggaagtgacaaaataaagctagaattcgaagaaagccttaagttacactatatgtaactgatatgtctacatgagatttggatgctatcaaccttcattggctataaactttgtttgttttattttagcgtccattgtacatcgttttaaatgaaaggatgataaaatatgtgtttttgagagccttgagtatttgtcattctgcagaatattgtaattgcatgcataccgatattggagaaatctgggtcagccaagtttcatgttattgcatttagattaacctagtaatagtccatttgcctagaggaaataatgtgctccctgaaagatgactattctagaaggataaatatagatttcaagtgatcgtaaaatagtattgtttgtctcatatgcattatttgcattttgtcctcagagatttccaatggtgaatttactggtatactaagtgatttaaatttgaatgtgaaatactgataggcttttaagcttcttttaagaagtagatagaaatacgaagattatgataagaaagtctgtcacagtgctatttggaaaacggaaaatttacaagcaacctagaggtccagcaatgtgaaaagaatcaagtaattctgcttaaattcataagattcagtataatgcccagttattaaaattacatctttaaagaatacatgacaacatgggaaattacgtaagtcatacaaggtgggaggaaaggtcatgtgtaaaattgtatgcataatataagcccaattttgtaaaaaccatatattcttatatgtacagaaaaaaaggactgcaagtaaatatgccaaccattttaataaaggatctctctggattgtggg

SEQ ID NO: 1491 - DNA, 3048 bp, Homo sapiens
acatgtggcttgccaattatcccagcactatttgttgtatagggtgtacttttcttactttgtttttgtttactttgtcaaagatcagttggctgttaagcatttggctttatttctgggttctctactctgtcccattggtcatgtgcctgtttttatgccagcactatgctgttttggtgactatagctttgtagtgtagtttgaagttgggtagtgtgatgcctctggattggttctttttgcttagttttgctttggctttgcagactcttttttagttccaaatgaattttggcattttttttttctagttctataaagaatgatgatggtacattgatgggaactcattgaatttggagactgcttttggcagtatggtcattttcacagtattgagtctacccatccatgagcgtggaatgtgtttccatttgtttgtgtcatctatgatttctttcaacattgttttgtggttttccttgtaggggtctttcacctccttggtttggtatattcctaggtgttttatttttacagctattataaaagggtttgatttgattctcagcctggtagatgttggtgtatagcactgctactgatatgtgtacatagattttgtatcctgataaatagatttattgtgtatttctaaatagcaataagatttgaaatattcccaacacaaagaaatgatcaatgtttgaggtgattaatatcctaaagaccctgacttgatcattacacattacatgcatgtaccagaatctcacatggaccccataaatgtgtacaattattctctatcaaaaacatttttttttaagaaacatgcaggaatacactctacctcttccttgctgtgtctggatattgtcacatgaggacttgacatgcggattgtggcagcctctgtgaccaagagcggaagacaacagcagcatagaaacctcaaatgaaaaatctaacatctcaagctactaatttagccaaccttggcatcagctatctctggtcttagtatatgaggcgataagcccccactgttcaagttgggtgtctatcaattgctgcagaatagaagttaatgaggcttcctcctcctggatcccctactagaccctgacatgcccattcagtcacaggcagaaagggaagcacagggtaaggagacctggctgactgtgccagacgcagatcttacctgtcctgcttagaacactcaaagctcaattggttaaacaaaaaaaggaaaaatacaataaggagtatagcactccccagatgcaacttaatctaacactctatactttagattttctagacatacatagaaatcagaccactacttctgcagaacattttactagtaaaaataataggccacgtgagggaaaactgatttggtggaaagacaacaaaaacaaaatatgggaaataggtaaggtgataatatgggggagaggttgtgcttgtgtttcacccggagaaaatcagcttcctgtttggatacccactagacatttgaagttctacaatgaacctatcaagatgcaaatgaaagtgcctctgcagagacagaaaacccgcagtcgagcatcatcgactcgcagggtgaacaaaatggtgatatcagaagaacagatgaagttacaatccaccaaggaaacggcacatgttgggagccagggagaggaagagaaagaaaaagagacagagatcagagagagacacagaaagtgagactggggagagagacagtgtaaaagagagagagagagagagaccgtaaaagaagggagacaaagagataaaaggtgcgagtgagcaggtgaggagaaagactgaaaactatgagaaacagcaactaagacacaaaggaggtgggagactggcttggtgccgcagcacccacaccgtcctcttgccccgtcacttgggttaaaaccaccggaaactccactattgcaaattttttattaatccttgtacgtctgtcctttctatttttagtctacaggtgtatccagcagctccagagagacagcgaccagcgagaaggggccatgatgatggaggtggttttgtcaaaacgaaaatggggatatgtagggaaaagaaagagagatcagactgttactgtgtctacatagaaagggaagacataagagactccattttgaaaaagacctgtactttaaacaattgctttgctgagatgttgttaatctgtagctttgccccagccactttgccccaaccactttgacccaatctggagctcataaaaacatgtgttgtatgaaatcaaggtttaaggcatgtagggctgtgcaggacgtgccttgttaaccaaatgtttgcaagcagtatacttggtaaaagtcatcaccattctctcatctcaataaaccaggggcacaatgcactgtggaaagccgcagggacctctgcccttgaaagctgggtattgtccaaagtttctccccatgtgatagtctgaaatatggcctcgtgggatgagaaagacctgacggtcccccagcgcgacacccataaaagatccgtgctgaggtggattagtcaaagaggaaagacttgcagttgagatagaggaaggccactgtctcctgactgcccctgggaactgaatgtctcggtataaaacacgattgtacatttgttcagttctgagatgggagaaaaaccgccctatggtgggaggcgagacatgtttacagcaatgctgccttgttatcctttactccactgagatgtctgggtggagagaaacataaatctggcttacatgcacgtccagtcatagtaccttcccttgaacttcattatgtcatagattctattgctcacgtttgttgctgaccttctccttattatcaccctgccctcctactacattcctttttgctgaaataatgaagataacaatcaataaaaactgagggaattcagagacctgtgccagtgcaggtccttagcatgctaagcgcaggtcccctgggcccgctgttgtttctctat

SEQ ID NO: 1492 - DNA, 3565 bp, Homo sapiens
ttaatgtgggaattcagaggaaagctatggggaaagcagtgttggtcaactgacgacgctaaagaaccaccttcggtggttgtcacggtgagtttggcactgaaggctctttgctgttctgacctgaagctctctgttaggacttcctgctatttttctcacaagccctcattttcgctgacagttcagatcatgccctgtgcatatccagttcccccggtaggcacggctcctcctttcacctcaatgccccgctttccgctcggcccacactggactcttgctacctcttgttttggcttatgtttaatcttactttttgaaagcaacatcttctgattatgaaataatttatactttttttttgcagagaatgtggaaaatacagaaaagtataagcagaagcataaaaattattcacagttgcacccttggagggagctgtcctataaatcttggtgaatttgctgcccttcttttttctgtggatctgtctattacatgtgatagtttttaaagctgatgtcatgttattgatgtagttttgcttcttgctttatccattgaagactataatgtgagaaatttcctcgctggggctcttcccaaacctgatatttactgaccacaccaatattcaattgaatgagggagtgtcataattcaatcacttatagtttccagaaacgttgtgctcatttacattttccttagcagcatatgagggtgcatgaatcccatcatcacaacgcaatggaattagggagaaatgccagtgaaagatgaagagagatgaggcaggactagcaggagcgcctcagaccctcatttctgcaggcaagaaaggaaaggatcctgtggaagggtctcccactgctgtgtgattctaaaagctttgggcaggggatagggagtctccaaaccaaagcctggtggccattctgtgacaggcaggagtgggctgctatgaggaccctggtcatgttgaagctttggcggggggtcaccaagaggtggatagctggagctgtcagtcaactctgcttcccaggggcagattctctcaaaacagaccagaactatagcccttgctctcccatgcccaccccacttcacctgataaacaggaaatataattaaaacatataattatgaactgtgaaaatggtctaattttgctggttttcattcttctgattaaccttgatgtcaaacatttctcatgaattttgttacatacttgtacttctaagaattgtgtgcctgggttctctgtttgcccgtgattgttttctttattgatgttttaagaggatttgcggcattaagcctgttaactctttctccattctctttcatattttaaccaatttatcacttctctttatattttatgtaggatgtttggatgttttagaataactcactcttctgttaagatcacttttatttacttcatgttcagaaaattcttgctcattcaggctctagttaaatatatgccagtattttattctagatacttttggattcttttttttacatttaatacactggggttttatttcagtgtatgagggagggatcaaacttgattattttccccccttttagccacattttccaattttactttcagataatttaaccattaaccatttcttcctggtgattcctttctgagatttaaatttttaaaatatgtatgatagatctcaggactatctgtttctacttcattggatgatctacagaatcttgtaccaccagcactacactgttttaattattgtatcaagaataatacagttagatatctcttagggacagtatctccttgatattctttaagcagttcttaactcttctcatcctttttttcccttccagatggactttcatcaaattcaaagaaaaaaaaaaagattccactgggatttaattcagattgcatttcaccgaaaaattacaaggattaacaacaaggattaatagcattgctgcattcattatggcaacccaaggttatgtctctctattgactattctctttaattaatctgtgtaaaaagtttgcatttttaatataggtcttggatatttcttattagtgttctttatatttttttccaatactcttaagaatgcatttttctccctatattttctgcttgttgttagaatagaaacagtatttattttggagatttttgtatttttatcttgtatctgaccccttccctaatttttatgaatactaagaattttacagtcagtacttttatattatcttggtgcataatcataatgtagtctgtaagtaacaaacattttgtttccttctttctattgtagagtttgagaagtcgtcagtgtgtagtcctgttatcttaattgtttctgagttatgggttgaatttattttgaaatttcaaaaaacttcaaagggtagtatgttatttttgtgttaatcaaaatgaacaatgggtttcaaaagcttgaacaacgtcatcttgggagtgccaaatgaataggatgtcctgtatgtcaggagcatgcccacacttttcttgctagggtgagtttattgtccctgatgaatcccaggagtactagtccatgatgctcttattccctggtgctttaacatgcagtgcagccggagttggcctgaactttaggaaatgaggtcgtaagtcgaaagaacagggaattgagaaagcacacagaagcagccagggccaacattttcccctaaacaagccaatcaacaaaaagcaatgccaaacaagcccctttgaaactttcaaagtcctcatcctagtaccttcctagcactctaggagacatctttcagctgttgatttatgaacgctgagaggcacgtggaggaattaatggaggtaaatatctaacttaaaaaatcttcagtaggcatttttagacaatcctccttgaaagaaaagtgtggatgctctgtgcgtgtattgactgcacctgcaggggtatagctggagaacacccagtgagcatcttcaggagccaagtcacgcaggggcttagctctcagtccattgcgacagttgccatgatgccttctgaccattaaacactttgaactcttttctctcatcctctgttatttgctttggacccataacagactcattagttaaaaataagaagcaaaggtaatcctgatgttgaattacaagttaatgcagagcacagacatgaaaataattctatgggtttgctgcagcataacccttgccagatctccaagttccattcatctaatgaaaagccttagtttgaagaacattttggagaactcttacatcaagaggtctccagtacctcaaaaaccagtgttcaaaaggaaaatgcacacgcgtatttcagggaggtgggaataaaagccttcctttgcgcagcgtgttacatgtggaaatgtggaacgcacacgatcattcttactgttaaaacaccccacaaagattataaaaatatgtcagtttttttttggtgcaaaaactcacacgattaaaaatattatactatg

SEQ ID NO: 1493 - DNA, 2116 bp, Homo sapiens
agtaagcaaagatcgcaccactgcactccagcctaggcgacagagctagactgcagaagaaaaagagaaagagaggggagaaggtgaggagggggagaggagagggagagagggagagagggggagaggaagagagaggggaagagggggagacggggagagggggaggtggctcatgcctgtaatcccagagagaggtgacagctgctggcagccctcgcttgctcttggtgcctcctcggcctcggcgtccgctctggccatgctcagggagcccttcagcccgcctctgcgctgtcggggcccctctctgggctggttgaggccggagccggctccctcagcctgctgggaggtgtggagggagaggcacggaaaggaactggagctgcgcgcggcgcttgccggccagctagagttccgggtgggcgtgggcttggctggccccgcactcggagcggccgggcgaccccgccggccttgggcagtgaggggcttagcccccaggccagtagatgtggagggtgcacggggtcccccagcagtgccggcccaccgaggctgcgctcgatttctcgccaggccttagctgcctccccgcggggcagggctcaggacctgcagcccgccatgcgtgagcctcccctgccccacgctgtcggctcctgcagggcccgagcctccccgacgagcgtggctctctgctccgaggcgcccagtcccattgaggacccaagagcagaggagtgcgggcgcagggagcgagactggcaggcagctccacctgcggccccagtgcgggatccactgggtgaagctagctgggctacccagtctagtggggacttggagaacctctatgtctagtcaagggagggtaaacacaccaatcagcactctgtgtctagctcggggttagtggatgcaccagtgggcactctgtatttagctaatctggtggggacttggagaatctttatgtctagctaagggattgtgaatacagcaattggcactctgtatctagctcaaggtttgtaaatgcaccaatcagcaccctgtgtctatttcaaggtttgtaaatgcaccaatctgcactctgtgtctagctgatctggtggggacttggagaacctttatgcctagctaagggattgtgaatgcaccaatcagcactctgtgtctagctcggggtttgtaaatgcaccactcagcaccctgtgtctagctcaaggtttgtaaatgcaccagtcagtgctctgtgtctagctaatctagtggggacttagagaacttttgtgtctagctcaaggtttgtaaacgcaccaatcagcaccctgtcaaaacggaccaatcagttgtctgtaaaacagaccaattggctctctgtaaaatggaccaatcagtaggatgtgggtggggccagataagagaataaaagcaggccgccggagcaggcggtggccatttggtgaggttgtgttatgtggtgtgggtggtttgtttttactttgtaatgaattttactgttgctcaatgtttgggtcaacactgcctttgtgagttataacactcactgcgaaggtttgcagtttcaataatgaagccagtgagactgtaaacccactgggagcaactaataatgcgtcgccctaacagctgggacgcccaccacaaaggtctgtagcttcagtcctgagctagagaccacgaacccactaaaagcaaaaaaactgaacgcagctgagctatcagtagggagaaacgctggtggacacgctgcctttaagaactgtaacactcactgtgaggttccatagcttcattttggaagtctagaccaagaacacgctaattctggtcacgctagcactttgagaggccaaggtgtgtggattacttgaggccaggagttcaagaccagcttggccagcatggtaaaaccctgtctctaccaaatatacaaaaattagcctggcgcatggcagcacgttcctgtaatcctaactagtggggagactggcaggagaatcatttgaaccggggaggtagagactacagtgaggcgagattatgccactgcactccagcctgggagacaataagactccatctc

SEQ ID NO: 1494 - DNA, 2711 bp, Homo sapiens
atatcagttaaacccaccgtattcattgtataaatcaaatttttcatatacttactgtattagtccgttttcacgctgctgataaagacatacccaagactgagtaatttataaagcaaaagaggtttaatggactcacagttccatgtggctggggaggcctcataatcatggtgggtgaaaggcacttctgacatgctggtggcaagagagaatcagagcaccaagcaaaaaggaaaccccttgtcaaatcaccagatctcatgagacttattcactaccatgagaacagtatcagggaaaccactcccaagattcagttatctcccactgggtccctcccacaatatgtgggaattgtgggagctgcaattcaagatgagatttgggtggggacatagccaaaacaagttatctcccaccaggtccctcccacatgtgggaattaagggagctgcaattcaagaagagatttgggtggggacacagccaaaccagatcacttaccaattatgtgctgtcctgctctatcaattcctaagaaaagtgtgcaaaaatttccaaatggtaatgtggatttgtagtttattcctctaattgtcctattttgtataatacattctttggtctatgttaatttgaaattttgaacatagaatcattatatcttcatagaaaattgtacttttatccttatataatgaccctttttattcctaacgatggtttccctaaagcttatgttacccaattaatgtttgccaggtatatatttttccactcatactcactttttataacatttttttgcatttattttataaacatatacatggaatattttaaagcataatgcgacattctgcttttaaaccgatgagtttatatgatttgtgattattgatacagttggctgggtgcggtggctcacgcctgtaattccagcattttgggaagccgaggtgggcagattactaggtcaggagatcgagaccatcctggctaacatggtgaacccccatctctactaaaagtacaaaaaattagccgggtgtggtggtgggtgcctcagcctcctgagtagctgggatgacaggtgcctgacaccacgcccagctaatttttgtgtttttagtagagacgggggtttctccatgttggtcgggctggtctcgaactcctgacctcaggtgatccaccagcctcggcctcccaaagtgctgggattacaggtgtgagccaccacgcctggctccaatttttttttttttttttttttgagacagagttttcgctcttgttgcccaggctggagtgcagtggcacagtcttggctcactgcaacttccacctcccgggttcaggcggttctcctgcctcagcctcccgagtagctgggattgcacgcgcccaccaccacagctggctaattttttgtatttagtagagagagggtttcaccatgttggtctggctggtctggaattcctgacctcaggtgatctgtctgccttggcctcccagggtgctgggattacaggcgtgagccactgcacccagcgtcccaacatttttatctctgatcatcttgaacacataccatgttactcactgttttagttctgcgttatttttgttgcataaccagtaacataacattattattgttagtttacatagccaatactagtttaggttcacatgtattacctcttggcttcacccactacttttctctgatggcaatctttggaagttccttcattgagggtttattagtggtaaactctttatctttgctgtggtgcagtgtctagaatttttgttaagtgaaggttttacatttaaatcttcatctattaagtttgaatatgggatgagttatggattgaggttcatttgttttgtatattgactttcaattgttgcagcaccatttttttaaaccactattttcattgatttgcccttgcaactttgtcaaaaatcaattgaccatatacacgaaggtctatttatgtattctcaattatggtccatgatctatgtgtttatcctttctctgacacaatgtttagattgctgtatctttacagtaagtttcgaagtcagggagtgcgagtcttccagctctgttcctctttgacaaaagatgttttggctattctagtttcttctgcttttccaaataaatttgattaacttgttaatgtctacaaaaactcctgctggaatttccattgggatcgcaataaatttataggtaaatctagagagaactgacattctactatttattgttccaaaccacaaatatgatacatatttccatttatttaggatttggatttcccttatttctctcataagcgttttgacgttttcaacatacagatcttttataacaacacttacccacttcccaccattctacccccattcctaaaccttggcaacacaagaatctgtcctccattaaaaatgttatgacttcagaaatgttatataaatggaataatacaatatgcaaccttatgggactgatttcttgcatttggtgtacttctctagagattaatccaagtttttgtgtgtatcagtagtccatttattttcctgaatagcattccatatgtgtgtgccacaatttgtttaaccatttaccttattctcagtttttggctgttcaaataaactgatattaatctgtg

SEQ ID NO: 1495 - DNA, 2307 bp, Homo sapiens
tgctcatggccattctccatcgctgtgcttgtatgagtccaccttgttgcttccccctgccattaacatgcaggttcactcctgtgccagcactaatgtgtgcacaggtgctggcaacactgttctccccccaacccctgctaccaccgccaccaatgctgccggtgtgaatgcatacatggacaccagcaactccatctctgctagtgtactgcccttgctgtgctgtcatcactggcataaacatgtgcaggaacaccacctccctgctcccacagttgctctgtgcaagccaacatgtgtgcaccttgccacattgctgtggctgctggtatgcatgagccagcatggatcccactgccactactccagtgacatgctttgaccagcacccctccccatcagagtgtggtggccagtggacaagaacacctcagtctctccagtgcagcagcttcctaaccttgaggggccagagaacaaggctgggggcccagtaccagcctcccagagttaaaacatgcagcccagcagtgtagagctgagccttggctttctaaaatcttccagaaataaatgaagccagttgactgaacccatcatatgccacaatctaactcccagggcatcaaagaagataaaagccaaaatccccatccaaaggacagtaatatcaaagatgagaaagaaccagtgcaaaaaactctggcaattcaaaaagccagagtgtctttttacctccaaacgatcactccatttcctcagtggtggttcttaactaggctgaaaagacagaaatgacagatatagacttcagaatatggataggaaagatgatcaagatttgggagaagattgaaacccaatcctaggaagctaaggaatacaataatgcaatacaggagctgaaagatgaaatggccattttaagaaagaaccaaactgatgtgatagagtgacagagctgaaaaactcactttgagaatttcacaatacaattgcaagtattaacagcagagtagaccatgctgacgaaggactctcagatcttgaagaccagttctccaaagttaacttggtcagacaaaaataaagaaaaaaggatataaaaagaataaacaaaacctccaagaaacatgagattatgtaaagagatcaaatttctgatgcattggcatccttgaaaatgagggagagaaagcacgcaacttagaaaacatatttcaagatattgtcaatgaaaaattccccaacctcgctagagagtccaatattcaaatccaggaaatgaagagaacgcctgcaagatattatacaagatgatcattcctaagacacagagtcacctgattctctgaggttgaaatgaaagaaaaaatgttaaaggcagctaaagagaagggactggttgcttacaaaggcaaccccatcaagctaacagcagacctttcagcagaaatcctacaagccagaagagactgggggcttagattcagtatttttaaagaaaataaaatccaaataagaattttgtattcagccaaactaagcttcataagcaaaggagaaataagatccttttcagataagcaaatactgaaagaattaccatcagatatgccttacatgaggttgtgaagggagtacaaaacatggaaaggaaagatcattatcagcaaccacaaaaacacacttaagtacatagaccattgatactataaagcaactacacatcaagtatgtataataccagctaaaaacatgatgacaggattaaatctgcactatcaatattaaccttaaatggcaatgggctaaatgcatcaattaaaaggcacaacatcgcaagctggataaagaagcaaaattcatttgtgtgctgtcttcaagagatccatctcacatgaaacaacatggataggctcaaaataaagagatagagaaaatcaaccaagcaaacgagaaacacacaaccataaaaaagaatgtattcatgtcctttgtggtgacatggttggtgctggaggtcataatcctgagcaaactaatcaggacagaaaaccaaatactgcatgttgtcacttataagtggaagctaaacactgaatacacatggacacaaagaagaaaataacagaccctgaggcctacttgagaatgggaggagagtgaggattgaaaaactatctattgagcactatgcttattaccttggtgaaaaaataatctgtgcagcaaatccctgtaacatgcaatttacctataataagcctgtgcatgtacctctgaacctaaaatgaaagttac

SEQ ID NO: 1496 - DNA, 2048 bp, Homo sapiens
atgctgaggaatgcagctgggaggctgccagcaaatgccaaggggcctctgggtcccaggctagcaccccacagcaccccacaggggcaggcaggcctccagaggctctcctggaatccaaaaagccacttcctcgctaagcctccggtttcccgtctgcaaagtggcgatgatcattcctgctgcccttcctgactgagctgtctgaggacccagggttccaggggcaggtctcccaggatgagattttgctttctcttgaaacccatgcattcctagaatctgttctgtgtttcattgtaggaggctctggccaggcctgggtgtggcaggatagaaatgaaagttgtcctggcaacacacaagatttcatcaacatttccatccccagcagctcctgggccaagcctcatcttgcccagtgtggcctgtcaagatgacggcctggaagagaagccagactgggcagccaggcctctgcccctccccttgcctggtggcacagccagcactggctcactgggaaagctcgcaactcctcacagcgatctggtatcttgagcgtcagtttctggccgaaactgggggctcctgactgaactccctcccacctagaaaaccttctgtgcagtctgattgctccaacacccacagagcaggattcaggtatcccggagaccttgggaggtccccatccagaggtctgctgtcctgccaggcttggggcagcagggactgggaccccactcagacctctctggggcaaatgttttggttctcacaacagccctagtgaaatcaatcctagatactcccatttggtcccaccaaggccatttaatttctctgtaaagggtaagatgacacaaaagagccaactatggaaacggtgaggtgggagtctgaaccgatttagctgttctcagggcgcacagggtgttgacggtggttttcatctgccacctgcctccttgagacccagctggcctgagtgtgcacgaaatgggaccttctccttgggtccaccaggctgggaggcacccctaggtacccggctcctcatcacagcggcagccctctcggttccacatctggttctcctgacgaagccgctggttttcggtccggagcctctggacctcggcagccagctcctccacctggcggcaggactgctggccggtgcacgcctgcagctgctgcagcctcctagtctcctcctccgcctgcgacagccgcttctccagctccaggtagtctcgcaccagctcctgcttgctgcggccctgcaggctctcggtgtggaagcgttcgtaagtctcagagaagtccttccgctggaactcaccgtgcgctcggccccgcccatcactgtccccggcctcactctccccactggaacctgggtgggagatcccatggggcacatccaagttgggctcctccgggtccctgtcattcatcaggaactgggtggtgttgtggggggccacgggctggcctttggcgaacatctcttcgcggacccgggaggccctctggctctgcctctcatcccgctgttgtttctcagcccagctcagctccaggtagggtcgccagtgccttttgcgcttcgatggccgccgacggtgtttcttccgggccagcacagcctccgctgagcagccccctgggctctgggtccggggactcctactgttccagcccaggccaccgacagccccagcaagatcttcatcctctgagtggctctccatccgcggtgtcaggggcagggaaccaccagagtcatgacgctcagggggtgtttgggggctccccggggcaccagaggtctaaagagagggaggaggaagaaggatggatcagacagcctgtccttggaggtggaacctttccctctctacctagcctgaagcctaccttcctacactcagctaacttggtcactcttagcccctcaaccttttggaaccatttgtttacaaagagacctgtctactgtctgtcccccaaccttccccaagtaaactcatggtgagagc

SEQ ID NO: 1497 - DNA, 2825 bp, Homo sapiens
ccaaaattagttgacaattcctaaacgtcacaacttgatgaagcctggagacactctgtttcttctaggcaatggctgtgccctatcttctgagaagaaagttcagtaattccctgaaaagtcaaggtaagagccctctgctcccccacccccatgggcctgggaaatgagcttcggggaggaaaatgaccagtcgcagctctgtgtgtttcttcattatctgtgggacatatctcatgtcctgactcccaaaaaacattcccagtgccgctcgggccaccctcaggacccagcaagttggtgttctggacagctggaacttgctgctttaagcgtgcaaagggggccctggtggcagcggtggtggtggtagtggtttccatggttttctacataaattgtcctaacgtggtacacagttcctggccttctagaaagtacggctcatcatttagccttccttgaaggcttggtggtgacaaggacattagctttgtcctggacgaacgggatgtgaggcctccccagcacgtggccgggctcttggggtatctgtgtgctcatctcattcactcaccttgtgacccaaccactgctcaccagaggctggtagctcctccccccattcagagtcccgtccctctgctgtcgagctgtttcaggcccccagacattgttggactgatctcctgttgtccctgtcttctgagctttgccctcacacacaccattgttcaaactctgccacagctgcagtccttgcagacagtgtgtgtccctcctctgctcacaagcaatccttggctcccaactgcctgcagaatgaagtgggatttcttagcatagccctgcagactttggccatttgtcacacactggagccagcctgccccctactacacccgcccaaggatgcacttccttcccgtgcgtaggacaacgcacagcggacgctggtttcagagcgcaccaagcaggcacttgcctccacgcctgggtgtgccccctccctgcccatctctgtcctgtgaagtcctccagggccaagtatgaagcctctcccccggggctctccaccgcctccctgcaacacctggcacatcaatccctctttccagccagctcactccttgatcagtcagccaccccacctccatgccagctcgctctttgcatgccctgagctcccagcacacattctggtcaatcctgggatacagctggtgcccagggccctttggggctaatcccagattcagggtcaccagccaggagggcaactttgccagagatgacccactaaggagctgccagcaggggctcctggagagccatgtgctggctctgcggggagtttcctgcacatctcgtgggctgaaatccaggtggagattcttgttttgttttattttgttgagacggggtctcactctgtcgcccaggctggagtgcaatggcgtgatctcagctcactgcaccccccgcttcctgggttcaagtgattctcctgcctctgcctcctgagtagctgggattacaggtgcctgccaccatgctaggctaattttgtatctttagtagagacgggttttcaccacgttggccaggctggtctcgaactcctgacgtcagatgatccatccacctcggcctcccaaagtgctgggattacaggcgtgagccaccgtgcccggccaagagattcatgtttgtagcaggaggacaaggggcgattccttgtgtcctctgtatgactggttttgtgaagggtagactctgtcctatccagagacctcactcacctccagtccaaagccagaatagctcacccccggccccctgaagctcacaggaattttggggtctgaaaggcaaagctgaggcctgacccttcacatttctccccgccatcctcaccagcatctgccaagcgtggccacgggagcttttcactgtctgcagaggccagccccgcacactggcaggtccttgggcctccaatcccggggtctgtggggcctcatgcgacttcactgctcaggagtcgtgatccctcgagttaggtgattccctccacagaggttagtcctggagcggggacggagggccggcaggccaggccacatgaccctgcagagaggggaacagcacaacaggagcacgctgctgagccaactcccagaaaaggaaaaggacaaagtcctggcctgtagcatgtgccaggttctgtggcgtaaatgctcccaccctggctgatcgcaagctcccagctgatgtcaccgagcgtggggtcaggaagaggtgcccacagtcagctctcaggagccctgacaactggctccagtcaggcaggccacagaagacatgcaaaagtgaagaagggcgggtgcctgcaccagccacctggacaccaacactcaactaggatgtgaggccagatgcccccagctacacagccatggccccaggaggtgccctctgctgagggtcagcatctgagaccccttgggctgttgccgtgtctcacaaaggaaaggcaaggaagccgggcatggtggctcacgcctataattccagcatttcaggaggccaaggcgggcggatcacttgaggtcaggagttcgagaccagcctggccaacatggtgaaaccccatctctactgaaaaatacaaaaattagccaggcatggtggtgtgaacctgtggtcccagctacttgggaggctgaggcagaagaatcacttgaacccgaggcagaggttgcagttaagccaagattgcgccacagcactccagcctgggtgacagagcaagactttgtctc

SEQ ID NO: 1498 - DNA, 2843 bp, Homo sapiens
tccgcctgctcctcatcgtgcccatctacgccttcgactcctggctcagcctcctcctcctcggagaccaccagtactacgtctacttcgactctgtgcgggactgctacgaagcttcctgagcctgtgtttccagtacctgggaggcgagggcgccatcatggctgagattcgtggaaagcccatcaagtccagctgcttgtacggcacctgctgcctccggggcatgacctactccatcgggttcctgcgcttctgtaagcaggccactctgcagttctgcctggtgaagcccgtcatggccgtcaccaccatcatcctccaggcatttggcaaataccacgacggggacttcaagtaaggcgggagctgcggggacacctggcatgaggtgggcactgggtcccccggggcccgggagtggggcccaacgaggcggacttggcgtccagctgggctcaagtaaggtgggagctgcgggggcacctggcatgaggtgggcactgggtcccctggggcccagcggtggggcccaacaaggcaggcctggcgtccggctgggctaggggccccgcccaagacaggtacccacttcttctccacaaggacctcggtgcctgccaaggccgggggcctggacctcccctcacaggacacggctggggtgagtctagcgtctgtgccagcatctgcgccgaggaccccagggcttctggccaggcagtgatggccccagcccccgcccagccttgagcactcttggcattaagggcacctgggccaaggggaccaaggtccaccccgacctgttggctgaacagacaggcagccacccagcacaaggaggacccctgcgaaggtccacacagctcaccccttggacccctgcgaaggtccaaggtgctcaccaacaccacacagatgctcacacacggggacacatgtgctgtcacctgtgcgcacacatcacacacgtgcatcacatgttcacacatgcacacagcacatgcgcaaaccgtgcacacaccaccacacatgtatgtacactcacatgcacgcaatatgtgcacacacacagcgcaccccacctgtgtgcacacgacatacatgcacacacacctatgtgcacacactcacacgggaacgacacctgtgtgtccaccacacagaggatcttcaggcagtggccaggtggacggggttgggaggtggcgttccgacagaggcagcctggatgctgcctgagcagtggacaggatcctgggacgaggaggagcagggccggtagggagaacggccacgtccctgccctacccctgcataggccccccagccacccccagctccccacgctctcctgcaggccctggagtgaggatcagatcggggcaggatccctgcagggcccatgctcccaagctcagggtggggaccaggctgagggtgcagcggcggtggctctagggtggggacagtggcggggtcatgggaccgccctgaccacagcccccgtctgtcctagtgtccgcagcggctacctctatgtgaccctcatctacaacgcctccgtcagcctcgccctctacgccctgttcctcttctacttcaccaccagggagctcctgcggcccttccagcccgtcctcaagttcctcaccatcaaagccgtcatcttcctgtcgttctggcaagggctgctgctggccatcctggagcggtgcggggtcatcccggaggtggagaccagcggcgggaacaagctgggggctggcacgctggccgccggctaccagaacttcatcatctgcgtggagatgctgttcgcctccgtggccctgcgttatgccttcccctgccaggtgtacgcagagaagaaggagaattcaccagcccccccggcacccatgcagagcatctccagcggcatcagggagacagtgagcccccaggacatcgtgcaggacgccatccacaacttctcccccgcctaccagcactacacgcagcaggccacgcacgaggcgcccaggcccggcacccaccccagcggcggctccggcgggagcaggaagagccggagcctggagaagcggatgctgatcccctcggaggacctgtaggggggcctgggctgccagtgctgtagggacccaggctgcccaggcctctggggaagaacagggtccccccacccaccaactcctgccaaaggtggggcctctcctgagagcccacctgtgaggccctcggagcccacttcccatcctccctccagccagggggtcagggcacctgatggccctggcaggcacccaggtgggcccgccaccgcaggagagggcacctgagccaatcggaagagcctggggaccccctgggatcacccagccatcagccccaggagccactgtggggcggagagtgagtgtggctgcggggccttggctgcacggaccccatgggagctgtgagtgggtcagactccctggttcaggagacagacagcggacggatcccaggctgggcagctggagggaggggcgccggggcgctgggcagccgggctctgacacagtcagcagctccgggcgccgcaggccggcggggtccacacaggctggccggggctgggcctccttggagcctgctacggccctcgtgggcacgtggagaagggcccacgtgtctccacacgccagccacaggggagccctggccaggcgcccagccaggggagcgtgtgcctgggatgggtcacagaaccagcgggcacctgtgaggctggccagcaccgtggggctgtgggaatcgctcttatttatatttaaacaccttggattttc

SEQ ID NO: 1499 - DNA, 2808 bp, Homo sapiens
gttcgctgctgcacagcaaggccctgccacccaccttcaggccatgcagccatgttccgggagccctaattgcacagaagcccatggggagctccagactggcagccctgctcctgcctctcctcctcatagtcatcgacctctctgactctgctgggattggctttcgccacctgccccactggaacacccgctgtcctctggcctcccacacggaagttctgcctatatcccttgccgcacctggtgggccctcttctccacaaagccttggtgtgtgcgagtctggcactgttcccgctgtttgtgccagcatctgctgtcaggtggctcaggtcttcaacggggcctcttccacctcctggtgcagaaatccaaaaagtcttccacattcaagttctataggagacacaagatgccagcacctgctcagaggaagctgctgcctcgtcgtcacctgtctgagaagagccatcacatttccatcccctccccagacatctcccacaagggacttcgctctaaaaggacccaaccttcggatccagagacatgggaaagtcttcccagattggactcacaaaggcatggaggacccgagttctcctttgatttgctgcctgaggcccgggctattcgggtgaccatatcttcaggccctgaggtcagcgtgcgtctttgtcaccagtgggcactggagtgtgaagagctgagcagtccctatgatgtccagaaaattgtgtctgggggccacactgtagagctgccttatgaattccttctgccctgtctgtgcatagaggcatcctacctgcaagaggacactgtgaggcgcaaaaaatgtcccttccagagctggccagaagcctatggctcggacttctggaagtcagtgcacttcactgactacagccagcacactcagatggtcatggccctgacactccgctgcccactgaagctggaagctgccctctgccagaggcacgactggcataccctttgcaaagacctcccgaatgccacagctcgagagtcagatgggtggtatgttttggagaaggtggacctgcacccccagctctgcttcaagttctcttttggaaacagcagccatgttgaatgcccccaccagactgggtctctcacatcctggaatgtaagcatggatacccaagcccagcagctgattcttcacttctcctcaagaatgcatgccaccttcagtgctgcctggagcctcccaggcttggggcaggacactttggtgccccccgtgtacactgtcagccaggcccggggctcaagcccagtgtcactagacctcatcattcccttcctgaggccagggtgctgtgtcctggctagcagctggagcagacacaaacccacctgggaagaattccctagccagtggggactcccctctcccccagctccatgcttcactcagctccccgggaggagaagatgcctggctcataggggtggggggctctgtgccctcaggtgtggcggtcagatgtccagtttgcctggaagcacctcttgtgtccggatgtctcttacagacacctggggctcttgatcctggcactgctggccctcctcaccctactgggtgttgttctggccctcacctgccggcgcccacagtcaggcccgggcccagcgcggccagtgctcctcctgcacgcggcggactcggaggcgcagcggcgcctggtgggagcgctggctgaactgctacgggcagcgctgggcggcgggcgcgacgtgatcgtggacctgtgggaggggaggcacgtggcgcgcgtgggcccgctgccgtggctctgggcggcgcggacgcgcgtagcgcgggagcagggcactgtgctgctgctgtggagcggcgccgaccttcgcccggtcagcggccccgacccccgcgccgcgcccctgctcgccctgctccacgctgccccgcgcccgctgctgctgctcgcttacttcagtcgcctctgcgccaagggcgacatccccccgccgctgcgcgccctgccgcgctaccgcctgctgcgcgacctgccgcgtctgctgcgggcgctggacgcgcggcctttcgcagaggccaccagctggggccgccttggggcgcggcagcgcaggcagagccgcctagagctgtgcagccggctcgaacgagaggccgcccgacttgcagacctaggttgagcagagctccaccgcagtcccgggtgtctgcggccgcaacgcaacggacactggctggaaccccggaatgagccttcgaccctgaaatccttggggtgcctcgaggacgactggccgaaaagccgcattccctgcctcacaggccggaagtcccagcccagtccccgcgcgcgtccctcttcctcctcatactttcccttgactgagagctcctctaacccctgttctgatgggggagggcggtcttcccacttcctctccagaactccagaaagagcagtgtgcttatgcttcagtccaggctggagaggttggggccggggtagggaggcaggagccatgtcagttctgaaggagggtgaggcggtgggggattgcagggggcggctgagagaaaacctccttgggggccagggattccctttcccactctgaggctctggccagagggagagaggactctggacctaggaaaagaggcttttggctccaggtggtcaggacagtgggggttgggggtggggtgggtgggtgctggcggtggggaccaagatccggaaagatgaataaagacaaacatgacaaactaag

SEQ ID NO: 1500 - DNA, 2199 bp, Homo sapiens
atatttagcctgagatgaagacagtattcagggtcgaggtccagagagtgagcttcagcgagcttccaggcttctcttcacccctctcttgtcctggggtcctgaactgggaagagaagcttttcagcaaagcaaaaccccaccaatggggggacttgagggatcccactagagcctccctgagtggtggccttgggtgtatcagagcaaaccggagccagacagaagcagtgatccaaggatggccaaccccacaggcaccattgcaggctaggaaccatccattccccaagaccccctctcctcccattacctctttgtattccagaaataacttgaaaggtggcagacctgggccctgtttgccagatgagttcaactccaacccagctttccattcaatttagccagaaaagacgagggcaatgagacatgccagggttcaggcaccttcccactgagcctccccaggctgcccatcctgcaggtgtgcagagcctcaccttaagggccgtcaagcccagatcccctttgacccctcagcagtctaatctccctgggtcttaagaaagaagactctctgtcctggcactgtttgggcaaggctagggaggatcccaatgacctctcagtgcacttgattctttggggttccacatgcaattgttttctattgccctctccctattgcaacgagggtgttgaaggtcaaagcagccatagggggaaggggcaagaagccactgttctcattctggccagaaactcaaaggtgaggccagagaaggaggaaatagggctggagaggagttaatcttcgatgatcagataggccagagaaatgaatgattaacttgtgttgtcttaaaggtcagcagatgcagggaaggctatggtgcaattttcctttctgaccagcagtgttgttgttatttttttttaatgtgtccaggttccccatattattacagttccacatcaaggccgagtgcaccgcccaccactgccacggcctttgaccatctgtagttgccatggggacagtgggagcgactgagcaacaggaggactcagcctgggacaggccccagagagtcacacaaaggaatctttatttattacatgaaaaataaccacaagtccagcattgcggcacactccctgtgtggttaatttaatgaaccatgaaagacaggatgaccttggacaaggccaaactgtcctccaagactccttaatgaggggcaggagtcccagggaaagagaaccatgccatgctgaaaaagacaaaattgaagaagaaatgtagcccccagccggtacccaccaaaggagagaagaagcaatagccgaggaacttggggggatggcgaatggttcctgcccgggcccaaggggtgcacagggcacctccatggctccattattaacacaactctagcaattatggaccataagcacttccctccagcccacaagtcacagcctggtgccgaggctctcctcaccagccacccagggagtcacctccctcagcctcccgcctgccccacacggaggctctggctgtcctctttctccactccatttgcttggctctttctacacctccctcttgggcatgggctgagggctggagcgagtccctcagaaattccaccaggctgtcagctgacctcttttgcctgctgctgtgaaggtatagcaccaccccaggtcctcctgcagtgcggcatccccttggcagctgccgtcagccaggccagccccagggagcttaaaacagacattccacagggcctgggcccctgggaggtgaggtgtggtgtgcggcttcacccagggcagaacaaggcagaatcgcaggaaacccgcttccccttcctgacagctcctgccaagccaaatgtgcttcctgcagctcacgcccaccagctactgaagggacccaaggcaccccctgaagccagcgatagagggtccctctctgctccccagcagctcctgcccccaaggcctgactgtatatactgtaaatgaaactttgtttgggtcaagcttccttctttctaacccccagactttggcctctgagtgaaatgtctctctttgccctgtggggcttctctccttgatgcttctttctttttttaaagacaacctgccattaccacatgactcaataaaccattgctcttc

SEQ ID NO: 1501 - DNA, 3165 bp, Homo sapiens
catgctctgggaaagatttctgccatcctctggggtagggttgcttgtgggggccacagcaggcagggttggcctctcaacagatggcctgcaggtctcctggcctcagttaagccagggccccaggggtctgacactgagtttttcaacgtctgttctctttttctttctgtctgccttgccccacttctgtccctccaccctgggagcaccatcgccgctggggtttctctctcgtttgctctgctttcctgctgctgctgctcctgtctcaagtgtatcaaggccttcttctcatgacttttctttctgtctttcagatagtttcaaacaaaagcatacctcgaaagcgccccagagaggtagctctctcaacttttcagacttgtggttttcctttccctttttccctcttcccttgttcctcctgcctttctcatttcctgggatgctagctttaaaatctctggaatggcatgggggtaggagcagtggaatttctgctgtgctctactcctcaaagtcctgaaggctgcctttaccactgcttgtttcccacaaacctgctcctagagctgctcggcccagtgcatggggtggcttcagaagcattatcaggagcccattacaatcagacccttccgctccctccccagaccaggcagctggtggtcagctcatgttccccactgccccaccacctcctcctgccatcctctctccccactcctttcctgctggcccccttgcccttcttggtattacttctcaagatgacaaaatgcctcatggggatctgctttccttgctgattggcaggcctggacagggcaattacatgggagtgtgcttgaatttctttggggaccaactgcccaactggcttcattgataggctatccccaagaaacccatcccctgcttgtttacccacattcaggggagatgggctccatggtgtgtggggtagcatgagcctcccacatttactgaggggtaaaaaagtttggagtcttatccacttttcccccttcctgtcaccccaaagatataggaatatccttccctttcctgacctggagcgtcccagactgttagtatatcccagagcaactaactggtgatggggcaagggctaagccccccaaaagtcaacatggaagagcagtggtggccatggggttggagttcaggagggaaaagagccccagaagctagagagccccacggcctgatgctcctggctgaggggaagtggccgtcactcaaggcctgtcccagagtggagctgctaggggaagggatggttgccctctgcctcaggtggagcccccacagcttgcagggatggggacatggcactcttgtatcctaacacctttctctgcaatcttcttcccactcagtttgtggaaaacgttacaagaaccgaccaggcctcagttaccactatgcccactcccacttggctgaggaggagggcgaggacaaggaagactctcaaccacccactcctgtttcccagaggtctgaggagcagaaatccaaaaagggtcctgatggattggccttgcccaacaactactgtgacttctgcctgggggactcaaagattaacaagaagacgggacaacccgaggagctggtgtcctgttctgactgtggccgctcagggcatccatcttgcctccaatttacccccgtgatgatggcggcagtgaagacataccgctggcagtgcatcgagtgcaaatgttgcaatatctgcggcacctccgagaatgacgaccagttgctcttctgtgatgactgcgatcgtggctaccacatgtactgtctcaccccgtccatgtctgagccccctgaaggaagttgcagctgccacctgtgtctggacctgttgaaagagaaagcttccatctaccagaaccagaactcctcttgatgtggccacccacctgctccccgacatatctaaggctgtttctctcctccacttcatatttcatacccatctttcccttcttcctcctctccttcacaaatccagagaaccttggggtggttgtgccagcctgcctttggcagctgcaagctgaggtggcagctctgaccacctctggtcccaggccctcagggagaaaggagcaacacactgcccctaggcgtgcgtgtggcccagtttctctctgctctccattaagtgcattcactctgcttgccttgggcccagcccctggtgatcacagggttcaaacagtgtcctcctagaaagagtgggagagcagctcacttctctgtgttctgcctcccctctggtctccagagttttcctgtcctctagaggcaagccaggccagggagctgggagcgagcaagctgaggccacgtccacaaggagcttttcatgcccctgtgccgcatagcctcacctctttcctccagagtggctctctgcggccctgtgttcctgctacagagtgttcttttctggagtcaggatgttctcggtcaccctcctggttctgccctgtcccattccaccccaccccagggggaacagtagcttcaccttgttattcccattgctctcctggctcactcttacggtcggtctccagtgactgaagcattccccacccttggaatttctcatcttctgcctcccttcctactccttttggttttgtggggagaggggaaggatcagggggccaggccagcagctcgggggccacaaggagatggataatgtgcctgttttttaacacaacaaaaaagcctacctccaaaatcccctttttgttcttcctggacctgggcattcagcctcctgctcttaactgaattgggagcctctgccacctgccccgtgtatcctggctctcagctcatggggaagccacatagacatccctttcttcccttgcacgctcgctagcagctggtaaggtcttcacaccctgattcctcaagttttctgcttagtggcactgacattaagtagtggggggacagtccatgccaggacaccctggagtagccttcccccttggccgtgggcaggccctaactcactgtcgctttggagttgaggtgtcttttctttttctttctttagttcctgtattctaaacattagtaaaaataaatgtttttacacag

SEQ ID NO: 1502 - DNA, 3329 bp, Homo sapiens
aaataaaaaataaaaataaataaataagtaaacaaatgcaggctgggtgaggtggctcatgcccgtattcccagcactttgggaggctgaggcgagtggatcgcctgagcccaggagttcgagaccagcctgggcaacatggctaaaccctgcctctaaaaaagaaaaaaatttaatacagtctgcgatgctcgtgagtcattatggtaaagctgttagtcaatttctccactgatgtagcagtttccaattgtcctttaatcaaagcataaatgacaaggtcaccagtaagtttttgtctttgagattatctaaaactgagtttcccttcaatattttcttgaaagagaatctaatcccccaccttttcttcccccccacctgggggctgcaggaaagatatggagagagatttgaaggctgactcaaacatgccactcaacaattctagccaagaggtcacaaaggatctgcttgatatgattgaccatacaagcatccgaactattgaagaattggctggaaaaatagaatttgaaaacgaattgaaccacatgtgtggtcattgccaagattcacccttcaaagaggaagcctgggccctgctcatggacaagagccctcagaaggccacagatgctgaccctggcagcctcaaacaggcttttgatgatcataatattgttgagactgttctggacttggaagaggactacaatgtgatgacgtcttttaaataccaaattgagtaaggacagttatctaagctttgattccttacagcaggaggctgcccttgagcctgagcagaagcagctacaatggccgtcaggggccacatttctcaaaaggttggcagaacctgaattaccagaccctttttaaatcccagttgtgtccctttttaagctgtgagaccagttttttgaattccattgctttgaaatgtttcctattactgatttttttttttaactttccttgacatcttgaatgtgtttttttgattgatgttcaatatacccagtacccatggtaggtgtgggtcatgggcctctgctgtgtctcttagtgttcttttccacgggcccctaaaaaagtacaggagtggccaggcacagtggctcacgtctgtaatcccagcactttgggaggccaaggcgagtggatcacttgaggttaggagtttgagaccagcctggccaacatggcgaaaccccatctccactaaaaatacaaaaattagccaggagtggtggtgtgcacctgtagtcccagctactttggaggctgaggtaggagaattgcttgaacctggaggcggaggttgcaatgagccgagatggcaccgctcccctccatcctgagtgacagagcaagactctgtctcaaaaaaataataatttagctggtcatggtggttcgtgcctgtagttccagctacttgggtagggactgaggcgaaaggatcacttgaggccaggaggcagaggttgcagtgagctgagatcacgccactgcactccagcatgagtgacagagtgagaccctgtctcaaaaaaaaaagaaaaaaaaagggaagaaaggaaactgaatctcagggaagtgcccacctcctgagctaataagaggaaggaatatgggggtgaggcagagctggcaaaaggctgttttttgttttgattgtttttaaagaccaagtgaagtatagtataagaagtggggaaggagtggaacaaggagttagatctgtaactgtgagtagtcaattgagataactcaatacctttggacctgattgtttttaaagactgagggtagtataagaagaggggaaggagtagaacaaggagttagatctgaaactgtgagtagtcgattgagataactcactacctttggaccagccagggctgtttataagtgctaaagcccgaacaaaccaaagagttggggagaaaggcctaactaacagctgagtgattgtctaacagactgtcttttaggccagtgactctggcatagggcaggctgcatagccagcaacatcccttaccacaggtctagtgattcctctgggctcaaatgtggaggctacacacccactccttagcagaggttggcctggcacctgctggtgccccaagaactatggcatggttagaccctggccacttgattgcatgtgcctccccagtgggcgtgccctggttcccaaccagttgtggccactgccactgccctgcctggggcaggagttgaggttaaggctaactacaggctccttccaggccacctaccactcagaccctgcaggaggtagcacaaagcattcacagcctgtggagtcagaggccaatttcttctccctgagcaagaagaatggaagcaaatgaaaagtgctcacagtatgctcaactgcccctgctcaggtgaagaatagcctgtctggatggagagatgtcaggctacttgatactcagaaaaacaggtctcaaaacagtgccttccaaataatacatgtggatgtggacactcttctatagacgaggtggagcttaattcctgtccttacccccatattcccacctcattaccaccctttgaaggtgaactagacttaatgatacttcccacgactaaagtagggaaagggaaaagtcacaaacttatagtggggaagcctggcagacacctaaccaagtgatgtcatgtatatgtcatgagaggggtgcatcacttccctggtattcctaccaaaaacccaaattcccagtgtatgatcttgagacaaatgttagacaaatccagacgtggggtacattctacaagatacctggccagaactcaagactattgagatggccgggtgcagtggctcatgcctataatccccgacactttgggaggctgaggcgggcagatcacttgaggtcagaagttcgagaccagcctggcaaacatggtgaaaccccatctctgctaaaaatacaaaaattagccaggcatcatggcatgtgcctttagtcatagctacacaggaggctgaggcaggagaattgcttgaacccaggaggtggaggttgcggtgagccaagatcgcatcactgcactccagcctgggcaacaagcaagactccacctcaaaaagaaaaaaaaagactgttgaggtcatgaaaaataaggaaagactcaaaaactatcaacagaccactaaagaccaagaagacacaatggctaaatgcaacatggaatcctggagtgcatcctggaagagaaagagaacattattggaaaaactgataaaacttgaataaaaactagtgttt

SEQ ID NO: 1503 - DNA, 2541 bp, Homo sapiens
gtgttcgctgctgcacagcaaggccctgccacccaccttcaggccatgcagccatgttccgggagccctaattgcacagaagcccatggggagctccagactggcagccctgctcctgcctctcctcctcatagtcatcgacctctctgactctgctgggattggctttcgccacctgccccactggaacacccgctgtcctctggcctcccacacggtcttcaacggggcctcttccacctcctggtgcagaaatccaaaaagtcttccacattcaagttctataggagacacaagatgccagcacctgctcagaggaagctgctgcctcgtcgtcacctgtctgagaagagccatcacatttccatcccctccccagacatctcccacaagggacttcgctctaaaaggacccaaccttcggatccagagacatgggaaagtcttcccagattggactcacaaaggcatggaggacccgagttctcctttgatttgctgcctgaggcccgggctattcgggtgaccatatcttcaggccctgaggtcagcgtgcgtctttgtcaccagtgggcactggagtgtgaagagctgagcagtccctatgatgtccagaaaattgtgtctgggggccacactgtagagctgccttatgaattccttctgccctgtctgtgcatagaggcatcctacctgcaagaggacactgtgaggcgcaaaaaatgtcccttccagagctggccagaagcctatggcccggacttctggaagtcagtgcacttcactgactacagccagcacactcagatggtcatggccctgacactccgctgcccactgaagctggaagctgccctctgccagaggcacgactggcataccctttgcaaagacctcccgaatgccacagctcgagagtcagatgggtggtatgttttggagaaggtggacctgcacccccagctctgcttcaagttctcttttggaaacagcagccatgttgaatgcccccaccagactgggtctctcacatcctggaatgtaagcatggatacccaagcccagcagctgattcttcacttctcctcaagaatgcatgccaccttcagtgctgcctggagcctcccaggcttggggcaggacactttggtgccccccgtgtacactgtcagccaggcccggggctcaagcccagtgtcactagacctcatcattcccttcctgaggccagggtgctgtgtcctggtgtggcggtcagatgtccagtttgcctggaagcacttcttgtgtccggatgtctcttacagacacctggggctcttgatcctggcactgctggccctcctcaccctactgggtgttgttctggccctcacctgccggcgcccacagtcaggcccgggcccagcgcggccagtgctcctcctgcacgcggcggactcggaggcgcagcggcgcctggtgggagcgctggctgaactgctacgggcagcgctgggcggcgggcgtgacgtgatcgtggacctgtgggaggggaggcacgtggcgcgcgtgggcccgctgccgtggctctgggcggcgcggacgcgcgtagcgcgggagcagggcactgtgctgctgctgtggagcggcgccgaccttcgcccggtcagcggccccgacccccgcgccgcgcccctgctcgccctgctccacgctgccccgcgcccgctgctgctgctcgcttacttcagtcgcctctgcgccaagggcgacatccccccgccgctgcgcgccctgccgcgctaccgcctgctgcgcgacctgccgcgtctgctgcgggcgctggacgcgcggcctttcgcagaggccaccagctggggccgccttggggcgcggcagcgcaggcagagccgcctagagctgtgcagccggctcgaacgagaggccgcccgacttgcagacctaggttgagcagagctccaccgcagtcccgggtgtctgcggccgcaacgcaacggacactggctggaaccccggaatgagccttcgaccctgaaatccttggggtgcctcgaggacgactggccgaaaagccgcattccctgcctcacaggccggaagtcccagcccagtccccgcgcgcgtccctcttcctcctcatactttcccttgactgagagctcctctaacccctgttctgatgggggagggcggtcttcccacttcctctccagaactccagaaagagcagtgtgcttatgcttcagtccaggctggagaggttggggccggggtagggaggcaggagccatgtcagttctgaaggagggtgaggcggtgggggattgcagggggcggctgagagaaaacctccttgggggccagggattccctttcccactctgaggctctggccagagggagagaggactctggacctaggaaaagaggcttttggctccaggtggtcaggacagtgggggttgggggtggggtgggtgggtgctggcggtggggaccaagatccggaaagatgaataaagacaaacatgacaaact

SEQ ID NO: 1504 - DNA, 2592 bp, Homo sapiens
cgcctgggctcctagggactgtggcctcggcggtatgtcccttgctttcccttgaagcgggagaagacccggcagaggcgctctgtccgctgcagccgcgcgggtggaggaggcagagtctgaggtccttcttgtggatggaaacggggtactccaccaccgaggctttggggtggcctgccaccttggcgtccttacagacctgccgtgtgttggggtggccaagaaacttctgcaggtggatgggctggagaacaacgccctgcacaaggagaagatccgactcctgcagactcgaggagactcattccctctgctgggagactctgggactgtcctgggaatggccctgaggagccacgaccgcagcaccaggcccctctacatctccgtgggccacaggatgagcctggaggccgctgtgcgcctgacttgctgctgctgcaggttccggatcccagagcccgtgcgccaggctgacatctgctcccgagagcacatccgcaagtcgctgggactccccgggccacccacaccgaggagcccgaaggcgcagaggccagtggcatgccccaaaggagactccggagagtcctcagcactttgttgaacgtggtggtgagagcacacgtcctcgtctcattcctgatcgaacgcggtggtgagagcacacgtcctcgtctcgttcctgatcgaacgcggtggtgagagcacacgtcctcgtctcgttcctgatcgaacgcggtggtgagagcacacgtcctcgtctcgttcctgatcgaacgcggtggtgagagcacacgtcctcgtctcgttcctgatcgaacgtggtggtgagagcacacgtccttgtcttgttcctgatcttaagggaacgtttgcagtctttcaccactagatgtgatgtgagctgttagattttcaaggatgctcttcatccagctgaagacggtcccttctagtcctaatttgttaagtgtttttatccttaaagggtactggattttgtcaaatgcttttctggcctctattgaaaagatcctgtgttcttctgttaatatgaggtgttacattgattgattttcatatgttgagccagtttccatttgtggaatacatctaactcggtcatggtgtataatccatttactctgctgctgaatgtgatttgcttgtattttggtgcggatttttacatctgtatttataagggatattggtctggtgttttcttatgatgtcttcctttggttttgatatcaggataatattagcctcatagattgggttaggaaatgttctctcctccgttttttttggaagagagagattggtgttaattcttgctagaacctttggtagaatttgccagtaagcctatctggtcttgggtctttgggaggattttgattcgattcaatctatgtatttgttatagatcgttcggattgtccatccctgagtcagttgctagcttgtgtgtttcttggagtttttccgtttcgtccatgttatctcatctgttggcataccgtcgttcacgggattttattgatgtgtgtgaggtctctgagaacgtccctgccttcactcctgcttttagtcactggcatcttcttttaacttgggccatctggccgtgcatggttttgtgagagtcctccttgactctgcagatgctgagcagtgatctggctgggaaaggggaccaggagtgcagggcacctgctgaggactcacctaagcccaagagtcagagagtcggagctccaaccacatctgcctgcatgcctttcccaggctctccccaggcggacagccagcaccccctccccaaagaccgggcagttcctgaccagcaccccaccaagtcctcagtaaggcctgtctttgggggagcagggtttcaggaggacagtgggggtggtgtagaactcatggctggcggttccgggcctctcaggaagctttgccactgggcttggggttaagtgggtgtggggctccgaaccctaaatgggtgagagttgaaatgaaagcggcacctgtagtccgtttggggtgcaggtgtgtgccaggggtcttcagccccggctggtggccacatgaaccacatgaggagaggcagggcgtgtcagcagcaaacctaagtgtgtgctcatttctgtgggcccttactctgtgacactgcagctctccagagagacgctttgaaaacaaaacaggaaagaacacacggccccgcgtctgttgcctgagtcactgtattccttaaaaggtgaaggaccctggtccttggcttttcgtgcacatgagaaaatgttggccaaggttagcgattatgcttctgtaatctgtaaccagaagtgctcttatgcccaaaccttgatgtgattctgctgtaatgtaacttcggagccagctggatggatgtgactgtgcaggtcctgagccccggcccccgtaaccaagcagtgggccgagacactgagccgggcagtcaaacaggagctctctaaggctgctcccgggctgggacctgggtctaggattctcagtaagacctttgaataaaactaacttgaattcttc

SEQ ID NO: 1505 - DNA, 2083 bp, Homo sapiens
aatgaggaggagggagactgagggggctgcctttccttggggactggggaactcatgccctgcccccacccacggggctccaggggtgaggaaactgaggctcgttactgacttgcccaagattccacagtggaagagcctggacgtgaactgcgtctccaggtctcgaaccatttcctgtcctggtcccaggacctaggtggggccgccgcgcggtcagacagagccggcccgcctgggaccccttggctgccctcgccccccggccccgccccccgcacgctcaccggcctcggcgctggccgccccaccatccggagcgcaccgcccggacgcccagcgccagcagcagcagcaccagcagcgcggcgccggccgtcaggcccccgaccagcgccctccagtggacggccacctcgcagcgcgggccagagaaccagtgcgtgtcggtggagtagcagctgcgggagatcgcaggaacgcactggccctggtgacagtcgatggcgttgtccacgcccgacgtgcatttggtgacacagcggagccgggtggcctccaccagagggaagtagaactcttcatagcccgtgggagcggcgcggcggcagatggctgggggttggggaggggtatgcacagagacaaggacctcatccattctattcaggggcctgataatggtgcctctgaatatgcgcgaggaggattccatttccgaggtgggatgctgtggggtagaccctgggattcgatgaggggaggccaccgccagcaccctcaccctctcctcgtggcccctgctgtcctcaggtggaagccactaaccaacgccaggaagagcctccctaggccacatgacttgcctcccccaaaggtctctccctgcccacaggcttcaatgggcaaatgtccctggtggcaggggtcatggccatgggagaccactcagccctttaccccaccctcaccttccggggtcagctctgtcttgctgttgttgttcaccttgatggagtcaggcttaaaacacagggctgcggaaacacaggcacagatggaatgggcggggcaggtcaaggggttagggccaggaagcaggataggcacagggagggcagtgagggctctctccgtctgggggagtgtggaggggccacaggggaagactcctgttctctcccttatctcccctgaataatccgaggtcttcagccatcgggaaatgctgagcctgacgatcagggggtctcttccccagtacccaggtcctggggagaccctccctagccccactcttgatggcattgtgtgtagacttattcccgttctcccaacctgccagaggtaccacagggctggcacctgagtccagtggccccctggctgagctggagtgggctggggtgacacctcaggccctggcccctccctccagcccgggctcactctgggagtcctggcagctgttcgcatcctggctggcgttctggagcccctccttcagcgtggtcttcacctgctcatactcgctctccagctgggggctgaagggcatctccagcaggaccagagacaaggtcttgctgtcacccaggctggagtgcaatggtgtcattgtggctcgctgcagcctccaactcctgggctaaagtgatcctttctcctcagcctcccaagtatctgggactgcaggtgatccacccgcctaaccttgccaaggtgctgggattgcaagtgtgagccaccacatctggcctgacgttctcgttgcatcaagccatcatccaccgggcgcccctggacgcgcgttctctccctctctctctttctctctctctctctctaatgctgacccactcagtagagcaggggccagccagagggggacgaagtcaccaatccaggcaccaccttcccacatgtccctgcaacttctctctttccagtgtgctgaagaagggaggtgccacccctcctccagataaatggccccagaaaacgatccaaaaaaatacccagggagcgattccttatgtaccccctccacccctctctttataaaatctgatgattacaaaag

SEQ ID NO: 1506 - DNA, 2075 bp, Homo sapiens
gatgcgggcgggcatctctgccgaaaacacctacagcgcccgctccctcggtccttcgagcagtgatccctccgcggccaacctccccagggaaaccagcgattcgcggttcagatagcgaccttcgcccgcaggttcctgctctgccttcagacttcggcttcagtggcacctgctcagcgaggcctcgtctaaccaagccatccgaattaactacccactcactcgccatcacatcaccccgatttaattcgcagcggggcactgactttacactcgtgtgtcttctgtgtttatttatgctgccacgaaaacccggaacggcggagcggcgccgcccctcgcggcacctccctggcagcccttggaggccgcgctgggcatgctcagtcagctgggccgcctcagctctcggagtaggaagctcgggcgctccggctgtaaggagccgcggcggggggaaaatggagcccttcaccaatggtgagtgggctgccgaggcgccgggacccgggctctccggagccctgagggtcgtgggcagtcgtgacacgcggggtcgggctgcagccgtctcccccaacaccgcgggcttcccacgagggctgagggaggcagggagaggggatctgggggaggcagggaggttcggggggcgggcggcggccagtgcgggacccggggctggcttgaaggtcagcgccgccgccgctcgcccggggtgcggccggtgggcaaacagcaaagtttgggctgctgtgcgcagaggagtgggcagtgggaaagttggcagctcaggtttgcccccggaggaggcggtgtcggcccgactctcctgtaggagcgttaagttgtggcagctgccgagcccaacttttgtggggcgccaggagctgtccccctgcccttcagtgagctgccggcgtgacttttcctaatagggcggggtgggggtgggaggcttggcaggttaatgttgtggaaggaagggaaacttcagggaaggcttgctcacctcgctcggtgccgcggaggtgcctggccacagtgccaccctcctgaccctgccgaggtactcggcagggccaccacgcatcccctcactggctgcagatcacatcagtttttcagtcaaagacttgttaatgtcaagggtccgtcacggtggtgataccactgtgtgacaggaagcgagagtcaacgcagggagcctgcaccctgcaaacagccacagcccttcactgaacggggagcataaatcccaccctagttagaaccatggcttttgtgcggaccagaagtgccagagccacaatataggggtgagatgtcttaccgttttgcggtgttgagtgtgtggattcccttttaagatagaaagtaggaaaactgccagtaagggagacgactcactaaaagaggattcagtctctggttgacatgttttgctgagtgtggttggttacttcaggtacagtatcacattaataggggccacagtctatatccctgtttagtttgttagttaccactcaagagcagacagatattgtccactttatcccaaatcccagccagactttgttgtatgctgtgcttcattcatggggctgtgaactactgattatattctccctattcctaatgtagaatgctttattctactgccatctttctgtctgcactgtttaattaggcttactgataacaactttaattctgaattttctttctcattcaggttctatttgtaattactaagacttaaagaatagtctggtgaagttactcgaagaattaaggaaggtttgagctaaaatgaactagagaccatctagtactttagtgtaaaatatgtttaatacaagtcgttaagtccttgtaagtgactattccaatgttcattctttgtttttggaagaatgcttggagttaccatgtttttaaatgtgaaatttcatctaaattaaaaaaaaaatctctgtgatgaggctgactcacccatttggtcaagattagtgctagctgatttgctgaacctttgcctacagaattaaagtactttctcaagtttt

SEQ ID NO: 1507 - DNA, 2419 bp, Homo sapiens
ttacttcaacttacattttctgttaatgttggtaaggatttagtaaagtaacaagaatacacattatctaaagaggcaattttaaagaaaaattaataaagcgtccttaaaattgaaacttatcagtgttggttgggccaggcagtcacagtttagaacttgctgttcaaaaggcaggagtgatgccagaaagagctaccctcccgtgctccgaacaagcctgccatagtcagttctgtacagtgacaggcaacatcgcggggaggaaggatctcgccagtcgacaccaatggggctgctctacgggctcccctattctcaggcccacagatctcaggaagcctctgcagtcagaggatatgggtggagaggggaaactgagacccagagacgggaagtgcttgcccagagacattcagcttgtcagtagtggatctgggactagaacccagcgctgcctgttgctagctttgaggtctttctacaaggaggagggcttccctaaatcccagtaagtccatctttccctatagttggctaaaactgagcacaatgcactctctcactttattcctacaatacccagagaagtaggcagcagaggcacagttagccatttccagttggagaaaatgagacacaggcaccttaggcctttctcgcagggccccaccagttcccagaggtcaggctggtgctcaggaccactgtgcataaaacgcgggtggcccccgagacccccaaccctccaggtcccgtctggctcacatcgttgctgatggtggagtctcggtggatgaggcgctgcacgtggctgtcgatgctgctgcctgaggagaacttggtgcgtgtggctgggtgggcctcccgctcccgctgcctcaccaccacctcgcaggccttccactctgccaacacctgctggtaccttgctgccaccactgcgtccacctgtactcagaccacaccacgaccatgggggaagcgtgcaccaggccctccccttcaggagctgggcctgcactggaccttgggtcctgagtctcagactcaagacgggcctcagggtaaggacggtggagctgccctgccatgcttctttccggctgggaaggggctgaggcttccaaggtcccctccctggcgtcccctggcccagctccccatctcatcagccccatgggaacaggctcccctcacctgctccatctccttcttgctcatgccgaacttgtagtggccaagcagaaagggccagacgtccttgcggatctcgtgctctatgcctccgtagtaaacttgccgcagcagctccagctctttgtagttctgagggacccggggagtcaagactgtgcagcctccacagtcaccgtggcccagctgggtgagccccatcccacggagaatgggctggggcggggcctgtagtgactgctgaagcccaggcaaggcctgctttggggtggccacgtcctcccgtgccccagctcacagtgggatgagatctcgttctgctctccttccttaaggggcaggaaatggcgcccggagagaggcaaagctttgtccagggtcacagggcgatgtggaggcaggacggcttcccagtccagcccccttcccgtgtcagccccaggcccagctgcaagagattctgccgggaccctggtcgctccgtggcatcggccctggcctgtcaaccgcacccactggcacattttaccctgaagccctcactcctgcccgccccagcccctcgacctgtggccctggaaccccagggttggcacctttttgtccttctgatacttgctccacacgtccttggtgaggcccgcggaggcccccgggggccggtcaggtgggataacgctatggtgcaccagcgccgacaggtgggtccgcaccgtggacaggtggcggcagtgtgccagccctgcggtgggcagcggtgggcagcaggaggctgggacccagggccgcccgcccccagcccgccacagcccggcgcgccccacactcacagccgtagaaggcccgggacacgatctgcctcttcatactctcacacagtagcctgagcggcaacctgtggcaacaaccgggctcagcagggaggggctgcggcccctctggtgggaggagagagagaagggaggaggctctgtcctggggggcaggtaaggcactggggagggtgcgaggaggaggagccgcagcccagcagccgtcagtgggtgccctgtccctgcctgccacctggacagagtgctgtggggcccccgcctggcccccaaccacccagggatcttggtcaacgaacttcacctacatgaatcttcgtttcctcatgtgaaaaatggagagaggcagcggaggatcatcaggattaataaacggaagacgaagtaaaggt

SEQ ID NO: 1508 - DNA, 2003 bp, Homo sapiens
aatccaaacctccctcgcccaactctgcccgccacagatgcccctgggctcccctccagaccctgccccgcatccccgccagcctgaagctcctgcgcacctgggctgggggagccggtcggcacccccggagtcggagcatcaccgccgctcggagttgccacagcgacggggaggatctcgatggagacagcatcccccggcccccgcagaatacggattaaccccttctcctccagctcctccaccttcagctccagggccgagggccgcgtcggggcagcgggaggcgctttctcaggctctgggggacgcctggaggcgcccatggcggtcgattcgctgaagcgctcctacgaaccccacgggaggggtcagtgcccaccagcaggctccttggcaccaagcctccatcttcttcccggggtggagggagatgtcaagcctagaagcctcagctggcctgttcttgggcgcctggcctaccacccgccccagcctcacccgcagggtctccaactccttgcgcgcctggcttagctgtttttccagttctgcaatcttggccatggattcgttctccgcgtcccgaagccgctctgtcagctgtagcaccagcacatggtgagccccgacccgcagcccggcactggcaccgccggtgagggggcggcatcaggcatgcctgcctggaagactgggggaggctcccagatccgctcagcccaggtgccaagggtgggccgagcctggcactcgaacccaagcaaataaggagaggaaaccaagatggcaaaactgacactgagagagaggaagaggcctatccaaggtcacacggcaggcaacggcagagccaggatttaaacccaggtctacctgaccccagcactcatgctgctaaccactcagccatactctgccgtgggcaggcagttcagtctggggggcagtacagggcttacctccaagtacaggtccaggcccaagtgggtgaactcatattgcaggaagacacggaagttcatgttctccaccgaatgtaccacaatgttgatgaactgcatgcaggccacctgggagccagggacatggggagatctatgatcctctaggtggggttgctcaatgccttccacctccacttaccccaagcctccctccttctccacagttctcactccactaactcccagccttggcctgcccaacatttcacctccatgttccctcaatccagccccctgccaacatccacccttcccctactgaccactcagtccttacgctttgcgggggcagagcccattgcccagcacccaggaccctagctgctccctgcacccaagagggcctggcccaggcctcaggctgctgggctcctgagctcaccatgaagtcgatgttgctgtcctcattccggaaatattccatcagcttttcaaagcggtgctgctccccacacacctgggtaaggggaatggctctcactgaggcccagtgacacacgtcctaagctaccttctggctgccacacctgtgcttcaacaggctcctctccagttaattctaagttgagccacgtcactcttctgctcaaaacctccactccctctcaatctcccactctccctcactttttccactctggccacactggcatcctggcacattcccaccccagggcctttgcacttactgttccaactccctggagtgccctcactcccacaccaagtcccttgcttccttcacagctttgctgaaatctcacttgctcagtgaggccttccctgaccaccctgcaaccaattccccctccctctgcaacattgctggcttttttctcacagcatttatcatttcctaacatactatgtaatttgcttgtttattatatcgtttctgtctttccctatatggtttcctttgttcactgatgtgcccaagtgccctgttcctgacacatagtaggcactcaataaatattcattaaaggaatg

SEQ ID NO: 1509 - DNA, 2835 bp, Homo sapiens
tctcatgtgttggagcacggagcccttgaccagtgaagaggcaaggccagggctgagcctaagtcacaggcagaaaaaagacgcagaaacattggaataacgctccacacgcactgcttgattctgcgctagaaaccctgttatctccgaactgttggtgttattctgagttacagcaccagctcttttataaagagggagacctgctccttctttaacagcagattcgtcaaaatacgtccaaggcaaggaaacctagaaaggcgtctgggcaggggaaagtcgatgcgagggcgggccagggacctttcgtcgcgtccccaccttggcatttcccgtggcgtgagcggccccggcatccgtgtcgaaagtgcggcggcggaacaggcgcgcaggagaggagcggcgcaggcgcagacgcgcgggcgggaagatggcggctgggttcaaaaagagaactgccgtcctgatggaagagaacttggtgaattcagaaccacaactgtcaacatcggttcaattagtaccgcagatggttctgccttagtgaagttgggaaatactacagtaatctgtggagttaaagcagtaagtctaaatatgtcctattgagatttgagttacaaagttagctttatttattagattgtaatatacacctgtaattctactcttgatttggtagttgggtgtcaatttttaatgtttaatttcccaagagctttcactatgagtgttagataatatgacccaagtttaatgactaagtgaacaattgtcaaatgtagcaaaatgaaacaacttttaaaatctgagtcaccattttaaaaaaattgttatatcatttgagacattaacagatttttggtgacatccttttagccagtgatgacatgtaatctgtgtaaatgtgtagaaaattgaaattgttgaaaagaaaaatttgagggaatactggctaccatttactgagtacttgctatgttccagacacctttttaggtgctttacagaattatccactttaatgcctataacaatcatttgttacttgtcttcacctcctgttttacagatgactttcagtaacctgtccaggtacataagactcataagtaaaacttagacataaatctgactccaaagcctgtgcttctttgactacagtctaccctgtgttatttaacctcagttgagattcttctttcgtaaacctggagtgatgtataacagtaagatttgagaacttgctccttgtcaggttttatgcctgggatttaacaggtctatctcatttggcccttattaacagtccctaggagtagacactattttcttcccatttgacaagatgaggagtttaaggtaagaggttaaataacttgcctgaagtctctcagccagtaagtatggctctgacatttgaactggcttagtaattgcagagcatttgctttttttttttttttttgagacggagtcttgctctgtcgcccaggctggagtgcagtggcacgatgtcagctcactgcaacttccgtctcctgggttgaagtgattctcctgcctcggcctcccaagtagctgggattacaggcgcccgccaccatgcctggctaatttttgtatttttagtagagacggggttttgccatcttggccaggctggtctcaaactcctgacctcaggtgatccgcccgcctctgtgtcccaaagtgctgggattaccggtgtgagccaccgcgcccagctgagcttttgctctttaccactaaagcagcagttcctaaatcttgctctatcatctggagaacaaattaagattcttggctagtagttgggggcacaaacccagttactattttttaaaagatctccaggtaatcttgccgagcagcactgtagtgtagtccactgtactgtagtgcctttttatcttgtagagctattgtgaggatcagcaccaatgtccgtagaggccctgacacaattccctaagctgatatttgatagagccttccataactgattgctaaattgtcttcataatttttcagtagcttctttcaataggaaacatttctttgctactataggaatttgcagcaccatcaacagatgcccctgataaaggatacgttgttcctaatgtggatctaccacccctgtgttcatcgagattccggtctggacctcctggagaagaggcccaagtggctagccaattcattgcagatgtcattgaaaattcacagataattcagaaagaggacttatgcatttctccaggaaagcttgtctgggttctatactgtgatctcatttgcctcgactacgatggaaacattttggatgcctgcacatttgctttgctagcggctttaaaaaatgtacagttgcctgaagttactataaatgaagaaactgctttagcagaagttaatttaaagaagaaaagttatttgaatattagaactcatccagttgcaacttcctttgctgtgtttgatgacactttgcttatagttgaccctactggagaggaggaacatctggcaacaggaaccttaacaatagtaatggatgaggaaggcaaactctgttgtcttcacaaaccaggtggaagtgggctaactggagctaaacttcaggactgtatgagccgagcagttacaggacacaaagaagttaaaaaactgatggatgaagtaattaagagtatgaaacccaaataaacagccaccacattttcaaaacagatttgtaaaaattgtatttgttaacactgtgcacaaacgttttatactaaataaatatcaaactacattcttctg

SEQ ID NO: 1510 - DNA, 2148 bp, Homo sapiens
tccaaagatctactcaaggacctcccagagttgcccaaacttctgacccagactcttcagaggcctgcgcggaggaagaggaagggctcatgcctcaaggtccccagctcctggacttcagcgtggacgaggtggccgagcagctgaccctcatagacttggagctcttctccaaggtgaggctctacgagtgcttgggctccgtgtggtcgcagagggaccggccgggggctgcaggcgcctcccccactgtgcgcgccaccgtggcccagttcaacaccgtgaccggctgtgtgctgggttccgtgctcggagcaccgggcttggccgccccgcagagggcgcagcggctggagaagtggatccgcatcgcccagcgctgccgagaactgcggaacttctcctccttgcgcgccatcctgtccgccctgcaatctaaccccatctaccggctcaagcgcagctggggggccgtgagccgggaaccgctatctactttcaggaaactttcgcagattttctccgatgagaacaaccacctcagcagcagagagattcttttccaggaggaggccactgagggatcccaagaagaggacaacaccccaggcagcctgccctcaaaaccacccccaggccctgtcccctaccttggcaccttccttacggacctggttatgctggacacagccctgccggatatgttggaggtctgacccctgacccttgacccctgaccccagctccacttgcccccagcacaatgggcctcccaatatccacccttgatcctacctgtactcctgacaccaccccacactcccttactacagtggggctcctgacatcccagcccctgaccttgacccttacccttgaccctgggtgctgcaattcagacacactttgcccccagggggatctcattaactttgagaagaggaggaaggtgagtggaggctacagtgggtgtggtggtgcctgagggtgggggtggggcaggggtaggatctcagaggctcgtcctccaggagtgggagatcctggcccgcatccagcagctgcagaggcgctgtcagagctacaccctgagcccccacccgcccatcctggctgccctgcatgcccagaaccagctcaccgaggagcagagctaccggctctcccgggtcattgagccaccagctgcctcctgccccagctccccacgcatccgacggcggatcagcctcaccaagcgtctcagtgcgaagcttgcccgagagaaaagctcatcacctagtgggagtcccggggacccctcatcccccacctccagtgtgtccccagggtcacccccctcaagtcctagaagcagagatgctcctgctggcagtcccccggcctctccagggccccagggccccagcaccaagctgcccctgagcctggacctgcccagcccccggcccttcgctttgcctctgggcagccctcgaatccccctcccggcgcagcagagctcggaggcccgtgtcatccgcgtcagcatcgacaatgaccacgggaacctgtatcgaagcatcttgctgaccagtcaggacaaagcccccagcgtggtccggcgagccttgcagaagcacaatgtgccccagccctgggcctgtgactatcagctctttcaagtccttcctggggaccgggtgctcctgattcctgacaatgccaacgtcttctatgccatgagtccagtcgcccccagagacttcatgctgcggcggaaagaggggacccggaacactctgtctgtctccccaagctgaggcagccctgtcctctccacaagacacaagtcccacaggcaagcttgcgactcttctcctggaaagctgccatcccccagtagaggccactgtgctgtgtatcccaggaccaccacccaactgtagcccattggaccccatctctttttctgactctgttggtactagatccatattccaaagacatcagcccatgggtggctggtggagagctcaatcccataaatgtagaaagaggtggggcatggatacgtcaaatccctccccagagaaatcttataaatgttagagacgcatcagaagtgacagatgcggatgaaaatagtgaccagagttatgaaacagg

SEQ ID NO: 1511 - DNA, 3128 bp, Homo sapiens
cttagggatttatgatttgggggtagtcttagaagtatgggacttttaaacagaatttgtacaatactgaagactaattcccattataattttgtattggaatccttattcttcttcattgttaactctgatattgtttatgtcacctgttgtttctgcttttcataactctctacttttaaaacagattttaaattgcttgttacaatttaattggaagtacaaaaactataaagccagtatcaacatcttccactaccacccccgaaaagacaaaaatagaactgtatcatacatatttttggcaacttgcaacttttacttgactgtctattcaaaagacagcatctttccatgtctatgttaagaggatgagatgttccttatcctttttgttactagatgtacaagtgttactttcagaagtatgcaattttttttttttttgagatggagtcttgctctgttgcccaggctggggtgcagtggctcaatctcagcaagctccgcctcccaggatcacgccattctcctgcctcagcctcccgagtagctgggactacaggtgcccgccaccatgcccagctaattttttttgtatttttagtagagatggggtttcactgtgttagtcaggatggtctcgatctcctgacctcgtgatccacccgccttggcctcccaaagtgctgggattacaggtgtgagccaccgcacccggccaagtatgcaaaaattttacccccttgtattaattggttggggctgccataacacagtaccacagagtgggtggcttaaccagatgttcattttcttaaaattctagaggctagaagtcggagttcaagttgttagcaggtttggtttcttctgaggcctctgtccttggcttgcacatggccgctctcccactgtgtccttccatggtctcccctctgtgtgtgtgtgtgtgtatgtgtgtgtgtttgtatatgtatgcatatctgtgtcctaatcccttctaaggataacagtcatagtgtgtgtgtgtgtatgtttatgtatgcatacctgtgtcctaatcccttgtaaggataacagtcattttgtgtgtgtgtgtgtgtgtgtgtgtatgtttatgtatgcatacctgtgtcctaatcccttctaaggataacagtcatagtgtgtgtgtgtgtgtgtgtgtgtgtgtgtatgtttatgtatgcatacctgtgtcctaatcccttctaaggataacagtcatattgtgtgtgtgtgtgtgcgcgtgtatgtttgtatatgtatgcatatctgtgtcctaatcccttctaaggataacagtcatagtgtgtgtgtgtgtgtgtgtgtatgtttatgtatgcatatctgtgtcctaatcccttctaaggataacagtcatagtgtgtgtgtgtgtgtgtgtgtgtgtgtttgtgtatgtttatgtatgcatatctgtgtcctaatcccttctaaggataacagtcatagtgtgtgtgtgtgtgtatgtgtttgtatatgtatgcgtatctgtgtccttatcccttctaaggataacagtcatattgtgtgtgtgtgtgtgtgtgtgtgtgtgtgtatgtatgcatatctgtgtcctaatcccttttaagtataacagtcatattggattactctaattaccccattttaacttgattacctctttaaagaccttattttcaaatacactcacattctgaggtactaccagttaagggctttaacgtgaatttggggagggaggacacaatgcagcccttaactcccctggaatataatttttaaaatatttctttagcttttcttactgaatttctgagtttccccccaaactgtcaaactaatgaaaccaactgttacgctttgtgttttatgtgaagatcctaaatggtttcaaatatgtcaggtccttaaaacctatgttcctggacatgagcacacactaacttttggggccctctccagaatctactttcaggatgggttaagaccactgagtgttcaataacgtaacccattaagctgagaaaaaaatctgacattcaggaaacaatgattcaagagtctggaaataaacctttagcagagtaaaaaaaaaaaataaagtttaggattttaattgaaggaacaaaataattggattttatgctgttccgcggagaggatactgagattattgcctgtgttcattgaaggatgcaaactcattgaagtctgattcatcagaacagcatttcctggggtctgaacatcgtttagtttgataaagacctagattttatattttagtctttctttggtcctcattaaaaagcatgtgcctgctattgtttttgtttctttagtgtctagtaaggtttgaaagacaacaacataggatccctgtgcaaggtaacacaattcccagtcactcaatttgcttctgtcttggtttgtttcaggctcacccaatacacctctccaagttcatgtcctgtgtctcaccttgggctacttcatcttcgacttgggctggtgcgtctactttcagtctgagggtgccttgatgctggctcatcacacattgagtatcttgggcattatcatggcccttgtgcttggggagtctggcacagaggtcaatgcagtcctctttggaagtgagcttaccaaccccttgctacagatgcgctggtttctccgggaaacagggcactatcacagtttcactggagatgtagtggacttcctctttgtggctctgttcacaggagtgaggattggtgtgggagcttgcctccttttctgtgaaatggtctcccccacgcctaagtggtttgtgaaggctgggggagtagcgatgtatgctgtgtcttggtgtttcatgtttagcatctggcgctttgcgtggaggaagagcatcaagaagtaccatgcttggagaagcaggcggagtgaggaacggcagctgaaacacaacggacatctcaaaatacactagccaaggcttgctccagattatggattgggttaagtcagccatgggaaccaggttggaaatatgactgttacataattacacttataacaaacttaggtttcaataaagggctaaatgtattgat

SEQ ID NO: 1512 - DNA, 2224 bp, Homo sapiens
atttaaacaccttggattttctaccgggtcttggcttctgttcccgcagggcatgagcctgaggagcaggacgcggtgggggtcacaggaggctgctgctcagagtctgcatgcgggaaaggggtcccacctgtctggggtgggcagcctcgtggtccagggcagtgcagggcagagcctgggctgtgcgatcacagccactgcctttctcctgggagcctccacttcctccaaaacgggccttgtgccagccccacccgcggcgagcggacaaggccacgagggcagggccctgagtacctgggcgggggggacactcccagggggcacagagggggctcccacctgggcacctgccccctgcccttctcttcttcctccacgtgccaggtggggccctgggtttgaggagcctcggacgcgtgccctgcccgcaggaagctggaggcgtgcaagtggcctcggaaatcgcggccgcaagaacagtagccgcccagggactaagggggcttctgggaggacacacggctggcccagggcgaggggtgtcactgcagggcgccccccaggcccagggcccgtcaggggacagtacggtgacccggcctgcaggtggcagtcagttctgtgtgtctggggcccacagcacaggttgggtgggggctggggcaggggcagcagaagtgggcaaggcctggggggctcaggcactgggcgtggagagcagacaggaagctccagtgggcaccaccccgggaccgcggctcccacccgtgctgccccccacccatggccacggtcaccaggaacagcgggacctggggtctccgagggactcagcagggcgggcacagaccagtggagtccgggctagagagggccagctcccagcctcttgcttcctgggctgaggacatggggatccaaggccagtgggtctgcagggcccagcccggctgcctgataagataggccgagctcctccctgcacggctgcaaagacgcccacctgtcttattggatccccacaggaatagacccaccaggcggcccccgtgtctcactctgtcagcaggtccccagggacctgctgccgaggggcagtttctggaggctgggggcactggctgggctctaggcctgctctgcctttgccgtggggaaggccaccccgataggggtcaagttgctcaaatctgcgtttggagggtatgtggccgagggctccctttctggagacccagacaccgcctgggctccgggcggcagaggctgaggtgtcaggggctgagcccctatgtcagcaacacctcaggcctgcactttaggacaggggagaagtcagtttccgccaaatgccccctcagaccagccgaggactgtgccaggaaactgacatgctcagcgctcaagccagctgggacagcgaccgagcccagagagacggagcaagttgcctgaggtcacagagcagggacttggacaccaggcagccggctccacagaggccctctctcctccctgcctcctgaccctcagacgcctccgccccacgggccccgacagaggagcaggccatgaggcaggcaggagccacgtatctgggcccagcgcacccgccaagctctctagcctctcctggcctcagtatccttctctgggagatggtccagctgaaaatccccagcatccacaagaaagggtggaagccctgggggccctggcctggcccaggtgcaggctgcatggccgggcggggcggtgtctcctttcacagcttccccgtctgtccgcagcctccaggagccccacacagggctggggctctgtgcccccaactcacacccgtcggctcccccaggaggagcaggctgggcccagagccgcagggtgggctgcagggaggtctgacttagctggggaaagtgccatccctgccattgctagtgacaagctcgggctgctgtggccccagcacagattcaacactcactgcgctacgtgccagctgttgcacactcacctccacacccaactcacaggaagcaaggctgggaaggagggaactggccccaggccacacagatgctgcgagttgggattatgatcgggtgcagtggctcacacctgtaattccagcacttggggaggccaaggcgagtggattgcttgagcccaggagtctgagaccagcctgggcaacatggtgaaaccccatctctac

SEQ ID NO: 1513 - DNA, 2175 bp, Homo sapiens
ctttctgtttctttgcttggcattacccgatgattaattttgaaaagttactcaaacaattacaattcaacttggtcaacatcagttctcacaaatagaagctgactgtcatttattcactcagttcctgttggctgagtgttggctctagggctggcaccaggcactggaattaaacattctggactccagaggggcatgaaaactcttcctgaaggagatgcagaggaagattcgaactggaggaaaaccctaaaatgacgtggacagctaactagctagatggatggatggatggatggatgggatttattatggaattggctcacatgattatggaggctgagaagtcccttgacaggccatctgcaagctggagaccctgggattctggcagcacggctcagtccaaatccagaagcttcagcaccaggaaagccaatggtaattctcagtctgacgccaaaggcctgagaaccagagcagtggatgggacgctggtgcaagtcctaaagtccaaaggtcagggagctcggagttctgaccttcaagagcaggagaagaagagtatcccagctccaggagagagacagacagagaaacaaaacaaaacaaaacaaacaaacaaaaaaagtgcctttttttctgcccattttgtttgatctagaccaccagtcaatggatggtgcctgccccccactggagggcagatctgctcccttcagtccacagactcccacaccagtctcctccagaaacgccgtcacagacacaccccaaagtgaggcttgaccagctttctagggattctttaattcaggcacctgaaattaagcatcacacccaggatccatgcaggtatcccttcagccagcccatgaggtggggttcattgcccttattccaccttcgagatgcagaaggtgaagtctggaatcgttcaattatggctcagtgccaagcaaccagcattgagaggagctgggatgcctgtgggtggcccaggatgagctcctgaacatcttagtcccccaggaggccagagcatccctgatctgagagtgaacagaaggcctggcaccaggccaagggtcgaggcaaagaggacttcgctccacttctgttgagaagtgttctttgtacccaatggtacaaagaccagggattttggtgacacagcagcccgagcccagcctgggtgcctaggatgcagcttagctggtcaactgtcagtactaccaggacttggcccttggaaacctgcggggtggcagtgctctaccaggagggggccaactcgacaaaaccagaaagggtgaaacgtcctgcaccagagagtttcagacatcagcgatggactggttgattggtagtgtttttgctgagactgatggtggactccccatctgagagatcccagattccttcaggtcaaaggtcagcagctacactggagctttcctgacccccatgtccaggtacaaagaaaacccatcacctgagagccaatggcctccagagctagtgtggcagagggggcttggctcacgtgtcatcctgcttctttcttgctgtgtgactttgggctagtagcttcacctctctgagctttgattcccccactgatgatcaaacatttctagtgccaggtgctgttctaggagctgtgtacctactgtttcaatcctcataacactcctgtgaggctggcatcattgtctgcacacctgtttacagatgaggacacagaagccccatgagtggaagggatttgcctcacgccacagtgaacaaggggaagaggcaggatcagaactcagggagcctggccgcgagtcctgcactgctcacaacaggctccagctgccctcgtatgaagacaatagctgtaaggatgaaggcacacaaaatgccaagtgagagctctggctacagtccctctcaccatctcccaaggcaaaccctgcggctgtggccttggctttgccagaaactgattccatgctgctcccccaggggacctcgaaactgcaggtgtgccaggacattcctggctgacaagtgcggggtcgcaggagggctggacggcgtgcctctgtgtccatcagctccttgcgtgggtgcgctcatgtacggggtttaatgaatgaaatgattaaaacctggaaaaatgtg

SEQ ID NO: 1514 - DNA, 2608 bp, Homo sapiens
tgatcccaggtagtggcgccggtggatccggatcgagggcaggaggctgagacccgcgggagctggccctaaagcaaggacctgagtgcaagtaatttttttgggaagtaataacagaaaataccagcaaggaagaagacagtgaacccaaaagaattgaaaacaggatgctgcccatcacagaccgcctgctgcacctcctggggctggagaagacggcgttccgcatatacgcggtgtccacccttctcctcttcctgctcttcttcctgttccgcctgctgctgcggttcctgaggctctgcaggagcttctacatcacctgccgccggctgcgctgcttcccccagcctccccggcgcaactggctgctgggccacctgggcatgtaccttccaaatgaggcgggccttcaagatgagaagaaggtactggacaacatgcaccatgtactcttggtatggatgggacctgtcctgccgctgttggttctggtgcaccctgattacatcaaaccccttttgggagcctcagctgccaccgcccccaaggatgacctcttctatggcttcctaaaaccttggctaggggatgggctgctgctcagcaaaggtgacaagtggagccggcaccgtcgcctgctgacacccgccttccactttgacatcctgaagccttacatgaagatcttcaaccagagcgctgacattatgcatgctaaatggcggcatctggcagagggctcagcggtctcccttgatatgtttgagcatatcagcctcatgaccctggacagtcttcagaaatgtgtcttcagctacaacagcaactgccaagagaagatgagtgattatatctccgctatcattgaactgagcgctctgtctgtccggcgccagtatcgcttgcaccactacctcgacttcatttactaccgctcggcggatgggcggaggttccggcaggcctgtgacatggtgcaccacttcaccactgaagtcatccaggaacggcggcgggcactgcgtcggcagggggccgaggcctggcttaaggccaagcaggggaagaccttggactttattgatgtgctgctcctggccagggatgaagatggaaaggaactgtcagacgaggatatccgagccgaagcagacaccttcatgtttgagggtcacgacacaacatccagtgggatctcttggatgctgttcaatttggcaaagtatccggaataccaggagaaatgccgagaagagattcaggaagtcatgaaaggccgggagctggaggagctggagtgggacgatctgactcagctgccctttacaactatgtgcattaaggagagcctgcgccagtacccacctgtcactcttgtctctcgccaatgcacggaggacatcaagctcccagatgggcgcatcatccccaaaggaatcatctgcttggtcagcatctatggaacccaccacaaccccacagtgtggcctgactccaaggtgtacaacccctaccgctttgacccggacaacccacagcagcgctctccactggcctatgtgcccttctctgcaggacccaggaattgcatcggacagagcttcgccatggccgagttgcgcgtggttgtggcactaacactgctacgtttccgcctgagcgtggaccgaacgcgcaaggtgcggcggaagccggagctcatactgcgcacggagaacgggctctggctcaaggtggagccgctgcctccgcgggcctgagcgtgggcgcgcccctgcggctcccgagggtccaggccccgcccccaaaggaccaggactcgccccaaagatcccgagggcataggccacccccctcgaagttcaggttcagctcctggatgaccaggcaccgctgttgagcagcctggtggtactggccacgcccctcaaggcaaggctccgccccttagggggcctgatcccgccccttgaggcttaggtcccgccccctgacttctcgcacctgtcctgtttgagggaacagggtcgaccctgcccccttgggctcaggccccgcccccaggatcctacggattgaggtcctcaggccacgcccctgcagatccaggtctccaggccttgcccactgagccttcagaggacctaagacccacctatgactcagggcccaccacaccccacccccccccaactggctgaacccctggaaggcttccaaactgaggaaagctggagcctgacgtcagagcttttaactcggacatcaccctcctgaggccctcagctcatacgggcagactgctcaggcgtgaggctggatcgtagggttcgaggctgcttgcttttgttgttgttttgtaaactcagacccttgtaagccccttccttcctcccttgcccaaagatcctttgctgagtgttctgtttttgcagaataaaagcaaaggatgcagacttaccccaccctccacccctagctcagccagatccttacacgtggagcccccagcatgggaatgaggggctctgcaactgagcgaagctgcgggctaggaggctgaaaagccatttatcctaggacataaactcagattttgggggtc

SEQ ID NO: 1515 - DNA, 2337 bp, Homo sapiens
caagtgaggcagggagatgttttaaagatgaatccgaatttggaagacttccattatgattacattgacttgctaaaggaaccagcaaaaaataagcagacaatattcaatgaagaaaggaataaggggcaggtgcaggtggcagatcttttgggcatcaatggaacaggggaagagcgactaccacaagacctgaaggtgtccactgacaaggagggtggcgtccaggacctgctcctgcctgaagacatgctctcaggggaagaatatgagtgtgtctcacctgatgacatctccttgcctcctctcccaggaagccctgagtccccccttgcaccatctgacatggaggtggaagagcctgtcagctcctccctcagccttcacataagcagctatggggtgcaggctgggaccagcagcccaggggatgcccaggaatctgttcttccaccacctgttgcctttgcggatgcatgcaatgataagagagaaacattttcaagtcattttgagaggccttacctccagttcaaagctgagcccccactaacctccagaggattcgtggaaaagagtactgccttacacagaatcagtgctgaacatccagagagcatgatgagtgaagtgcatgagagagctttacagcagcaccctcaggctcagggtggtttgctagaaacacgggagaaaatgcatgctgataataacttcactaaaacccaagataggctgcatgcttcctctgatgcattctcgggcctcaggtttcaatcaggcaccagcaggggctatcagaggcaaatggttcctcgagaagagattaaaagcacatcagcaaagagcagcgtggtcagcctagctgaccaggcacctaatttctccaggctcctgtctaatgtaactgtcatggaaggttctccagtgactttggaagttgaagtaacaggatttccagagcctacactgacatggtacaagaagggccagaaattgtctgcagatgggcacttacaggttttacacaaggagacaaggcattcggtgttcattccaaaggtatgcaaggcagacgcaggcctctatgtggctcgggcccaaaactctagcggcgctctctcttccaatgtcatcctccacgtgacaggtaactgcaggctgccaatcacaagagtaaactggataaccctgtgtgtcgtctatgttagtgtgtccctaatgtactggctcctcacacaataactgtggtgttggcaccaatggacatcattctcatgtgcctaaagaaaagtgccgccgtttatcttcctgcacctcctgcaaagcatctcccaccaagtgtatctccagtctgatcaccatacttgtttggctaataccactgctaggtgaaataatcaaattttctggagcgtttaatatatttgagaagcttggtaaattatctgtagtggataagaacagatttttgtactctagaaacagatgttttcaacataatatgcagcaaaattattctatgcctattccctcctaatttaagggcgtgcagatgaaggctgacatcggcatagaaatgtgctaaatttcaaatatggttgttcaataatatatttttaattgtattttaaaacatccctttgtagggaatatcagtagaactattgaattgatgttgtatttttgcattagctgtcctttaattttgctttccatgtcttgatcttgttaccgaaatgcgttctgtgtaatttcaacgtagactacgttcctgagtctgatgatgtcattgtaaataatcattcctcatgttgctctcacgggtttgacattggaggatagatgtgccatcaactttaaatagagtttccatcttttgtcagctctgcatgtcatacagcaagatggaacacaggttgcaagaaagaaccaacgttattcctgacattctattgatgtgttttgagcagcaatgtgtaaccaggtgtttctgcttctaatcttgattctgctgatgaccatttttatactttatggcaaagcctcattgcctcagtttcctgtctggaaaatgagttcatcatctacctcttgggcaattgagagttttcattttgtgtcttttaaacatctggaaaatggaaaacactgagggctaaggataatgatattgtttaatgtaatttgtcatcagaccggcctcctgctcactatttctttttttttagatgctgtttttttagaatattaaattaaaggagtgctgttaatatgtaatcttcaactagttccatggaggaaagtgatgttttatgaattagagcttaaattcct

SEQ ID NO: 1516 - DNA, 2749 bp, Homo sapiens
agtgcttctggtttcagcacacatggagatatagaattgaaattgctctgctttctttacaaatgactcagagtgtgcttgtccttccctaaaatgttgccagcatgtaaaggattttcaatgagcagtgcaataagccagcaactgggaaggcttggagcggcactgatataacgtggtgctgtcacacagataatcagggctggagccaagtctcggtagcgctgtgcattatcctggtcacatactggaagttttgtttatccaacttggttgctcttgaagctggtgagagccctgccaggatgtggagtggacttcctagcagaggcagtacatgccacactactacccttcctgctcttgtgcgcacacctaccctgatgatgcagccttcactggatatcaaaccatttatgtcttttccagtggacagtagttctgctgttgggctctttccaaattttaacacaatggatcctgtgcaaaaagcggttattaaccatacatttggagtatccattcccccaaagaagaaacaagttatttcttgtaatgtctgtcagcttcgctttaactcagatagccaggccgaggcccactacaaaggaagtaaacatgccaagaaggtcaaagcactagacgcaacgaaaaataaacccaaaatggttccttccaaggacagcgcaaaggctaatcccagctgctccatcactccaatcacaggcaacaactctgacaaatcagaagataaagggaagttaaaagccagcagttccagtcagccatcaagctctgaaagtggctcatttctcctcaaatctggcacaacacccctgccacctggagcagccacttctccctccaagagcacaaatggagctcccggtactgttgttgaatcagaagaagaaaaagccaaaaaattactttattgttcactatgcaaagtggctgtgaactccctgtcacagctagaggcacacaacacaggatctaaacacaagaccatggttgaagctcgtaatggggctggtccaattaaatcctatcctagacctggatcaagattaaagatgcagaatggcagtaaggggtcaggactacagaacaagacatttcattgtgaaatctgtgatgttcatgttaattcagaaattcaactcaaacagcacatttctagccgaaggcataaagatcgagttgcagggaaaccactgaagccaaaatacagcccttacaacaaactccagcggagcccgagtattctagcagcaaaacttgcattccagaaagatatgatgaagcctttggccccatccttcctgtcctcacctctcgcagcggcggcagccgtgtcctcagcgctgtcactcccaccccggccctctgcctcgctcttccaggctccagccattcctccagctcttctgaggcctgggcatgggcccatccgcgccactcctgcctccatcctctttgctccgtactaacgtctgcaaaccccaagacgtttgaggccagtaggaagttgagaaagaaagccacaaggattcagcaatttaagcagtttgtgttgcagtacccccattcacccacaaaatgcagcccaccacccagtcccccaattccagagagaaacacatcactagattgacgagggcttttagagactgctcctataattgaggaatcagcagcataggctttatctccctacttcctcccccaccctaccgcgttcaatttgtgtatctcagatatttgatttcttgagcatgtattggtcagaaagaaaaagaaagaaaaccattctctatttttccatgggtatgatctggcttaaaacaatatggaatattttcctgacagacttgaaaactaggatcttcctcagatgtctgtaaataactctggtatccaactgggtgtattctagtgtggaacaaaaaacagtgaacacaagtgcttacttgtggatactatcttaccaacggatcacaaagttctctttttggcgtactgttgttgacagggattgtgtactgtttcgacccaagtactgctgtatcctgtgtagtactagatctgtatctcttgtctgaattaaacatttttagttgctgtgtaaatgttaggaagcaaagtagctttgaattttctctgtaagagaataaaagataaaataatgtattttctttatttcacattttatttggagatatttaaatgaaatagaaagccatataacatagctataattactacctgtttgctatttttgtttaacttattttgtagcttcctcactggtttgtgttgctaagcaaacgtatacaaacagaaaaagagcttcctaaattgcacatttttgcacctcttgtgcattctgcaagaagacaatgaatccatgtatttctatataagtatcttcttcatttttaacctgttttcatttgtaatgatgctacataattttgtggctccctaatgcaataatgtacagaagataaaaaaatttataattgaacaatttgtctttctgttcgctgaatatattgcaggtcatgctcccatgcccccctttctaagccgatatcaacaagactggaatgtttgtgatatcaggggcaagagttatcatagagcaacaaaatagagtggactcttttagagcatctatatctgcaacctgtaaatggtaaaacgtctgtgtatttttttaaatgtaccttttcaataaaagtac

SEQ ID NO: 1517 - DNA, 2350 bp, Homo sapiens
actccgtgctggaagtaggaggagagtcaggactcccaggacagagagtgcacaaactacccagcacagccccctccgccccctctggaggctgaagagggattccagcccctgccacccacagacacgggctgactggggtgtctgccccccttggggggggggcagcacagggcctcaggcctgggtgccacctggcacctagaagatgcctgtgccctggttcttgctgtccttggcactgggccgaagcccagtggtcctttctctggagaggcttgtggggcctcaggacgctacccactgctctccgggcctctcctgccgcctctggggtgccaccaaattctgggcttggaacagcttcagctcccacccgctcctccacacacagacagtgacatactctgcctgcctggggacatcgtgcctgctccgggccccgtgctggcgcctacgcacctgcagacagagctggtgctgaggtgccagaaggagactgactgtgacctctgtctgcgtgtggctgtccacttggccgtgcatgggcactgggaagagcctgaagatgaggaaaagtttggaggagcagctgacttaggggtggaggagcctaggaatgcctctctccaggcccaagtcgtgctctccttccaggcctaccctactgcccgctgcgtcctgctggaggtgcaagtgcctgctgcccttgtgcagtttggtcagtctgtgggctctgtggtatatgactgcttcgaggctgccctagggagtgaggtacgaatctggtcctatactcagcccaggtacgagaaggaactcaaccacacacagcagctgcctgccctgccctggctcaacgtgtcagcagatggtgacaacgtgcatctggttctgaatgtctctgaggagcagcacttcggcctctccctgtactggaatcaggtccagggccccccaaaaccccggtggcacaaaaacctggtgaggcctcccccttcccaagtccattcccactgtaggccgatgcctgtgcaaaggacgcagtgccatatcagagaggatccttgaagaggactcaccccaagcaagggaaaattgactggaccgcagatcattaccttgaaccacacagacctggttccctgcctctgtattcaggtgtggcctctggaacctgactccgttaggacgaacatctgccccttcagggaggacccccgcgcacaccagaacctctggcaagccgcccgactgcgactgctgaccctgcagagctggctgctggacgcaccgtgctcgctgcccgcagaagcggcactgtgctggcgggctccgggtggggacccctgccagccactggtcccaccgctttcctgggagaacgtcactgtggacaaggttctcgagttcccattgctgaaaggccaccctaacctctgtgttcagcaggtgaacagctcggagaagctgcagctgcaggagtgcttgtgggctgctatgggacgatgacttgggagcgctatgggcctgccccatggacaaatacatccacaagcgctgggccctcgtgtggctggcctgcctactctttgccgctgcgctttccctcatcctccttctcaaaaaggatcacgcgaaagggtggctgaggctcttgaaacaggacgtccgctcgggggcggccgccaggggccgcgcggctctgctcctctactcagccgatgactcgggtttcgagcgcctggtgggcgccctggcgtcggccctgtgccagctgccgctgcgcgtggccgtagacctgtggagccgtcgtgaactgagcgcgcaggggcccgtggcttggtttcacgcgcagcggcgccagaccctgcaggagggcggcgtggtggtcttgctcttctctcccggtgcggtggcgctgtgcagcgagtggctacaggatggggtgtccgggcccggggcgcacggcccgcacgacgccttccgcgcctcgctcagctgcgtgctgcccgacttcttgcagggccgggcgcccggcagctacgtgggggcctgcttcgacaggctgctccacccggacgccgtacccgcccttttccgcaccgtgcccgtcttcacactgccctcccaactgccagacttcctgggggccctgcagcagcctcgcgccccgcgttccgggcggctccaagagagagcggagcaagtgtcccgggcccttcagccagccctggatagctacttccatcccccggggactcccgcgccgggacgcggggtgggaccaggcgcgggacctggggcgggggacgggacttaaataaaggcagacgctgtttttctaccc

SEQ ID NO: 1518 - DNA, 2300 bp, Homo sapiens
agaacactggcggccgatcccaacgaggctccctggagcccgacgcagagcagcgccctggccgggccaagcaggagccggcatcatggattccttcaaagtagtgctggaggggccagcaccttggggcttccggctgcaagggggcaaggacttcaatgtgcccctctccatttcccggctgtgtctctgcccaggcctccgcccccgccgcggaccctccgcggtacacctttgcacccagcgtctccctcaacaagacggcccggccctttggggcgcccccgcccgctgacagcgccccgcagcagaatggacagccgctccgaccgctggtcccagatgccagcaagcagcggctgatggagaacacagaggactggcggccgcggccggggacaggccagtcgcgttccttccgcatccttgcccacctcacaggcaccgagttcatgcaagacccggatgaggagcacctgaagaaatcaagggaaaagtatgtcctggagctgcagagcccacgctacacccgcctccgggactggcaccaccagcgctctgcccacgtgctcaacgtgcagtcgtagcccggccctctccagccggctgccctctctgcctccctctttctgttcctcctgcccagggcacccccttagtgcctccagcttctgcctacctcaccccccctttcgtgcccctggcctgagcctcctgctggcctggccctggccgcccacctgggttcatctgacactgccttccctctttgccctgtggtactgctgtctgccaggtctgtgctgccttgggcatggaataaacattctcagccctgcttgctctgcctgtcttctatctttgtggacctggtttgcatttggggtgtgggggtgtttcgtggttcggactgtttgggccctgccgtcctcgttttcagtgggagggggtacctggcaaaggggccctgccctgccatcacagatggcttcctggcatgaggggagccccaggagctgcctcagaagcgggagccctgcctcgtctcccagctagagaccgcacaccagctaactggacattgctaggagaagctgcccttcccatccctaccccagtgggacctggaatccaactcggcagtttccacgcccccagtcatctcccgtggggccagcaggacccaggttggggggtggggccatgtcaggaagctcagccatgcagggccttgaatggcagatcttgcagccaggtgcccaggacagaagccccagccccagcctcatctacaccccaggagccctggcctggccctaccgcccccagccctaccagccgcccgccctgggctgtggaccctgcgtttgccgagcgctatgccccggacaaaacgagcacagtgctgacccggcacagccagccagccacgcccacgccgctgcagagccgcacctccattgtgcaggcagctgccggaggggtgccaggagggggcagcaacaacggcaagactcccgtgtgtcaccagtgccacaaggtcatccggggccgctacctggtggcgctgggccacgcgtaccacccggaggagtttgtgtgtagccagtgtgggaaggtcctggaagagggtggcttctttgaggagaagggcgccatcttctgcccaccatgctatgacgtgcgctatgcacccagctgtgccaagtgcaagaagaagattacaggcgagatcatgcacgccctgaagatgacctggcacgtgcactgctttacctgtgctgcctgcaagacgcccatccggaacagggccttctacatggaggagggcgtgccctattgcgagcgagactatgagaagatgtttggcacgaaatgccatggctgtgacttcaagatcgacgctggggaccgcttcctggaggccctgggcttcagctggcatgacacctgcttcgtctgtgcgatatgtcagatcaacctggaaggaaagaccttctactccaagaaggacaggcctctctgcaagagccatgccttctctcatgtgtgagccccttctgcccacagctgccgcggtggcccctagcctgaggggcctggagtcgtggccctgcatttctgggtagggctggcaatggttgccttaaccctggctcctggcccgagcctggggctccctgggccctgccccacccaccttatcctcccaccccactccctccaccaccacagcacaccggtgctggccacaccagccccctttcacctccagtgccacaataaacctgtacccagct

SEQ ID NO: 1519 - DNA, 2333 bp, Homo sapiens
agattcgcacaaacccggaagcgggtcgcgtggagtgacggtcccaccgcggggatatctcttccaaatgcatgatgaaggagttctcatccacagcgcaaggcaatacagaagtgatccacacagggacattgcaaagacatgaaagtcatcacattagagatttttgcttccaggaaattgagaaagatattcataactttgagtttcagtggcaagaagaggaaaggaatggtcacgaagcacccatgacagaaatcaaagagttgactggtagtacagaccgacatgatcaaaggcatgctggaaacaagcctattaaagatcagcttggatccagctttcattcgcatctgcctgaactccacatatttcagcctgaatggaaaattggtaatcaagttgagaagtctatcatcaatgcctccttaattttgacatcccaaagaatttcttgtagtcccaaaacccgtatttctaataactatgggaataattccctccattcttcattacccatacaaaaattgggaagtacacatgagagaaaaatctttccaatgtaatgagagtggcaaatcctttaattatagctaactcttaaggaaatatcagataatccatttaggatagaaacaatataaatgtgaggtatgtgacaaggtctttaatcagaattgattccttgtatgccataatagatgtcacactggtaagaaaccttacaattgttatgagtgtggtgagaccttcagtcagacgtcatcctttacatgctatcgtagacttcatactggagggaaaccttacaagtgtagtgagcataacaagacctttggttgaaattcagcccttgtaattcataaggcaattcatactggagagaatccttgcaagtgtaatgaatgtggcaaggtttttaatcagaaagcacaccttgcacgtcatcatagacttcatactagagagaagccttacaaatgtgaagaatgtgaaaaagttttcagtcgcaaatcacatcttgaaagacaaaacttaaaagaggtggcgttgcccttgtttttgagaatgccctactgtgtaagtggtagtgttctttctttttttttttttttaagacggagtctcacctgagcgagcctctgcactggccttatttattattgttattaattttttgtttttgagacggagtttcactcttgttgcccaggctggagtgcaatggtgcaatcttggctcactgcaacctctgtctgttgagctcaagcgtttctcttgcctcagcctcccaagtagctgggactacaggtgcatgccaccacgcctggttaatttttgtatttatagtggagatggggtttctccatattggtcaggctggtcttgaacccttgacctcaggtcatccacccgcctcggccttccaaaacgctggatttacaggcttgagccacacgtccggcctgaagtggtattttttagaaagtaactaaaccttttttcagtttaatgacccagggatgtatttctgaaggacttgggagcgatccttttaaggcaaacaagggagatagtacctgtatcttagtaggaaattaaataattcaaacatcaaatgtttcaaattaaaagctaccgacctttaaataattctgagccttgagaggaatgtggtcatgcaacaagagtccagtggcatgcaggcacaaggttttttcttttttgttttttgtttttttttgagacagtctcgctctgtcgcccaagctgaggtgcagtggtgcgatctcagctcactgcaagctccgcctcctgggttcacgtcattttcctgtctcagcctccccagtagctgggactccaggcacccaccaccactcccggctaattttttgtatttttagtacagacagggtttcactgtgttggccaggatggtcttgatctcctgaccttgtgatccacccacctcggcctcccaaagtgctgggattgcaggcatgaatgaccgcgcccagccgcaggcgcaacttttttgagttttcctggccaggcgcggtggctcaggcctgtagtcccagcattttgggaggccgaggtgggcggatcacttgaggtcaggagttagaaaccagcctggccaacgtggtgaaaccccgtctccagtaaacatacaaagccattacagggcatggtggggcacgcctgtattcccagctacttgggaggctggggcaggagaactgcttgatccggggaggtggaagttgcagtgggccaagatcatgccactgcaccccagcctgggcaacagagcaagactccgtacc

SEQ ID NO: 1520 - DNA, 2302 bp, Homo sapiens
aaacaaaaacaaaccacacctgcatctgctgtgctgggcccccggttctcttttccctctgggatctaagatgccgctggggatccaaggcagaggcctgggagcccccatttccgagggggagggctagcgtggaaggccccgccccggcagctgcggagggatttggtggggtccaggccgcccttgccacgcaggggtgcgcggatgacctgaaaaaagccagaaagaggaaaggtgccgccgaggctggtcgctctcagctggggctcatcgcatcctctaccaagagcgctcccaccacacaggtcccgcccctcccaggtgggtttcatcgggtgggcccagcgggacagggccgggtgaaattagggagggggctgggctggggcgcaatggaggccgagccaatcccggactcctcaatgccagcaaagcttctggcgccgccctgtctgaacctggagcggctgggaggatccccctcccaggagaagccgaggaccccaggatgctgcagaatcagtgagaggtgcgtaaggccaaaccccattccccggaccccgctagcacttcaccacctggctcagtgatcaaggggtcatgacctctctttgctggggttatcgagaagtggcaattttataatagttactgaaacttacaaagaggttctggtgcccagagacacttggggtcatctagggatcagaggccatgcaattccatgtctctggggctgatgtaggcactccccagggatcatccaggggttatggagggcaactcaataataatgaaaatgataaaaatcgtaatcatattatggcaagccagcggcgtggtggcgcgtgcctgtaagtcccagctactcgggaggctgaggcggaaggatcggtcgagcccaggagttctaggctgcactgagtcctgatcacgcccctgcactccaggcgggggtacagagtgaggctcggtctctaaaagaaacacaaagaaaaaaagtaacctttttctcgatcctgcagccagaggcttgatatcctgcctcggtcacctagggcggtccctgcctgggtgatctacgggtgccgtaaggggttgattgatgtggagggctgggcgtgcctgggaggcccacagtgggcgaggtgagttgcaattactgcaactcttaaaccttccacccagagttagaaatgactgaacctcaggtggggtgtgtagcctgtccaagggtacacaaagagccggcccaagttggaaccccctggccggctaaacccaggagtcacccaagaaaacgtgaccccactgcccttctccccaggtccctctggcctgcatgccaggagtcggtcaccgccctgtgcttcctccaagagacagtggagaggctgggtcagtcccccgcccaggacaccccggtcctggggccttgctgggacccgatggctctggggactcagggccgcctgctgctggacagggattccaaggacacacagaccaggatcagccaaaagggccgccgtctgcagcccccggggactccctcggccccaccccagagaaggccccggaaacagctgaacccctgccggggcaccgagagagtggaccctgggttcgagggggtgactctgaagtttcagataaagccggactccagcctgcagatcatccccacgtacagcctgccctgcagtagccgttctcaggaatcccctgcagatgctgttgggggccctgcagcccacccaggaggcaccgaggcccactcagcaggcagcgaggccctggagccccggcgctgtgcttcctgtcggacccagaggaccccgctctggagagacgctgaagatgggacccctctctgcaacgcctgtgggatcaggtacaagaaatacggcactcgctgctccagctgctggctggtgcccaggaaaaatgtccagcccaagaggctatgtggcagatgtggagtgtccctggaccccattcaggaaggttaaacccagcttcaccctgctgagctgctgcttctgcctccgtttcaccagtgggagaatgggcagaagcagctctcctaggaggattggggaaagagccggcctgcctcctctctgccatctccagattcaaggatcccgggggaagacccaggcctcaggtggcagagcctgctaggggtcaccagccccttctccagtcagccttggccgaggccccctcaggagacgctctcaggaaggatgagcattgttacagcagggacaataaagtacagagatatgccgag

SEQ ID NO: 1521 - DNA, 2961 bp, Homo sapiens
aacttccggcgtcctccctgtggcgggcactttggcttgtgtcagtcccatccgcgggtgccggatctggacctaggtgctgacagcgagaaggcgcgaggagagtcgttttctcagctgcacagccggggcctgacggtcgccggcggtggtgacagctttgctcttgtctccgcccggatcgtccaccgctcccggcccgctccgcccagagtccgatggcggcggcactgagggccccgacccagcaggtttttgtagcctttgaggatgtggccatttacttctcccaggaggagtgggagctccttgatgagatgcagaggctcctgtaccgcgatgtgatgctggagaactttgcagttatggcatccctaggttgctggtgtggagcagtagatgaggggacgccttctgcagagagcgtttctgtggaagaactgtcacagggcaggactccaaaggcagatacatccactgataagagtcacccctgtgagatttgtaccccagtcctgagagacattttacaaatgattgagctccaagcctcaccctgtggacagaaattgtacttgggtggagcatcaagagatttctggatgagttcaaaccttcaccagctccagaagcttgataatggagagaagctctttaaagtggatggggaccaggcctcatttatgatgaactgcaggttccatgtgtcaggaaaacccttcacgtttggggaagtcgggagggacttttcagccacctcaggacttctccagcatcaggtgactcccaccattgagagaccacacagcaggattagacacttgagagctcccactggacgaaagcctctcaaatacactgaatccaggaaatcttttagagagaaatctgtattcattcaacaccaaagagctgactctggagaaaggccttacaagtgcagtgaatgtgggaaatcctttagtcaaagttctggctttcttcgacacaggaaagcacacggtagaacaaggactcatgaatgtagtgaatgtgggaaatcatttagtcgcaaaactcacctaactcaacaccaaagagttcacactggagaaaggccttatgaccgcagtgaatgtggcaaatcctttcgccaggtatctgtcctcattcaacatcaacgagttcacactggagaaaggccttatgagtgcagtgaatgtgggaaatcttttagccacagcactaacctctatcgtcacaggagtgcccacactagcacaaggccttatgagtgcagtgaatgtggaaaatcctttagccatagcactaacctctttcgacactggagagttcacactggagtaaggccttatgagtgtagtgaatgtgggaaagcatttagttgcaatatctaccttattcaccaccaaagatttcacactggagaaagaccttatgtgtgcagtgaatgtgggaaatcatttggccagaaatctgtcctcattcaacaccaaagagttcacactggagaaaggccttatgagtgcagtgaatgtgggaaagtttttagccaaagctctggcctctttcgacacagaagagctcacactaaaacaaagccttatgagtgcagtgaatgtgaaaaatcatttagttgcaaaactgacctcattcgacaccagacagttcacactggagaaaggccttatgagtgcagtgtatgtgggaaatcttttatccgaaaaacccacctcattcgacaccagactgttcacactaatgaaaggccttatgagtgcgatgaatgtgggaaatcctatagccaaagctctgccctccttcagcataggagagttcacactggagaaaggccttatgagtgcagagaatgtgggaaatcttttacccgcaaaaatcacctcattcaacacaagacagttcacactggggaaaggccttatgaatgcagtgaatgtggaaaatcctttagccaaagctctggcctcttaagacacagaagagttcatgtgcagtgaatgtgggaaattattttgtcactttttttttttttttgagatggaattttgctcgtcacccaggctggagtgcaattgtgcaatctcagctcactgcaacctccgcctcctgggatcaagtgattctcctgccacagcctcctgagtacctgagattacaggcacccaccaccatgcccagctaatttttgtatttttaatagaaacaaggtttcaccatgttggtcaggctggtgttgaactcctgacctcaggtaatccacctgcttcagcctaccaaagtgctgggattacaggcgtgagccaccatgtccggcttgtgttgtgacatttaacacaagatttcccaaagaagaaaggccttatatatgctgtgaatgtgtttttgcttgttagtttgttttaacttggtatgacggcactggaggctagcctttgagaagagccttctctgatgtgactcatgtatccaaacatccatggatttcccataaatttgaggtatgtgggaagcatgtgtagctatgttgtactctctaaacctgcccagggaccttaccagattcgtgtcactgccagtttctgcggctgaagccttttcatcactacccgctgggagacccacagagtgtgcatcagccaccaccccaacatgctcagggaggcagagttcttccattagttggaggaaagcacgagtagtctaagctcttaggggggtttctcatttcctcctgtggctacatagtgcatataactaccccagtgttggccccaggacctgatctgagttctgctggcagcttccagaggattgccttttttgaggacattgttgatctcaggcgatgcttgtgatgaagcattttttagcttccaccacttaccaggaactgcctgttaactggcttgtgcaatgataaaggccttttgtttaagtacc

SEQ ID NO: 1522 - DNA, 2279 bp, Homo sapiens
gagctgtgccccacgctcccgctgcaacagtcccgggcatcgcagctgccagtcaaggctaggaggcggtcggggactccgcctcctcccgacccgtaggtctgggagcgcgagtcctgttgcagtcttgcaaagtgtaaagctgtcagccgcagagcacggaggaaagacggagagaatggaagagctcctgtccggtgtgccagcagcccggactggcggtgagcgcgagggaggctactgagaagcccggcgacggaggaacgcaggtctgctgccagggattgaggagactgaagaacgctgaagacaggctgatgggctcagctggtaggctccactatctcgccatgactgctgaaaatcccactcctggagacctggctccggcccccctcatcacttgcaaactctgcctgtgtgagcagtctctggacaagatgaccacactccaggaatgccagtgcatcttttgcacagcttgcctgaaacagtacatgcagctggcaatccgagaaggatgtgggtctcccatcacttgccctgacatggtgtgcctaaaccacgggaccctgcaggaagctgagattgcctgtttggtacctgtggaccagtttcaactttatcagaggttaaaatttgaaagagaagttcatctggacccctaccgaacatggtgtcctgttgcagactgtcagacagtgtgccctgttgcctcgagtgacccaggacagcctgtgctggtggaatgcccttcttgccacctgaaattctgctcgtgttgcaaggatgcttggcatgcagaggtctcctgtagagacagtcagcctattgtcctgccaacagagcaccgagccctctttgggacagatgcagaagcccccattaagcagtgcccagtttgccgggtttatatcgaacgcaatgaaggctgcgctcagatgatgtgcaaaaactgcaagcatacattttgctggtactgcctccagaacttggataatgacattttcctcagacattatgacaaagggccatgcaggaataaacttggccactcaagagcatcagtgatgtggaaccgaacacaggtggtggggattctcgtaggcttgggcatcattgccttggttacttcacccttgttactcctggcctccccatgtataatctgttgtgtctgcaagtcctgtcggggcaagaagaaaaagcacgacccatccacaacctaaagatctctgtgttcatacgccccagatatgtgagttacatgagatggcacagtgataaagccccatttagtgaccttgcctccttctccttgccaactttgaaagtgcctccgtgtccagactttgaacttgcctgccagccttcagcatcaggaaaggccaagtcctgggtgtgagtgttcctgtgtaacaagaactgggctcaacggtccagctgtttctatggagctttggggttccttgagatgaatgaacatatcattttatcatccaaaggatctcactggactgttcaacttccagccaaattcaaggagcttgcgggaacatttgatataacaaatgtgttgtcattgttggcaacatacaagataaccaagaagctggagtctgttctgtgttgatttgactgccatgagaaacacaggggaaacctgatgaggagaaggataagactgcgtaaggagaaatcctcataggagctataaagcaggctactgatctcagcagttgatatggtggttgtgcctctgctggctactgggtgtgctgtccccatgttcccgctgtgatttggcagaaacacaataggcttctccttgtgtgatctcagcttcaagcaggtgaaactgctgtgcagagggagttgccccttcccagtaaaagagttgcagcctgttaaacaatgtggtctaatttagtgtctctcccttggcaaatgtaagttttctaagttggccaacttgtctcttacagccagtggctgtggtctacagaattgtttcatataaaatacgggtagagtggtagagtttcaaaactttcgtcatagatatctgggacctttctcaggatctgtgttcacacagccaatagatttggaatcaggcctaagagtacacatggagggtaaatattaaagtgcgtattatgtacatctagaatccatgtgacttgcagcctacctgtaatttctatccattgagcatgcatggatatacccaatagtacacacaaaataaatgtttacttaagagccaaaaaaaaaag

SEQ ID NO: 1523 - DNA, 2221 bp, Homo sapiens
agaggccgaccacgtgtactgtggagactgtcaaagtctcccggagcccaatttccggaagcggtgagttctgaaagaagttcctgcaccgtagtttcccaagtctgcgaatccccaaccatgagcgcctcgggcgtactgtcctttacccagcaaggatgggagcaggtgctggccaaagtgaaacgggctgtggtttacctggacgccgcctgcgccgagagcctgcactggggctgcggatccacccgtctcctggaggcggtggggggtcctgactgtcacctgcgagagttcgagcccgacgcaattggtggtggagccaagcagcccaaggcagtgtttgtgctgagctgcctgctgaaaggccggaccgtggagatcctacgggacatcatctgccgcagtcacttccagtattgtgtggtggtcacaaccgtgagccacgctgtccacctcacagctaatcatgtcccagcggcggcagcggccgagatggaggggcagcagccggtgttcgagcagctggaggagaagctgtgtgaatggatgggcaacatgaactacacggccgaggtgttccatgtcccgttattgcttgcccctgttgctccccactttgccttgactccagcttttgcatcccttttcccactgctaccccaggatgtgcacctccttaatagcgcccgaccggacaagaggaagctgggaagcctgggtgatgtggactccactacgctaaccccagagctgctgctgcagatcagatgcctagtgtcaggcctcagttctctgtgtgaacatttaggagtacgggaggagtgttttgctgtaggttccttaagtcaggtcatcgctgcggatctggccaattatgcccctgcaaagaacaggaagaagactgctgcaggcagggcatcagtggtttttgtggacagaaccctggatctcacaggagcagttggacatcatggagacaacttagtagagaagatcatttcagcacttccccagctcccaggccacacaaatgatgtgatggttaacatgatagcgctcactgcactccatactgaggaggaaaattataatgtggttgcaccaggctgtctttcacaatccagtgacaccacagccaaagccctatgggaagctttactgaacactaagcacaaagaggcagtgatggaagttcggagacatctagtggaagcggcaagcagagaaaacctgccaatcaagatgagtatggggagagtcacaccgggacagctcatgtcctatattcagctcttcaagaacaacctcaaagctctaatgaatcattgtggcctcctccagcttggactggccacagctcaaacgttgaaacacccacagactgccaagtgggacaactttctggcttttgaaaggctccttcttcagagcattggggagtcagcaatgtccgttgtgttaaatcagctgctgcccatgattaagcctgtaacccagagaaccaacgaggactacagccctgaggaactgctgatccttctcatatatatttattctgtcactggagagctcacggtagacaaagacctgtgtgaagcagaagaaaaagtcaagaaagcattggctcaggtcttctgtgaggaatctggattgtcacctttgctgcaaaaaattacggactgggactcttcaattaatctgacatttcacaaatccaaaattgccgtggatgaactctttacttcacttcgggatattgctggagctcggagtctcctgaaacagtttaagtctgtatatgttcctggaaatcatacccaccaggtgagccggcctcatcctagtgactaccccctcctgatcctctttgtggtaggtggggtcacagtctctgaagtgaaaatggtcaaagatcttgtggcatcgttgaagccaggaacccaggtaatcgtgctgtccacacgactcctgaagccacttaacattcctgagctgttatttgcaactgaccgactgcatccagaccttggcttctgagcatccgctaagaagataagacctactcaagctggaaatgccgatgcaattttctgccaccactccaaatactcctccacaaccagcgtccctgtcactaattgcgagaatgatggaattctgcctgaagggtcttgatacctactcagtgaggtactttgcttggattgctgtgattctt

SEQ ID NO: 1524 - DNA, 2787 bp, Homo sapiens
acttccggtgcgaaccgcctcggccgttccctcgcggagcttactgagcgcggccgccgagcccagctccgccgccgagcgcctgtgccggcacggctacaccatggagcgcccggataaggcggcgctgaacgcactgcagcctcctgagttcagaaatgaaagctcattagcatctacactgaagacgctcctgttcttcacagctttaatgatcactgttcctattgggttatatttcacaactaaatcttacatatttgaaggcgcccttgggatgtccaatagggacagctatttttacgctgctattgttgcagtggtcgccgtccatgtggtgctggccctctttgtgtatgtggcctggaatgaaggctcacgacagtggcgtgaaggcaaacaggattaaagtgaacatcacctttttatagcattaaattcattttttaaaatgataaatgctggagggggccatctgatttgaataaagttgaaagaacatgttaaagtcagtcttaaggagtcacgtttgagtatgtaaattttgatctttctaatatgttggtttgtatattcagttttaactgtatgaatctgatttgcaaatgagaatttggaaaagttaaattagttacaaagaaatatgttaatttaattagacaatactctggaaggaattttatcttctttcaacaaaacatgttttatagtattctgacttacggttgcttttgagttttactcatttggatatattaagatgcacacagtgaagcaaattaaactccactttacgctggaatgctttctttagcatgaaaataccaggtccttggatttgggattttaatttcctatggaaagttgcttaaattgtggacactggaattaatctgaatgtcactgaggaatttcacatgaagtgtaatccctagtcaataagaattatccattacattattttatgggaaaactaggctaaattacatccattcaggtaaaaggaccttagcttactgaaggatctaaagagcaaagcaaagatctcactactcaaacactcagcctgcttccttcaagtccccttgcaggccagctttgtgctttgcagaccaactttttaatgagatactttgcttcctcattcaacattgaagctaggcttcaattaaaaggttcgaggaagctccatttaaaattgttttttttactattttttaaaattgtagtgtatatgataggaatttgcatttaaatatgttcatttttgcatatgttaggaatggaaacaatctggaaaacatttttttttcatccaaaaagtattctccttgggcatatctgatggaaaaaaaccttgattttattttcgtatctttagtctgtgttctttctagttatttggtactaattatgtgcaatctaaaaacactcccacaagtatttgttttttaattataaaatcatagtatatgttctttgtagaaaactggaaaaatacatattcaaacaggaaaaaaaatcaaaattccccataatgttgccatctaaaaataacctctattttagttgatatcccgtattcatttttgaaagccattccttaatgctagtttgatacacactaaaagtttagcttacaagttcaaattctgccagcttttcctgacagctatttgcatttttttcagatgagtgattattggccattttctttttctttttctttattttatttatttatttttttgagacagagttttgctctgttgcccaggctggagtgcagtggtgcaatctcggctcactgcaacctctgcctcctgggttcaagtgattctccacctcagcctcccaagtagctgggactacggatgcctgccaccacgcctggctaatttttttttgtatttttttgtagagacggggtttcaccatgttgtccaggctaatcttgaacttgtgacctcaggtgatccacccgcctcggcctccgaaagtgctgggattacaggcgtgagctaccacgcccggccttattgaccattttctaaataagcacattctatctttattctcttaaaattcaaattttctgttactgataatcctaatactaggattcttgcttaagtatgtgaaaccattaccgatttgctgttcacatttattttttatgttgtgaaactggactaaaggaatagagggatgattagtcataaaagtcaaatagcatttgtgtttaactgttgagaaaagtgaaagatcagtatgactattatggaactgtttttaattcttgcttaaagactacaattttagtataatgacatttgagtctagggtagtatgtggtagatttctagatggtccctaattaagaagtattgttgtatttagaattgtccacctaatttctttttatataatgccaaggtatttcttgtgcttttgggatcttatgctgtttgtaaaatgttaatgtccaatgttggattattgttttggtttcaggcatttgctgaataggtgatgatacatgggtatttttctgcaagtatttaaaccaggggcatatgcaaaggcagttgtaatttcctcttggaaaaagcgccaaatgtttgaaggttaaaatcaaatgctagggttgatatttaggcttataacaaaataggcttgttttcaaagcagttttttcctagagttttaactgttaactcactagtttgctgctgtttttaactatgttaaataacatatggtatttggcaaatagatttatttttc

SEQ ID NO: 1525 - DNA, 2456 bp, Homo sapiens
gaaactcaaagaggtgagactataaagatgactatcaccctgaagagggagctgccatcaagttctcccgtgtgcatccaggtcttcaatatcatcttcagaaagatcctcaaaaagttgtccatgtaccaaattggacggaacttctataatccttcagagccaatggaaattccccagcacaaattatccctttggcctgggttcgccatttctgtgtcatattttgaaaggaagctcctgtttagtgctgatgtgagttacaaagtcctccggaatgagacggttctggaattcatgactgctctctgtcaaagaactggcttgtcctgtttcacccagacgtgtgagaagcagctaatagggctcattgtccttacaagatacaataacagaacctactccattgatgacattgactggtcagtgaagcccacacacacctttctaaagcgggatggcaccgagatcacctatgtggattactacaagcagcagtatgatattactgtatcggacctgaatcagcccatgcttgttagtctgttaaagaagaagagaaatgacaacagtgagcctcagctcgcccacctgatacctgagctctgctttctaacagggctgactgaccaggcaacatctgatttccagctgatgaaggctgtggctgaaaagacacgtctcagtccttcaggccggcagcagcgcctggccaggcttgtggacaacatccagaggaataccaatgctcgctttgaactagagacctggggactgcattttggaagccagatatctctgactggccggattgtgccttcagaaaaaatattaatgcaagaccacatatgtcaacctgtgtctgctgctgactggtccaaggatattcgaacttgcaagattttaaatgcacagtctttgaatacctggttgattttatgtagcgacagaactgaatatgttgccgagagctttctgaactgcttgagaagagttacaggttccatgggatttaatgtggactaccccaaaatcataaaagtacaagaaaatccagctgcatttgttagagctatacagcaatatgttgatcctgatgttcagttggtaatgtgcattctgccttctaatcagaagacctattatgattccattaaaaaatatttgagctcagactgcccagtcccaagccaatgtgtgcttgctcggaccttgaataaacagggcatgatgatgagtatcgccaccaagatcgctatgcagatgacttgcaagctcggaggcgagctgtgggctgtggaaatacctttaaagtccctgatggtggtcggtattgatgtctgtaaagatgcactcagcaaggacgtgatggttgttggatgcgtggccagtgttaaccccagaatcaccaggtggttttcccgctgtatccttcagagaacaatgactgatgttgcagattgcttgaaagttttcatgactggagcactcaacaaatggtacaagtacaatcatgatttgccagcacggataattgtgtaccgtgctggtgtaggggatggtcagctgaaaacacttattgaatatgaagtcccacagctgctgagcagtgtggcagaatccagctcaaataccagctcaagactgtcggtgattgtggtcaggaagaagtgcatgccacgattctttaccgaaatgaaccgcactgtacagaaccccccacttggcactgttgtggattcagaagcaacacgtaacgaatggtatgacttttatctgatcagccaggtggcctgccggggaactgttagtcctacctactataatgtcatctatgatgacaacggcttgaagcccgaccatatgcagagacttacattcaaattgtgccacctgtactacaactggccgggcatagtcagtgtcccagcaccatgtcagtatgctcacaagctgacctttctggtggcacaaagcattcataaagaacccagtctggaattagccaaccatctcttctacctgtgatggcatgaactactggcatcactagatggacaatccaagaagaaattggtatactttgtgcaaatctgccataagctcaaggctgtgactggggaaaaagattgagcttagttttcatgtctaggaaaaaaagcaaaacaacttaatctgaaacagttttaaaaaatgtgtgttattttgttttaaagagttgtatgcttggggtaaattttcattgtcatatgtggaatttaaatataccatcatctacaaagaattccacagagttaaatatcttaagttaaacacttaaaataagtgtttgcgtgatattttgatgacagataaacagagtctaattcccaccccaaattttgctgaggttttcttaatgttgtagagcattttgtagagtggtttaaatagttgaaaataaagttcagaacatc

SEQ ID NO: 1526 - DNA, 2876 bp, Homo sapiens
cgatttatacctaaaactggaagatgtgacccataaatttaataagccctgtataatggatgtaaagatagggcaaaaaaagctatgatccttttgcctcatcagagaagattcagcaacaggtcagcaagtacccattaatggaagagattgggttcttggtgcttggcatgagggtttatcatgttcattccgatagctatgagacagaaaaccagcattacggaagaagcttaacaaaagaaactataaaggatggagtctccagattttttcataatgggtactgcttaagaaaagatgctgttgctgccagtattcagaagattgagaaaattctgcagtggtttgaaaaccagaagcagcttaatttttacgcaagttcattactctttgtttatgaaggttcatctcagccaaccactacaaaattgaatgacagaactttggcagaaaagtttttgtccaaaggacaactgtcagacacagaagtactagagtacaataataactttcatgtgttaagttccacagctaatggaaaaatagagtcttcagtgggcaaaggcttgtccaagatgtatgcgcgtcacaggaaaatatatacaaaaaagcatcacagtcagacttcattgaaagttgaaaatctggagcaagacaatgggtggaaaagcatgtcacaggaacatttaaatggaaatgtactttcccaactggaaaaagttttctaccatcttcccactggttgccaagagattgctgaagtagaagtgcgaatgatagattttgctcatgtgttccctagcaacacaatagatgagggatatgtttatgggctaaagcatttaatttctgtacttcgaagtattttagacaattgaatcctctgttgcagtctttttaaggggtgggccaatcataatgaagaggggcagtcaatatctgcacctttaatgctatgtaaaaaatttgtattatgagtcgacattttatttgtctttatacttttggaagaatggttaacttttttataatcttactcaggaaaactaactatttgttcattagaaaactatgaagaataaagaaacttaggaatgttaagcagggaatgtggtggtacatggcttaaacatcttttttggctcaagcaaaatgcaaaccattattcagtcattaagagtttagttagctttctgtagccaattcatgaaatctctgtccacccagccttgacaatgagccatatctaaaatattacattattagaacacctaccaaaatctcgaaagcacaggttgatgtccttagtattgctatgtatgaagttactaaaactggagaaaattctacttcagaaataagtactgtttaggttttatattaaaagttcagaccagcatatcaaagggtgctccttagtgaaatgatttagaattgttgcattccaaaagcaggttttctctttaatttttacatctctctctcaaaatattatacttcatgaaaaagacaattgatgtggatgacaacaacaaagtcttgaaattaagggcacactaattgtccttactggggttaggggaagagagatattattttcaaggaacaaaatattttcctttacaatctttcattcatgagaaaattggaatataaatttattacattgtgaaagtatcataaaccatatacctttgtatctaaatgcagcttcaaaaaagtaaataattgaagttttatttctcctctaaataacttgaatttttttctttaaaaatttatgtatttatatgtccccatttagttaagtggtagtgtaaatgtatgttgttaaaaacagtttctcagaattatagtaagcaatgaaagacaatatctaattaggttgttatcaaaaatactgtgtgtaaattagtccgtaatatagggtttggtgcgtatctatattcatgcttctatttcactcttcctcaaaacagttttatattatgttgaccagtgaaattgtaacttaatttcatggggacaggggcagtgctacagttcctggaaaaattagatttgtattatctttgtttcacacccaccaccttaaaaaaaaatcaactagttatttgtcatttaaaacatttaaaactttgagtcttcaaatacatttgatgttaatgctgccattacttgcacttccattcactaataacatttctaggtagttatcagttttgtcatattcctggaaaatattttggggttgtaaattctttctcctctttttcttctggagttacaaattgaatttttaaatccgagcacctttattgtggtgtggagaaaattatcacaattttatgtttattttaccttctcagccttctctgagggcactttgcaaatacctgagtccaaacagaagtaccaactaatgctctatgaactctatccttagtaaatctattaaacctgaataatttaaaagatcatgttcattttgtaatagcaaaatttgattttaattttttatttagaattggtgtatttatcatagggacttccaatttttcttcactttttgaatggatattggctatagttttatgttttaacgggaatgaatttcaagtcataataatcagaatttttagttttacttttttcttttacaatatggattttgttgttatttggatagtggttcaataaatcttaagctcagataattaaacactattttgaatcttaacaagatactgaggctttttttgtatgggatgatatcaacctatgtacaatgaatttaataaacttaagtattgtcagattttttgcacattttagctcaataaaatcttaatgttcaagatttttttatctgc

SEQ ID NO: 1527 - DNA, 2623 bp, Homo sapiens
agtgcgggctcccgctgctgggggagagctgggttttcatggggcggcagccgaggcaggacccgcagccatgaaccgcttcaatgggctctgcaaggtgtgctcggagcgccgctaccgccagatcaccatcccgaggggaaaggacggctttggcttcaccatctgctgcgactctccagttcgagtccaggccgtggattccgggggtccggcggaacgggcagggctgcagcagctggacacggtgctgcagctgaatgagaggcctgtggagcactggaaatgtgtggagctggcccacgagatccggagctgccccagtgagatcatcctactcgtgtggcgcatggtcccccaggtcaagccaggaccagatggcggggtcctgcggcgggcctcctgcaagtcgacacatgacctccagtcaccccccaacaaacgggagaagaactgcacccatggggtccaggcacggcctgagcagcgccacagctgccacctggtatgtgacagctctgatgggctgctgctcggcggctgggagcgctacaccgaggtggccaagcgcgggggccagcacaccctgcctgcactgtcccgtgccactgcccccaccgaccccaactacatcatcctggccccgctgaatcctgggagccagctgctccggcctgtgtaccaggaggataccatccccgaagaatcagggagtcccagtaaagggaagtcctacacaggcctggggaagaagtcccggctgatgaagacagtgcagaccatgaagggccacgggaactaccaaaactgcccggttgtgaggccgcatgccacgcactcaagctatggcacctacgtcaccctggcccccaaagtcctggtgttccctgtctttgttcagcctctagatctctgtaatcctgcccggaccctcctgctgtcagaggagctgctgctgtatgaagggaggaacaaggctgccgaggtgacactgtttgcctattcggacctgctgctcttcaccaaggaggacgagcctggccgctgcgacgtcctgaggaaccccctctacctccagagtgtgaagctgcaggaaggttcttcagaagacctgaaattctgcgtgctctatctagcagagaaggcagagtgcttattcactttggaagcgcactcgcaggagcagaagaagagagtgtgctggtgcctgtcggagaacatcgccaagcagcaacagctggcagcatcacccccggacagcaagatgagcggggctgacaccgttggggatgatgacgaagcctcccggaagagaaagagcaaaaacctagccaaggacatgaagaacaagctggggatcttcagacggcggaatgagtcccctggagcccctcccgcgggcaaggcagacaaaatgatgaagtcattcaagcccacctcagaggaagccctcaagtggggcgagtccttggagaagctgctggttcacaaatacgggttagcagtgttccaagccttccttcgcactgagttcagtgaggagaatctggagttctggttggcttgtgaggacttcaagaaggtcaagtcacagtccaagatggcatccaaggccaagaagatctttgctgaatacatcgcgatccaggcatgcaaggaggtcaacctggactcctacacgcgggagcacaccaaggacaacctgcagagcgtcacgcggggctgcttcgacctggcacagaagcgcatcttcgggctcatggaaaaggactcgtaccctcgctttctccgttctgacctctacctggaccttattaaccagaagaagatgagtcccccgctttaggggccactggagtcgagctcagcgttcacaccaggcgggctgggtcccctgcccacctgcctccctgccccctgtgacggagggggcaagcaagcccccagaggccgtgtctctggacagacggatagacatacggaagcgaggcctggaccaagagaggcccaggctactggaggagtagaaggatgggccccgtggggtccccactgccccggtacgagggggcccaagaccctggcaggtcaggggccctggccaagccagatctggagctgctgctccctgctgcggagaccgcggaggcttcgcgttgaccaagttccttaaagaactggctgatggggcaggaggtccaggcctgggctctcgggccctcctagagggccattggagcttgcagctcagacccccactttgagttttatttatttaaatagtagttggatgcttggcacgtcgtcctgtaataggaaacccttgcctcatcagttttcctgatttacaagtgcaatattttagccaatgccttgggagaagctgccatgcaaaggtggacaccattctccagcttcaggggatatgctcgtcccgggcaccggtggcaggcagctggccttctggactaaggcagcctggggggacactgcagtctggctacacacagagatctggcaccccctgggtggagtgtccctcgggggctttgggaaagcatggcaccctcagaccacacagtagccaagttctggagcaaataaaaggcctgtgttatttctt

SEQ ID NO: 1528 - DNA, 2777 bp, Homo sapiens
agaatgatcattagtcctaagcccattcagaggttcaagaatggggtcggctcaatttcagggccttattacccaagcccggctgcccttcggtgccaccagcaccactgctccgtcgctgcggaattccaaaggcaggtttggcgttagggccttggccccagagaggacgccgagcgctccacggaaagtctccgcccggctcccagggcgcacactcgcgcgcacgtggggccgaggccctgctcccggggcctcagggccagccggcgagggacccagccgagtgacagcaggaggcggagggaagctcagagctcccggagccgcccggccagcgtccggcctccctgatcgtctctggccggcgccctcgccctcgcccggcgcgcaccgagcagccgcgggcgccgagcagccaccgtcccgaccaagcgccggccctgcccgcagcggcaggatgaatgatttcggaatcaagaatatggaccaggtagcccctgtggctaacagttacagagggacactcaagcgccagccagcctttgacacctttgatgggtccctgtttgctgtttttccttctctaaatgaagagcaaacactgcaagaagtgccaacaggcttggattccatttctcatgactccgccaactgtgaattgcctttgttaaccccgtgcagcaaggctgtgatgagtcaagccttaaaagctaccttcagtggcttcaaaaaggaacagcggcgcctgggcattccaaagaacccctggctgtggagtgagcaacaggtatgccagtggcttctctgggccaccaatgagttcagtctggtgaacgtgaatctgcagaggttcggcatgaatggccagatgctgtgtaaccttggcaaggaacgctttctggagctggcacctgactttgtgggtgacattctctgggaacatctggagcaaatgatcaaagaaaaccaagaaaagacagaagatcaatatgaagaaaattcacacctcacctccgttcctcattggattaacagcaatacattaggttttggcacagagcaggcgccctatggaatgcagacacagaattaccccaaaggcggcctcctggacagcatgtgtccggcctccacacccagcgtactcagctctgagcaggagtttcagatgttccccaagtctcggctcagctccgtcagcgtcacctactgctctgtcagtcaggacttcccaggcagcaacttgaatttgctcaccaacaattctgggacgcccaaagaccacgactcccctgagaacggtgcggacagcttcgagagctcagactccctcctccagtcctggaacagccagtcgtccttgctggatgtgcaacgggttccttccttcgagagcttcgaagatgactgcagccagtctctctgcctcaataagccaaccatgtctttcaaggattacatccaagagaggagtgacccggtggagcaaggcaaaccagttatacctgcagctgtgctggccggcttcacaggaagtggacctattcagctgtggcagtttctcctggagctgctatcagacaaatcctgccagtcattcatcagctggactggagacggatgggagtttaagctcgccgaccccgatgaggtggcccgccggtggggaaagaggaaaaataagcccaagttgaactacgagaagctgagccggggcttacgctactattacgacaagaacatcatccacaagacgtcggggaagcgctacgtgtaccgcttcgtgtgcgacctccagaacttgctggggttcacgcccgaggaactgcacgccatcctgggcgtccagcccgacacggaggactgaggtcgccgggaccaccctgagccggccccaggctcgtggactgagtgggaagcccatcctgaccagctgctccgaggacccaggaaaggcaggattgaaaatgtccaggaaagtggccaagaagcagtggccttattgcatcccaaaccacgcctcttgaccaggctgcctcccttgtggcagcaacggcacagctaattctactcacagtgcttttaagtgaaaatggtcgagaaagaggcaccaggaagccgtcctggcgcctggcagtccgtgggacgggatggttctggctgtttgagattctcaaaggagcgagcatgtcgtggacacacacagactatttttagattttcttttgccttttgcaaccaggaacagcaaatgcaaaaactctttgagagggtaggagggtgggaaggaaacaaccatgtcatttcagaagttagtttgtatatattattataatcttataattgttctcagaatcccttaacagttgtatttaacagaaattgtatattgtaatttaaaataattatataactgtatttgaaataagaattcagacatctgaggttttatttcatttttcaatagcacatatggaattttgcaaagatttaatctgccaagggccgactaagagaagttgtaaagtatgtattatttacatttaatagacttacagggataaggcctgtggggggtaatccctgctttttgtgtttttttgtttgtttgtttgtttgtttttggggggttttcttgccttggttgtctggcaaggactttgtacatttgggagtttttatgagaaacttaaatgttattatctgggcttatatctggcctctgctttctcctttaattgtaaagtaaaagctataaagcagtatttttcttg

SEQ ID NO: 1529 - DNA, 2433 bp, Homo sapiens
actaccgggccagtttggaaacctgtgggccctcccgaccgctatcgctgaggcccctgcaacaggcgggccagggcgcactggggctgggtgctgggtttgatgctggtgctggtggaatgaacttgtatctctcgcacccacttttgtgcttctgacttaagcagtggtctcggaaagagggtcgtggtcccgcacggatgcgcttgttgggagaaaccttggagattcacggcaaggcgtaaagcctggggcttccaacgatactctgggcagggatggaagcctagatgcctcaccgcaaggagcggccgagcgggtcctcgcttcacacacacggcagcaccggcaccgcggagggaggaaacatgtcccggctgtctctcacccggtcgcctgtgtctcccctggctgcccagggcatccccctgccagcccagctcaccaagtccaatgcacctgtgcacatcgatgtgggcggccacatgtacaccagcagcctggccacgctcaccaagtaccctgactccaggataagccgcctcttcaatggcactgaacccatcgtcctggacagtttgaagcaacattatttcattgaccgggatggggagattttccgctacgtcctgagcttcctgcggacgtccaagctgctgcttccggatgactttaaggacttcagtctgctgtacgaggaggcgcgctactatcagctccagcccatggtgcgcgagctggagcgctggcagcaggagcaggagcagcggcgccgcagccgggcctgtgactgcctggtggtgcgcgtcacgcccgacttgggcgagcggatcgcactcagcggcgagaaggccctcatcgaggaggtcttccccgagaccggagacgtcatgtgcaactccgtcaacgccggctggaaccaggaccccacgcacgtcatccgcttcccgctcaatggctactgccggctcaactcggtacaggtcctggagcggctgttccagaggggtttcagcgtggctgcgtcctgtgggggcggtgtggactcctcccagttcagcgagtatgtgctttgccgggaggagcggcggccgcagcccacccccactgctgttcgaatcaagcaggaacccctggactaggccctgcttcagtgcccacctgggcccccccagggacctggaaacagtgctggggagttctgcctgtgtatacttggccgtgggcatgagaccgagggtgaggctggagggtccaaagctggcccagcgagcaccagggtcccaggtgtcatggcaacagaacgtgggatgctggaggcatgcctgcagaaggactgttgatgcgacccaaagatacagcggtgggatctctgctgccagctctcccagcccctcagctccgcagcctggcgcagcatcctctgaggccccggggcctgttggggcggggttggaagagccgtctgcagctacttcagaggagctgtttatccctctccacgcggggcagactctggcgggtctcctagcgtccgagagatggcttatttttctacagtatttaaaatggatgcagccctaactgcaaaagtcagagaggctgacaaggaccaatgcttctttatctggtgctcagttctcagtcagacgtgcagcatggctgcagggtggaccagctgcctggcgttcaggcccagatgcctgcagggctggggctctcgggacagatgcagggatgtgtgctgcagggctgctgggaggagagtggtgggggcctgagggctgagtgattctgtaaccacctgagaccttcacgtttgctgccgttgggggctcaggctgcactccccgggtcacctgacctgctgcccaggggcttccagtcctgtctgtgtggactggcacctgggctgctggagaagtctcctcccgttcggaccagcctcagggctgcacgttacctcaggaatgggccccaccatgaaggggcccatctgtcagcagcgtcttctaggtccccagctcagggagccatccccagctccagttttctcatgcgaatatgcacagttttaattcacgttgttacactagcctgccgatgagacccagacacaggcagacctggcgctcttgacccctgattccagtgaggactggccctgaggagtccttgcagacctgctgcctgccccacgacaggcccaaagatggaccccccctggccttgtgacagctccccaagtgttctccggtggagaaactgcagaggactggtgggcggggctccccagccatcaccatcctgtgtacaatggctgtagacttgtatatggctcctttaatattgtaaagatgctgatgtacaattgtcgtgcatttgtgtgaacacattgcgttccagtccatgccataaatgatgctctcaagc

SEQ ID NO: 1530 - DNA, 2230 bp, Homo sapiens
ggttccggtgggctctgaaccctgaaaggctcgcgatgcctctacacaagtatcccgtgtggctctggaagcggctgcagctgcgggagggcatctgttcccgcctgcccggccactacctgcgctccctggaggaggagcggacgcccactcccgtgcactataggcctcatggggccaagttcaagatcaaccccaagaacgggcagcgggagcgtgtggaggacgtgcccattcccatctactttccccccgaatcccagcgggggttgtggggcggcgagggctggatcctgggccaaatatatgccaacaacgacaaggtgggtccgcaggcggccttcaggggctcctctcagggcttggctgtgccggctctgtgccggacgcccggggtacctggagagacctgggtgggccctggggattacagcctggaggcgacacatctccggcaaaggagcacgctgagtgaagaaccgcagttctggcaaacaggactgataaagtaggggtgaggtggggtgactcaggccgggggagcaaccagaggccgtggggagtcggggtaaagttaggatggggaggaggcctgtgtgatgagcagagcaggtgggagaggcgagcagagcaggtgggggaggcgagcagagcatcgaggctgcttgtggtggacttcctggcgggactgctgaagcctgtggggagacttgtgtcacttccaggttggaatgtgacaacctgtaaactgtggggtcgcacatgtttctgaaacacatgcagcaaccatgtgaccagggcgggaacgcccagcttgttggggagcagctgacttctgggtacacagtcaggacccgggtcgggctggggcggcactgggctgggggccggcccagttggctctaggtccccagtctgacagcagtggttctgtgatggagcctccgggggggaggtgagggcagttgccctgggccccccttggtatgtaagagaaagcagcagtactcatggaggctctgttgcaccctcagctctccaagaggctgaagaaagtgtggaagccacagctgtttgagcgagagttctacagtgagatcctggacaagaagttcacagtgactgtgaccatgcggaccctggacctcatcgatgaggcttatgggctcgacttttacatcctcaaggcaagcggggtggggcgagtcagtgcacacagggtctgggatgggccagtcagactcacgggagccccaggtcagcatcacaccggggcacgctgacatctgcacaggagggtcactgggaaagcgtgagtggggccatgcccctttctggccagcaccagtggggtttcctgccttcaggagaggctgtcgctctgtgggtggctgacttgcccgtggggcctgagcgagcacagccgcccctttccctgcacttggacttgcttctgtgctgatcccaccccccaggctggggtgctgaggcggccccacccgggccttctctgtcctgtcctgggaccaccagcggctagagaggagccaggtgggttggctggaagggtaggtggggccctgccaccagcacctggccccatgtgagccttctgccagaccccgaaggaggacctgtgctccaagtttgggatggacctgaagcgagggatgctgctgcggcttgcccggcaggacccccagctgcaccccgaggaccccgagcggcgggcagccatctacgacaagtacaaggaatttgccatcccagaggaggaggcagagtgggtgggcctcacgctggaggaggccattgagaagcagagacttttggaggagaaggaccctgtacccctgttcaagatctatgtggcggagctgatccagcagctgcagcagcaggcactgtcagagccggcggtggtgcagaagagagccagtggccagtgaccacacagctcctccatgcctgaccaacaggcccagctttccctgccaggccctttgcactgaggacacagatcccggggagctgtgagggccaccggtgggcagtgggtggatcctggtttcgtgtgctgcccatgcaccttccagcccggggccagcttggcagggatccccaggaggcctgggccgcccagaggctcctctcaggctgggccccgacgtttgcggcagtgttccttgtgcccgtggggccgggagcgagtaaagtctgggccaggctg

SEQ ID NO: 1531 - DNA, 2556 bp, Homo sapiens
gaagggcggacgtactcgccacggcacccaggctgcgcgcacgcggtcccggtgtgcagctggagagcgagcggccaccgggagcccccggcacagcccgcgcccgccccgcaggagcccgcgaagatgccccggcgcagcctgcacgcggcggccgtgctcctgctggtgatcttaaaggaacagccttccagcccggccccagtgaacggttccaagtggacttattttgtgaagctgaacctgccctcggacatgcacatccagggcctccagtctcgctacagtgccacgcagctgcacctgcactgggggaacccgaatgacccgcacggctctgagcacaccgtcagcggacagcacttcgccgccgagctgcacattgtccattataactcagacctttatcctgacgccagcactgccagcaacaagtcagaaggcctcgctgtcctggctgttctcattgagatgggctccttcaatccgtcctatgacaagatcttcagtcaccttcaacatgtaaagtacaaaggccaggaagcattcgtcccgggattcaacattgaagagctgcttccggagaggaccgctgaatattaccgctaccgggggtccctgaccacacccccttgcaaccccactgtgctctggacagttttccgaaaccccgtgcaaatttcccaggagcagctgctggctttggagacagccctgtactgcacacacatggacgacccttcccccagagaaatgatcaacaacttccggcaggtccagaagttcgatgagaggctggtatacacctccttctcccaaggcatcatcctctcactggccctggctggcattcttggcatctgtattgtggtggtggtgtccatttggcttttcagaaggaagagtatcaaaaaaggtgataacaagggagtcatttacaagccagccaccaagatggagactgaggcccacgcttgaggtccccggagctcccgggcacatccaggaaggaccttgctttggaccctacacacttcggctctctggacacttgcgacacctcaaggtgttctctgtagctcaatctgcaaacatgccaggcctcagggatcctctgctgggtgcctccttgccttgggaccatggccaccccagagccatccgatcgatggatgggatgcactctcagaccaagcagcaggaattcaaagctgcttgctgtaactgtgtgagattgtgaagtggtctgaattctggaatcacaaaccaagccatgctggtgggccattaatggttggaaaacactttcatccggggctttgccagagcgtgctttcaagtgtcctggaaattctgctgcttctccaagctttcagacaagaatgtgcactctctgcttaggttttgcttgggaaactcaacttctttcctctggagacggggcatctccctctgatttccttctgctatgacaaaacctttaatctgcaccttacaactcggggacaaatggggacaggaaggatcaagttgtagagagaaaaagaaaacaagagatatacattgtgatatattagggacactttcacagtcctgtcctctggatcacagacactgcacagaccttagggaatggcaggttcaagttccacttcttggtggggatgagaagggagagagagctagagggacaaagagaatgagaagacatggatgatctgggagagtctcactttggaatcagaattggaatcacattctgtttatcaagccataatgtaaggacagaataatacaatattaagtccaaatccaacctcctgtcagtggagcagttatgttttatactctacagattttacaaataatgaggctgttccttgaaaatgtgttgttgctgtgtcctggaggagacatgagttccgagatgacccaatctgcctttgaatctggaggaaataggcagaaacaaaatgactgtagaacttattctctgtaggccaaatttcatttcagccacttctgcaggatccctactgccaacctggaatggagacttttatctacttctctctctctgaagatgtcaaatcgtggtttagatcaaatatatttcaagctataaaagcaggaggttatctgtgcagggggctggcatcatgtatttaggggcaagtaataatggaatgctactaagatactccatattcttccccgaatcacacagacagtttctgacaggcgcaactcctccattttcctcccgcaggtgagaaccctgtggagatgagtcagtgccatgactgagaaggaaccgacccctagttgagagcaccttgcagttccccgagaactttctgattcacagtctcattttgacagcatgaaatgtcctcttgaagcatagctttttaaatatctttttccttctactcctccctctgactctaagaattctctcttctggaatcgcttgaacccaggaggcggaggttgcagtaagccaaggtcatgccactgcactctagcctgggtgacagagcgagactccatctc

SEQ ID NO: 1532 - DNA, 3121 bp, Homo sapiens
gcatttctgcgcagctctagcgcgcctcggagcccgccggggcagccgccggacaccaggaccgcgagccagacagctcccggaagccgcgccgccgccgccaggtgcctgactgacagaagttcttgcccccggggagctggtgtggacagaggaggggccctggaagtgaccactgggctgagtagctcatcagcttccccacactgaagcccgaggggtctcctgctggcttctgagagctgacggaacaggttccagcaaggcagaccctgacacagaagccagacctgtccagcagggaccccatacactgagcctagacatggaggagaaggactacagtgaggccgatggcctttcggagaggaccacgcccagcaaggcccagaaatcgccccagaagattgccaagaaatacaagagtgccatctgccgggtcactctgcttgatgcctcggagtatgagtgtgaggtggagaactggctggacccctccaaggagatcaagaagcagatccggagtagcccctggaattttgccttcacagtcaagttctacccgcctgatcctgcccagctgacagaagacatcacaagatactacctgtgcctgcagctgcgggcagacatcatcacgggccggctgccatgctcctttgtcacgcatgccctactgggctcctacgctgtgcaggctgagctgggtgactatgatgctgaggagcatgtgggcaactatgtcagcgagctccgcttcgcccctaaccagacccgggagctggaggagaggatcatggagctgcataagacatatagggggatgaccccgggagaagcagaaatccacttcttagagaatgccaagaagctttccatgtacggagtagacctgcaccatgccaaggactctgagggcatcgacatcatgttaggcgtttgtgccaatggcctgctcatctaccgggaccggctgagaatcaaccgctttgcctggcccaagatcctcaagatctcctacaagaggagtaacttctatatcaagatccggcctggggagtatgagcaatttgagagcacaattggctttaagctcccaaaccaccggtcagccaagagactgtggaaggtctgcatcgagcatcatacattcttccggctggtgtcccctgagcccccacccaagggcttcctggtgatgggctccaagttccggtacagtgggaggacccaggcacagactcgccaggccagcgccctcattgaccggcctgcacccttctttgagcgttcttccagcaaacggtacaccatgtcccgcagccttgatggagcagagttctcccgcccagcctcggtcagcgagaaccatgatgcagggcctgacggtgacaagcgggatgaggatggcgagtctggggggcaacggtcagaggctgaggagggagaggtcaggactccaaccaagatcaaggagctaaagttcttagacaagccagaagatgtcttgctgaagcaccaggccagcatcaatgagctcaaaaggaccctgaaggagcccaacagcagactcatccaccgggatcgagactgggaacgggagcgcaggctgccctcctcccccgcctccccctcccccaagggcacccctgagaaagccaatgagagagcagggctgagggagggctccgaggagaaagtcaaaccaccacgtccccgggccccagagagtgacacaggcgatgaggaccaggaccaggagagggacacggtgttcctgaaggacaaccacctggccattgagcgcaagtgctccagcatcacggtcagctctacgtctagcctggaggctgaggtggacttcacggtcattggcgactgccatggcagcgccttcgaagacttctcccgcagcctgcctgagctcgaccgggacaaaagcgactcggacactgagggcctgctgttctcccgggatctcaacaagggggcccccagccaggatgatgagtctgggggcattgaggacagcccggatcgaggggcctgctccaccccggatatgccccagtttgagcccgtgaaaacagaaaccatgactgtcagcagtctggccattagaaagaagattgagccggaggccgtactgcagaccagagtctccgctatggataacacccagcaggttgatgggagtgcctcagtggggagggagttcatagcaaccactccctccatcaccacggagaccatatcgaccaccatggagaacagtctcaagtccgggaagggggcagctgccatgatcccaggcccacagacggtggccacggaaatccgttctctttctccgatcatcgggaaagatgtcctcaccagcacctacggcgccactgcggaaaccctctcaacctccaccaccacccatgtcaccaaaactgtgaaaggagggttttctgagacaaggatcgagaagcgaatcatcattactggggatgaagatgtcgatcaagaccaggccctggctttggccatcaaggaggccaaactgcagcatcctgatatgctggtaaccaaagctgtcgtatacagagaaacagacccatccccagaggagagggacaagaagccacaggaatcctgacctctgtgaagagatcctggcatttctggtccaacccaagccagagaaccattaagaaggggccttcattctggattctccgacgcaacactgacgtcccagctgcgacgtactgtcactgatgagagactgggaagggaaaagcatatatatatagatatatagagatatagatatatatacaggaaacaccgcatccttgcactgctgctggggctggcagagcagttggctgacagcaacaaccgacatctgaacacctacatttcctttgcagacaaattgaagaactggtgggatttttttcaagaaaagaaagcaagaacagaaaacgaagccacaggaagggaagtagacattgtatgcttatggtttctcattatgaaggtgcagcttgtaggaggtttgtacggatgtgctttgaagttatgtatattacatataacaggaaaaaatattaaaataaacagtgctggt

SEQ ID NO: 1533 - DNA, 2388 bp, Homo sapiens
attaaagggctcgcggccaacaaaaaggcaaccccgggggtggcgaaaagcgtccttcgggcaggactagtgcggagccccgcggggagcaccccagcagggaagtcccgatcttcccacgtgctgggaagcctcccatgtgctggctcagtctcgccatcccactcaccttcccagggagggatgccctggcacgcggcccggcccgccttttgaagggggaaagtggggcgcctctgagcctctgcctggggtgggggcgggccaggtcctctgccaactcaaagacgaggcggggcgccagcgctggaggcgtggctgtgcctgagagccgttggaggagggagccccgctttccctctcctgtctcctagttctcctattgcgcttttcctgggggatctttctccctctgtctccgccccctaatccatgctcccgataatgagggtgggggatggtggtaggagaacgctcggcgcctgcgcactagcttcaggccgcgggccggcccaagagcggaggtagagggaacgacgcatgcttgagaaatggcgggaaacagaggaggctcgaggcttgctcacacgcacacagccaactgcttctggaccgccttgctcacacgcacacagccaactgcttctggaccgcctgaaaggcaaccccgcccgccgcggtggtgtggggcgggcatcccttgagactgtgctctggaggcctggagaaacagctttctatcctcagcactggggagagcaggcctcaatccctgcctttgcctgccgcccctcttccttccctctcaaagcatacccagcagccccggcgctgagaaacgcgttactctcttatcagctgtgggagagacaagacagactggcctctgggcggaggggccgccattgcctgccctctggaccagggcctcacagataccctcagcttcaggattagggctgcgttggtttttccccccacatcaggggacttcaacaagtaacctccagttccatagataaaacttgtattccccccttctccatggcaggggttttgagcctagagaaggaagatggagcttcctggggctcctgtgaagcaggcagggggcagcactgggccccgggaagaggcggagaaggcgagggagtgcctgcggtgagcccagagccttgggcccgttatcctctgatgctgctcccccaactttcctgccgtcagtccctgaccttgcctgagaccttggcggctcccgcacctctctcccggctcctccttgctgagaacacaacccgcaaggcccttccgcctggctggactgagtcccctatggaggcagcctgacagggagcaggtatcttcctggcagaagaggacagacctggtaaactgagagactgttgatgccccaatgttctgcctagcctgcctggaaactccagaaggatacagcaagaaagcagcatctgcaagaaagccctcaccaggaccaaatcagctgacacctcaaccttggactacccagcttcccgaactgtgaggtatagatttttattgtttaagtcaccaaggctacggtgtttttaatagcagcccaagcccaggaatacatcatctgactcactattttgaatcaaactcttcagtttctccatcaacttagctggcagctcctgtccccagcagcatcagaggccccatgaaaagagctccagcaggggctcagcctgcatgggtcccatgcggcagcctcagtgtcagagcctggatggcaggtgaggctccagtgacacaaccacaatgtgaaagtgtaagagtttttaactacttatagatactggaaagcacagggcacacctggagaccacagacactggggtcagagagcccaggcagggaggagagaagggaactgtaggccaatggctttattgggtctagggtgttattgacaggtttccagaagggagctttaatgggtgtgtttaaagcaggcaaacactggggcaagaagatcacactgtgactgagaggtggtcactttaaattggagggcgaatgtcacaactgtttcagtttaaaggaagcagctggcgagaggggagcccagcacactatgcaagagagatgcctctaagattttatctgtggccaccgactggagccatttggaccgggtacagcagtggaaactctgtgatggtgacaaacatgggaatcactctgatgtgacgcagttaaatttacaccttaaaaaatggatgccaagacaacataaacaagacccagggacaccaacagggtatggtgctgtgccccagagtcagggtcctgggttcttacccagggaagtgagaaataaagataacttttccctgcaaaaac

SEQ ID NO: 1534 - DNA, 3041 bp, Homo sapiens
ctacagcatccactgcagctctgggctccatttccctttgaaatgggatgggagaaaggggcaggtaacagactggagtgaggagactgaggagaaactgtagagaataatacttaggagtacacgtgctggattctctcattaaggaaatattcatgagtcaactatccagaatcatagttattattcaagcggtgtgggtttaaaaggagatttgatgccatggcaaacctcactgacttagactgttcttcaagttaaagagcaggatgatgtctgaagtggctgaaacacatatggcttcagtgtgtcaagaagacctgaaagatcccacatggaagtgaaattcattactggcaagcacggtggcaggagaccccagagggctgagccgcaaagaatttgcagagccttatggctaactccatggcctagtttgatcttgaagttactgtcttggataatcctctcaaatctgttcctgcacttaagagccactcatcacatgacggagctccctctcaggttcctttacatcgccctgtcagaaatgactttcagggaacagacatcacatcaaatcatccaacagatgtccctttcaaataagttggagcagaaccaactatatggagaagtcataaacaaagaaacagacaacccagtgatttccagcggattgacattactctttgcacagaaacctcagtctcctgggtggaagaacatgagttcaacaaagcgtgtgtgcactatattggctgactcttgccgtgctcaggctcatgctgctgacaggggagagaggggacattttggagtccaaatcttgcatcatttcattgaagtgttcaatgtcatggctgtaagaagtaacccattttaataactggcatcaaaggatttaggagagagaaacccagtatccagacccatttccgtcagtgacactctcctcgtattgggaggattggccagaatcgtctgattcctgtttctgatttccttcctcactggcatcagagtattgcactataggaaaactaatatctaactgagctccaagtgctaaataacagcatctcatgttcattccgggtcaccaagaggttcagggtgaccaagtcacaaactataaatttgaacatttgatgatttttgcaggagactgggtgaacaaaggaaaacccgagagatacataaaggtggaaactaggatttctcatttgaattatttaacatgcctcactctaatggttataaatataaaggaaatgcaggttcttcaagaaggtgaaacgaagttactgaatttaagttttttttttttaaacctactttagaataggaaacatgcttactaatatttacaaggcactacaaggcaccagccaaaaagcctgatttattggcaggatattcttgttgttgttgtttctattgtccatataggcaggcaattaatactttttagaaaattaagttgccaactcaacactgcctacttttgaatttttattctagcaacagccgataatttattggaaattccttatgtgctgggcactacgctagacattgggagtacgaaaattaatatggtaaagatcctggctttaaagagtctttaacattatttcagcagttttattacaggtgtatatgttggaattgacagaacacttagctcaaagcaagggttcaagcatgactttgcagagtagatttcagctgagcttaaaggatgtgagaataagtatacacattttttaaattacccagaatgtagtgcctacagaagtgcttgagcctcagttgcttctaagagtccaacttcagaacttgtatcttctagattgagctcattgcttaatttctagccaacatagcccatctctctcagctgaatactaagctcatcaacttctcctttgatctaggtcttgattagaatgttgaacatgacaaggctgaaggcagaaaccatagaaacttctatccagagttacactcgtctcttaatagctgcctactgttgcaatcagaataaactcacttcttgcccaattatgacagttcattcaccttctactcaagggagactttaagagttgttgaagttgaacttctcaggttcttatacttagtgacactgttcatgcaatggctcagtatttcttgatttctcagaaccagcaaaagtcacaaactgaatcctcaaattggaattcgtaagtgactaacttgtagcataactttattatactaggaaagatggggcaagggacagaaaaaatatctgtaacatcttatatgttcaaatataagcgctttatgtatatttagtcattcaaactccaaatacacattaagaagtagtcatcaatattccactctctaattctacaatttctacctttttagattccacatataagtgagatcatatggtatttgtcgctctgtgcctgacttatcttacttaacataatgtccttaggttcatccctgtttgaaaatggcagaattgcctgtttttttttttaaggctaaatagtatcctattttgtatattcagcacattttaaaaaatctgttcatcagctgacggacacttaggttgattccttatcttggctcttgtgaataatgctgcaatgaacacaggagctcaaacatccctttgaaatactgatttaaatatctttgggtataaacccggaattggctgtggggagttagacagggaaaatgtccacattgctctacggatacaaagtttcagttaggaggaataattctggtgttctattgcacagcacagtgtctatagttaatagtaatgtattatatatttcaaaatagctaaacaaagagaattttaatgttctcaccgcaacgaaataattgtttcagaaaataaatatgctaattagcctgatttgctcattccacagtgtatatacatgtatcaaaaagtcacattgtaccccataaatatacaaaattatttgtcaattacaataaaacttttaaaaagt

SEQ ID NO: 1535 - DNA, 3008 bp, Homo sapiens
actcattgggcgcgagtccccgccgccctcatacacctccagcatgagagccaaatacctcgccacgagccagcctcgccctgactccagcggcagccactagaccgcgcccggcagccacccaccccacgtgccaacttcccctccccgtgccagcactgccgcttccacctgggccacccaccggaccctcgcacgccgtgccaggcctgccccagacgcgtctgcaggccgcttgccctcctgtcccctccccgcaggggcacagtggagacgcaggggctctgggcccgtaccgccaactcgggtcacacctgaacgctgctgccagccgatgccccagccctgcacgccacccactatcccggcacgctccctctgcagatggtcgccgcacctacaagccctggccgcacccaacctgtgttgttgccgcccggcccttccctccacagctctccttcctcccgcccggcacttctgtggaccccttcttagttcacaggcacggctggggccgctctgtgctggcgcctgctggccactgagggacagggacacgtgccacctgctcatctctgccctgaggtcaccccgtggtccctccacgtgcccatctctctgcagtgccctcctcgcctgtgcagcccgcccacccacaggctcacccctcctgccggctgccagaggccccctccagcagggcctctctccgttgccccagcttcactctctccctcagcacctgccctgctggaggccccagccctccgtggacagcaggggccacgtggagcccgggccgctcacccgccacccagtgctggccgccttcttggtgccaaacccccttcccccacccagagactgggcagctgtgtctggttcgttctttgcactaaccacatttgtcatctctagggcaggctggggctgcgggctgagggggaccgctggcaccccccttccctcccttcttggttccatttccatccatgacaggtacagcatcccaggagcccggcctgaggggctggacccgagccggctgtgaacatccctcagcccctgctgtccccccttgggactaaccactaacctcacccccaaactccacgggtgcccctagctggcccagagccggcagtgtgagcccaagtccgggctggagccgaggccggagcagctgtctgggagtcaaggctgcagtagcgtttcttcatggggtgctccggggggtgccacagaccgacaggcagcccaagggcctggacacccctccccaggcaggtgctgccccaggaggactgtcctcgggaatgaacctcccgcgggctttggactgaggtccctgtggcctcggtctcctccccatgaagtgggagcgaggctccccaatggtgcttttggctttagtgtacgatgtttgctgtgcttcccgccgtggagggcagagccaccccacatcaggatcggacgtgctacccctcccggtcccggccctggcccagccagcccagccctcgaggctcgatgcctgtgccaaggccaggggcagccagagggcagctggatggccacgtgcaggggtcaaggctgggccctgcagtggggcgggccgccagccccagcagtttacagacgcatggctcttcctcccagagcagccggcagctacctggaccggaaatgtcctcatcccctccctggggccaggctctgccctggccttcctctgtgaacccctcctttctttgtgctggtgtctgggaccaaaaagggggaatatgggagggcagagtggggaggggagtccatgggcctggggccccaagccggggcgtctgagctccccaggcatgaccaaacctcagtggaggggcctctgcttcaggccccgcctggctgacattctgagcccccctcggaggccccgccacagccaacctgcccagtctttcctctgggcttgacccgccaggggagttctccaggcctagggccaggagagaggccctggcaccctggcgtgggtgcccgccaaacgccctgcgaccgctcagaagcacaaatgctgtccatggccgtgaggctgcctgccaggtgaatggacatagcgtgagaggcggtgaggccagggcttccagcctcgtgctgtctcgggactcctgaccgtggtgtgcgtgtgtgcccgtctgtgactttctactcaccaaggttgaagaaaggaaacggggaaaatcaaaaggggttcaaaccccacctcagtaggtggaggggagcgcctgccattggttgtatttttgttctgagttttcggtgccgtgttcctaactactccatcccatgacctcgccacacctactggggcatctggctggtgcctgctgccatggccagcccccactctcaccctgcacagggggtcttgcagcccccaggcccacagcctcgttgggaggacagggtggccctggggacaagagggaggagcccaggggcttacctcactgagagtgctccccagcaggcatccactaccccagggccccccacatgtcatggcaaggttggtagtgaatgggcctggttgggagcagcccctggcccattgcccacccacccatctcactatgcaattcgagttccaagcaacatttgctcctgccctggggccagctctgccccagccctgagaggggtggtgaggcagccccctggaccccagaaccccagacaagggggcaggcgggggaccagggcctctcctgtgggatctttgttttgtgtttaaccattttgcatttccccctcctccagcctctgtagggccatggctgtatgtactgtcgctgtgtttttttgttttttttagaactgggtttgggggctgatttttatttctttgggggctttttttcttggcaaatactaaaaatctcgtcaatgtaatttctgtggtttctattcagcttgggtttcatgttttaaaataaattttaaaaagc

SEQ ID NO: 1536 - DNA, 2361 bp, Homo sapiens
gctttgaagttggcagattttagttgtgttcactaatattttaacagtttttcttatttataggatgtgacacgactttgtgtgaaactagcattccaacatgtacaaatagtcaaaaattgattgttggccacagtcctctttcttgctgtccacagtacaaatgtgaatgtgacccattgaaatgccccagtatttcaacaccagaatgcagagaagatcaattcatgattcaagttcgacaggaagaaccttgttgtttttcccctttttgtgtttgtgaatcttgcaccaaacctgttccactatgtcatgatggggaatttctcacagtagatcttaatagcacacacttctgttgtcctcagtattactgtgtatgtgaaccaaacctttgtcctatgccattactcaactgtgcagaagatatgaatcttgtgaaagaaaatgtatctggtcaatgttgcccaacatggcactgtgaatgtaactgtgaaaaccttgttatgccaacttgtgaagtgggagaatttactgcaatagaccataacttccagagtgattgtggatgcatacagtatctctgtgaaaaggatgatgtgtgtgtatttcaagaagtatcagtattgaatcctggacaatccatgataaagtatttggaagaagacttttgttatactatagagtgtctggaagaaaaagataaccatacaggctttcacactctgaattttacactggtgaattgttcaaaaaaatgtgatgttcaccaggtatatactccatccccaagtgattatggttgttgtggtacctgcaaaaatgtatcctgcaaatttcacatggaaaatggaacatcagttgtatacgcggtagggagtacctggcactacaattgcaccacatatgaatgtgttaaaactgatgaaggagcaataattctgaactacacaatggtctgtcccccttttaatgagactgaatgcaaaatgaatgaagggattgtgaagctttataatgaaggctgttgcaagatctgcaaacgagaagaaagaatatgccagaaagtgatcattgaatcggtcataaggaaacaggactgtatgagccaaagccctataaatgttgcatcttgtgacggcaaatgcccatcagctaccatatataacatcaatattgaaagtcacctaagattctgcaagtgttgtcgtgaaaatggagtacgaaacttgtctgtgcctctgtattgctcaggaaatggcactgaaattatgtacactctccaggaacccatagactgtacatgccagtggaattaaacccttgggttccaagagctctatacaacatcataacgtcagatagaattaacttttattgctattacttaggcatgtggcagatttatgctgtttaacaatactgtatttttcagacttggaatgtggaaatttagcaatttgtacaaaatatatacagtttcaatagcaaaattaaatttattgctttactctattttagaaaatcaaatgactgtaagttgttcagctggaatgctgttatgtatttaattacaacttggtgcagatacagtatattctcatcaactggaaggttattttgcaaaattccttcaatttcactcagtagctctttttttcttaatttgcaaagtctgctatagctatccaaattaaggtaccctttaatatgtactccttaatctggtaaatgtgatcagttaaaattgtcatctagatagcaataaagagtgatatgcttagagatagataatggattatttaaaacctgaatggtttatagagaagtcattataaattcccctcattttgcaggtgtaacagataaccagagaagctgtgtgactcgtacaaatttattcagtgtaataatatagtaaattcatgttaacagttggattaaatcctagctctctcttattccagtactatatcacttttaaaatcctgagcagtatgtagtaagagtatatcacagaatctttcattcttaaagagtttgcattggatagaattaagtattttaagtttaacatatttgaaaaatgccccccatacattgttattccaatagtaaggagcagggaaatatagcatcatttgctaaatagaggagatagatcttgaactgttattttttatataattaaaactgctattaaatgtgttgtcagtatttaacatttagttactgtctcattaatatttaattttgaggatgtacttgcatactgttgaagttgagtgctgttttgctgttaatgctgctgctttgccaatgaagaatgaaataaatttatctgaatgtatcaataacttt

SEQ ID NO: 1537 - DNA, 2353 bp, Homo sapiens
atcagccttctcgctccgcggccctgcaggacctgcccgccgggagccccggagtccgcggcagcgccgagggcccctcccccaggcctctgggctctgaggctcatccatggaataccaattctttttcttagtgttcacattggatttttctgttaaaaatagattgttggagttggctaacaagttgattacttccagtcaggcactctcttctgtaaagtctcttttgtaaactcctacaagcagctatttcactggatttgaaaagactgactaaaaagaaccatgcactgtaactctcaagtatacaggaatattgttattaggatgggacgtgctgctctatgggaccttcagaatccatgtaagagacccctatgcttaagcctctctggatgggcttcagctcctcacagccgtcagggaccatgcctggccggatgctgccgcctggcttcagtgccatctgcatgtcctcagggatgacaaaggactcattgtaccagatgtcaaattctacaaggagagacggggtctcactgtattgcccaggctggtctcgaactcctgtactcaagcaatccacccgcctcagcctcccaaagtgctgagattacaggcgtgagccacttcgcctggcctaggagatacgagtttacttgatctgttcaagtaaattcaataaaataaagtcttcatctgtcacccagactggagtgcagtggcgcaatcttgcctcactacaacctctgcctcctgggctcaagcgattttcatgcctcagcctcccaagatgctaggattacaagtgtgtgccaccacgccctgctcctctgagaaataaatgagtaaaatgcaccccctgtgagtgagatgatgcatctgacttgcaggaataaaccaagtgacatctggagatcactcatggaagctggcctggaacagggttgtgatttagcgagggaaagcccagtaacctgtggtgtttcctgtctggaagaagacagtaagactgagccaggagtgtgaagaacagtgtggcctctgaaccacctgtcccagagttggaatggtcactcactaaaatgcaggtcctgggccctgctccatctctcccaagtcagaaccactggctgaggggctgggaatctgcacttgaccagccctctcagataagtcatctgaacacgcaagcttggtgggccttggccctcagtgcaggtgtgggcggcgcacgccaccaggacaaggacactgggtcagagtaaccaggtactcttcacatgttgaggatcacatatggttttgtttgatctggtgcagaagctaacattagctgattacctaattgggcgtaattcctccttcggggagtctgagggaaggggctcaatgctggaagtttcccggtcccgcgaaagcatgtctttgacatccccatctttggaggatgggaccagctgggtcttggaggtggaaacgtaatccaagtccttcccattcacagggctgctggcaccttcctttcttgccaaggagctggaagaaggcacggaagccccagggttcagtcatggacagtgagttatcagatgccaggatgagtgacctttctcagcactgactacactgggaaccccacctcattcagctcccatcttgttcatatgcctaggtaaaagcgcaaatagtgtgatgctaagccaggcagatgtggaggaagaagagggcatttttctcccttttatcagaacaaagagccctcggtggtcttggcaggagacgcttgggaaaaatgggtacaatctccagggattgaaagtgtatggacctgtaggatgggccacaggttctcaggaaccaccacggctgctgaggtctgagtcatacaggcttccccgggaaggactggcagagccccacacagggtggttctgtctgtggatcaatggtaaagcaggatggctctgccctgctgttcttactggtccacaccctgttctccacaccagctcccagaaaagtagctgtcctccctgctgaagtgacagtgcttggtgcctttctccgagaagaggcagatctgaggaccgaactggcaggaggatgcccatggctcttcccaaaggtctgaggatagaaaatctgtttcttcctctttcctcctccttgcaacgagtatggctcagggaactgagcctcaacccattgaatactgcactgattatccggaagcagaacagagagggttggggtgtgactgcactcatgaagaggcaggaggaagccagggacactggcatcctctgctgcctgactcttgtcttgcgtgtaacagttttctacaatc

SEQ ID NO: 1538 - DNA, 2599 bp, Homo sapiens
agatgctcccgggctttcgacaagccgccctggaaagcaggcccgtcatcttcagcggaaagctctctcacgtctgggcccgcaagcccggagggttcgtcataaacacacaaggcaaggatagaagcgaggccgaggggctggtcacgcaactgtcaaacgaagcccacccaccgactgacaaggccccaaggggacaagcgatccccgcgcgggatactcacccgttacctcaggatcgcgactacaactcccaggaggctgcgcgagcgacggaccaacgcccttcccagaatgcagcacagctgcatccctaccccgccctctcctttctccgctcctcctgcttttctacccgtcgtcacccgggagagccggagggggctaagttcgggtggcagcgccgggcgcaacgcaggggtcacggcgacggcggcggcggctgacggctggaagggtaggcttccttcaccgctcgtcctccttcctcgctccgctcggtgtcaggcgcggcggcggcgcggcgggcggacttcgtccctcctcctgctcccccccacaccggagcgggcactcttcgcttcgccatcccccgacccttcaccccgaggactgggcgcctcctccggcgcagctgagggagcgggggccggtctcctgctcggttgtcgagcctccatgtcggataatcagagctggaactcgtcgggctcggaggaggatccagagacggagtctgggccgcctgtggagcgctgcggggtcctcagtaagtggacaaactacattcatgggtggcaggatcgttgggtagttttgaaaaataatgctctgagttactacaaatctgaagatgaaacagagtatggctgcagaggatccatctgtcttagcaaggctgtcatcacacctcacgattttgatgaatgtcgatttgatattagtgtaaatgatagtgtttggtatcttcgtgctcaggatccagatcatagacagcaatggatagatgccattgaacagcacaagactgaatctggatatggatctgaatccagcttgcgtcgacatggctcaatggtgtccctggtgtctggagcaagtggctactctgcaacatccacctcttcattcaagaaaggccacagtttacgtgagaagttggctgaaatggaaacatttagagacatcttatgtagacaagttgacacgctacagaagtactttgatgcctgtgctgatgctgtctctaaggatgaacttcaaagggataaagtggtagaagatgatgaagatgactttcctacaacgcgttctgatggtgacttcttgcatagtaccaacggcaataaagaaaagttatttccacatgtgacaccaaaaggaattaatggtatagactttaaaggggaagcgataacttttaaagcaactactgctggaatccttgcaacactttctcattgtattgaactaatggttaaacgtgaggacagctggcagaagagactggataaggaaactgagaagaaaagaagaacagaggaagcatataaaaatgcaatgacagaacttaagaaaaaatcccactttggaggaccagattatgaagaaggccctaacagtctgattaatgaagaagagttctttgatgctgttgaagctgctcttgacagacaagataaaatagaagaacagtcacagagtgaaaaggtgagattacattggcctacatccttgccctctggagatgccttttcttctgtggggacacatagatttgtccaaaagccctatagtcgctcttcctccatgtcttccattgatctagtcagtgcctctgatgatgttcacagattcagctcccaggttgaagagatggtgcagaaccacatgacttactcattacaggatgtaggcggagatgccaattggcagttggttgtagaagaaggagaaatgaaggtatacagaagagaagtagaagaaaatgggattgttctggatcctttaaaagctacccatgcagttaaaggcgtcacaggacatgaagtctgcaattatttctggaatgttgacgttcgcaatgactgggaaacaactatagaaaactttcatgtggtggaaacattagctgataatgcaatcatcatttatcaaacacacaagagggtgtggcctgcttctcagcgagacgtattatatctttctgtcattcgaaagataccagccttgactgaaaatgaccctgaaacttggatagtttgtaatttttctgtggatcatgacagtgctcctctaaacaaccgatgtgtccgtgccaaaataaatgttgctatgatttgtcaaaccttggtaagcccaccagagggaaaccaggaaattagcagggacaacattctatgcaagattacatatgtagctaatgtgaaccctggaggatgggcaccagcctcagtgttaagggcagtggcaaagcgagagtatcctaaatttctaaaacgttttacttcttacgtccaagaaaaaactgcaggaaagcctattttgttctagtattaacagtgactgaagcaaggctgtgtgacattccatgttggag

SEQ ID NO: 1539 - DNA, 2208 bp, Homo sapiens
ttctgatgaacgatgtgctcctgtacacctatccccagaaggatgggaagtaccggctgaagaacacattggctgtggccaacatgaaggtcagccgccctgtgatggagaaagtgccctacgctctaaagattgagacttccgagtcctgcctgatgctgtctgcgagctcctgtgcagagagggacgagtggtatggctgtctgagcagagccctccctgaggactacaaggcccaggcgctggctgcattccaccatagcgtggagatacgagagaggctgggggttagccttggggagaggccccccaccctggtgcctgtcacacacgtcatgatgtgcatgaactgcggctgcgacttctccctcaccctgcggcgtcatcactgtcacgcctgtggcaagatcgtgtgccggaactgttcgcggaacaagtacccgctgaagtacctgaaggacaggatggccaaggtctgcgacggctgcttcggggagctgaagaagcggggcagggctgtcccgggcctgatgagagagcggcctgtgagcatgagcttcccgctgtcttcaccccgcttctcgggcagtgccttttcatccgtcttccagagcattaacccctcgaccttcaagaagcagaagaaagtcccttcagccctgacagaggtggctgcctctggagagggctctgccatcagtggctatctcagccggtgtaagaggggcaagcggcactggaagaagctctggtttgtcatcaaaggcaaagttctctacacctacatggccagtgaggacaaagtggccttggagagtatgcctctgctaggcttcaccattgctccagaaaaggaagagggcagcagtgaagtaggacctatttttcacctttaccacaagaaaaccctattttatagcttcaaagcagaagataccaattcagctcagaggtggatcgaggccatggaagatgcgagtgtgttatagcagttatcaagcatgtggacttgtaacaaattcttaggtcaatatgtgaatgcttttagaagctaagctgtggctcaactcatccggacacacacctggattcagcaatgaggcctgaccttttttgctataaccgccccaccactcccctgcccttgccaacatcttcatgaatggaatccttaagggatatttatggacctctccttttctgtgttttccacccctacccccacccgccacccagtaataaactatttccttaccccgcagtgagttaaaatttagtaagatgaagatgtggaaaccaatgaaaagtacatttagaaatgcaggctttttagtagaaagaagctcttacagtttttactcatgatgaatcttatcacctttcaaaaattgattgtggtgcctcaggtgaaatgagaagctatcagtaacagctactctcatcgaaagcactttattattttacggagctgcaacctccaattttgtgttttctaagtgatttacttaagtcaataacagatggaatcctgtggactaatgtgccaccagttttctaacaagggtgtacataaaatggatttgtgcagacctggctgtggcttgctggtgtgcaagcacacatcactttagaggggctgcgccccaccagataggaaggggaggattttctcctccagtcgaccttgtgacctgtatactaacataacttattaaaggaggggtccctcctcccccagagcagtcctcaacactatgtcagtgctggaaatgcagccactggcagatctggccccccagacgtcaccgcagggcctctgaagagtcaaggtctgctttaatttattgtgtgcctttctgtgtttacctcactcaagctgacaacattgtttatgggaatctatccttcttttagacacacggtaatccttgggctgtattactgaaggctttttattttttgagaggtgaaaaaaagagaaaacaagttagactccaaaggtgaattcctggtcttggcagatggctctgggaacagcgagggagcacagaagtcgtggcctgaggctgttctatgggcacttggggctaaatcgcctcctgagggtgactgttgcttattctgctggacaggtttttacataaagcaaagggcatgtgaggggtgggattccttgttactcttactgcaataaaaatcaattgtttg

SEQ ID NO: 1540 - DNA, 2602 bp, Homo sapiens
aacagagacaaatcttcgttataagtttatcagaaaatgatgatgatatcgaattgggagaatggggaaagttgtgggggcagtgataacagagccaaatctctgtctatccaattgtctatcaaaacaggaactcaacggattggagcctactgggcttgagagccccgctgaggagtccggaggttgggacgcaactactgccgcgtcccctcccggtccccggccacatggcgagcggggcgacaccgaagcagcccacggagctcgaggcgacgctgctgagcctggttccccaaagcggccgcgccactccccgcttccccgcccggctccgggccccaggccctgggacgccgagccaccgccggcgtttcagacgcaaaccccaccgcgaccctgcagcagcctgccccgcctggccgccagaggcaccttccaactccgaaacacatttttcaacatataatagaatcattatcagaggtggacacatttagaagttgttcttaatcagagggcagcttgtgcttaggaaagccagcctcagtcctcagcacccagcacccagtgctgcaggtttctcctgggtgaagatggaccagcccaccttggccctccggcaagctagaacaatatgtacacgtctctcaaactatgaagagaagatttgggaggagtatgagaaaatcctcaataccaaactagcagagcaatacgagtcgtttgtgaaattcacacatgagcagattatgcgaccatgtgggacaagcccaacaaactatgtgtcttgaagctttttgttgcagatctcggtaccaggtttgacctcaaggcatggttgctatacattttttgcaactgtttgatatcacatttcagctccaactttgcatcctgagaacattccaacgtttctgcaggtccattttatacgacttgaatgaccttaaaactttctggttgccacaggtatatctttcttttctgttcatccagtaaatagtcataccctactgtgacagatttttccaaacaaaaatacctggagcagcagtgtagcaaaatatgccttcagtggcactcaacaaatggagtttccccaagcacagttctgtaagaagtgtgtgtgagagtgtgtatgtgtctgtacatgtactttagattatggtttgtattgtgcaaatttttttgatcttggggattctggctgtggatttgatgcagaaaattatggttaaaaactatggtctacagaagatacttaatgctttgtgactatataaattgtaacagtggattgttttatgtgtaggtattattgttaaatatggggactgttcaccaggcacaaaataggaatcataaattaggatgcaggctgggtatggtggctcatgcctgtaatcccagcactttgggaggaggccgagctgggcggatcgcttgaggagagttcgtgatcagcctggccaacgtggagaaaccctgtccctactaaaaatacaaaaattaggtggacatggtggcgagcacctgtaatcccagcttctcgggaggctgaggcaggagaatcacttgaaccagggaggcagaggttgcagtgagcccagattgtgccactgcactctagcctcggtgacagagtaagattccatctcaaagaaaaaaaaaaaaagtgaagatggccattggctgtggttatgacaatacagtgaaagtctgttgtcttagatatacaaatacatagtgagaaattagaacaaactggagactggcctttgacacatggactctgcctagctgtgttagaaaaatatttaactccaagccttaaaattcccaaatggagttggtgcttacctcattcacacaatccaagagttcactgggtcctgcacctctaaagggaaaaggtctcccctggagcaggagcatcagagtttgctcgggggcataaggtaggtgagtgctgggccgaggcaggctcccctggcactgctagttgcaggagcactttacctttgtatcagttactaaaaacaaaatttgaatcctttggtcaggttcccccaaattattttgaggtagccatgtttaagtgcttgagcttttgtgttggcaaacccctgcccaaggttgctaatagggtattctgccccttgtttccacagctgaggcacagaaagtagcctcttttgtgaggagttgggagttaagtatacatttatttttttaccatgatttgttcaggaccacattttacaagataccttgtttcctttattattgtttctggaaagtcctattcatattattttatttgaatatagaatatagtttttttaaatgagggcttattttgaaaaattctgagcttaattcaaatttatgccaataccttcccaaataaggtaatagtcaaagacagatgttctgatcaaatggcttagagatagtcctggaatattcatattcaaagattccttattaatgaatgtctttaacttaaatctacccaataattgcaacatggttctttgtacattttcattatatggtgttaacaagcttcactgcaaacaaataaattacttaagtt

SEQ ID NO: 1541 - DNA, 2062 bp, Homo sapiens
aggtgactgcgcggcgggctgtggctgcggaggttgaggggcgtccgaggcgcggaggggctggctgggcaggaggggttggcggggcagcagggccgcggccatggggagcttgaaggaggagctgctcaaagccatctggcacgccttcaccgcactcgaccaggaccacagcggcaaggtctccaagtcccagctcaaggtcctttcccataacctgtgcacggtgctgaaggttcctcatgacccagttgcccttgaagagcacttcagggatgatgatgagggtccagtgtccaaccagggctacatgccttatttaaacaggttcattttggaaaagattgaatacctgcttaagaagcttacagaagctatgggaggaggttggcagcaagaacaatttgaacattataaaatcaactttgatgacagtaaaaatggcctttctgcatgggaacttattgagcttattggaaatggacagtttagcaaaggcatggaccggcagactgtgtctatggcaattaatgaagtctttaatgaacttatattagatgtgttaaagcagggttacatgatgaaaaagggccacagacggaaaaactggactgaacgatggtttgtactaaaacccaacataatttcttactatgtgagtgaggatctgaaggataagaaaggagacattctcttggatgaaaattgctgtgtagagtccttgcctgacaaagatggaaagaaatgcctttttctcgtaaaatgttttgataagacttttgaaatcagtgcttcagataagaagaagaaacaggagtggattcaagccattcattctactattcatctgttgaagctgggcagccctccaccacacaaagaagcccgccagcgtcggaaagaactccggaagaagcagctggctgaacaagaggaactggagcgacaaatgaaggaactccaggccgccaatgaaagcaagcagcaggagctggaggccgtgcggaagaaactggaggaagcagcatctcgtgcagcagaagaggaaaagaaacgccttcagactcaagtggaacttcaggccaggttcagcacagagctggaaagagagaagcttatcagacagcagatggaagaacaggttgctcaaaagtcctctgaactggaacagtatttacagcgagtacgggagctggaagacatgtacctaaagctgcaggaggctcttgaagatgagagacaggcccggcaagatgaagagacagtgcggaagcttcaggccaggttgttggaggaagagtcttccaagagggctgaactagaaaagtggcacttggagcagcagcaggccattcagacaaccgaggcggagaagcaggagttggagaatcagcgtgtcctgaaggaacaggccctgcaggaggccatggagcagctggaggagcttgagttagaacggaagcaagcacttgagcagtacgaggaagttaaaaagaagctggagatggcaactaataagaccaagagctggaaggacaaagtggcccatcatgaaggattaattcgactgatagaaccaggttcaaagaaccctcacctgatcactaactggggacctgcagctttcactgaggcagaacttgaagagagagagaagaactggaaagagaaaaagaccacggagtgactgagcttgctggcagtcacgtcagttatgtagatactgcatggcaggagagctttacgctaaagacaaaagaaacagctttgggggccgggcgtggtggctcacgcctgtaatcccagcactttgggaggccgaggcgggtggatcacctgaggtcaggagttcaagaccagcctggccaacctggtgaaaccctgtctctactaaaaatacaaaaaaaattagctgagcgtggtggcgggcgcctgtaatcccagctacttgggaggctgaggcaggagaatcacttgaacgtgggaggcggaggttgcagcgagctgagatcatgccgttgtactccagcttgggcaacagagtgagactccatctcaaaac

SEQ ID NO: 1542 - DNA, 3713 bp, Homo sapiens
ttagacatgaattggccataatgagactagcagcctttatgggcattactatgttagttggaataactggactcttttacactcaactaattggcatcatcacagatacaacatctattgaaaagatgtcaaactgttgtgaagatatatcgaggccccgaaagccatggcagcagaccttctcagaagtttttggcactcgttggaagatcctgtggttcattcctttcaggcagaggcaaccactgcgagttccctaccactttgccaatcatgtctaaacagatggatggtgggcacagatgggtcctccatgctggcaatgcgttacaggttttatgataatagaactatgacagtcttcaagtcaattaaaatccacccaccaatcttaggcatcataatgtgccccaggctttattttaatagtgatcttgatcctgttgtgggactaatacaagatctatatttaagttttaaagcatgtttactttcaaattagctttccacagggatttcttgaaatgcttttgttattaaactcaaaaggcagtgattaggatgaaataattgtacataatttattttagtactgacagtgttacagattctaatttatggtaaatttcagatgtttatttaaaattttcacttttaaacagtaaccaaatctaaatttaattattcaggttttacaaaagttgatacaccttcttatagtataggtaaattttctttttcaaatccaatttaaaataacctttccttttaaatgtgctgcaacgtttttaaaaatgcagcagcataggagtgaacaacagcaacacaaaacgggcattggtttcttaggagtggcttgcttacgttttcttcttttttcttcaccaaaaccaacatgaaagtaccactgaagtaaaacaccaactacctaccttactataaaggaaatgttaaaatttttttcacaataattttttcaattttcactattactgttgtaattattgattgtgattaaaatatttgctcccaggagaactcctgaccagtgggcatgtattcctattttatcctaagattttaatgagcaaaaaggggagagaatttgcaataacttcacaattaccttttctagtgcagttatattagaatgcatatgtttttaaaatgctagtataactagatagtatataatgtacagtataaagaggaatattgtgcttttgaaaagagtatactttttacttttatttatgtactagtagatgtaaaatttcacattgaaggtttatatatattggccaactcatatagaaattttatttataggaagctactactaaaaaaagtcactaactttgtgtacctataatccctaaattaaaattaaattttaattggctggctgtaatttgcattgagagaccttttactagtagctagtgttaggaagtgaacctaaaataagaaaatataatgatctgtgtttatcattagccttgtacaaatgtaaattactaatagtgatgttcttttgcaaggcatagaacatttgtatgaaaagacatttagtatgctttgaaaaaaactcagcttttagtttttttccattagaatactgcaaaacccatatatctttttaaaaaatttatgtactcacagtctttcccttgaagagaagattgaaaaagtctactgttcataaaccatgctaacattttccttttagctagttttgaaagtaaggaacaatacctgggaaataataaaacagaaggttaccattgtcagccagttggctatactgtggttagttctttcagaaattgtaaatatcttgtagcatattctgaaataatagagtaagttcttctcagagatgttaatatcatgtttttcatgttctaattagaatactttattacttacaaactcagaaatacgaacagaaatacagcagacgaacatatttattggtactgaaaagagatgtagtaaattaaatagaagaaatatatttataaagcttagtgaaacacaaaattagaatgttcatgtcaggcacaagggtttggattttgtgcaagctaatttggccacatttggcctggtgacagaactgttcataaggaagtaatatatagataaggtaggtagatatcagttgaatgccttatattgtatacattcctttcaaataaagaccttgagaaaacagcagagccaagtgaagatcacctaaagaactttgtggctaatttatacttcatgtagtagcagtgggtactgggcagggtctctttcccactctgatgatttgtgctcttatttttcctagatttacctcatctagggcatattcttttccctcttcctctttacctttcctggtcctgatccctctgtactcagttcccctaaattattggactacaaactaatatactagaaaagcatacacttattttatttgaatgcagaaatgctgtctatcagtatatatacataagaatgtatattacagtatatctatatatacttaacactgtaactttcagtattccccagttagcgtacctaactctcctgtgggttttgttaattcttattagactactagagaaaaaccaactggcagtttgctaagcatatctgctggtgttgtttctgcgccctcttttggctaattgatgtaattatactggctctaaagatttactgccccataagtaaatagtatagccacattctgaacatatcaaaagtacaaacttaggaggagtgtatgtacaaaaatgtaaaattttatgaaaatgaacatgtttttatgatgttatttctagttcataagaatgtgatgactgctttgcttcatttatgtacgttcccattatattcttgctgtcaatcaatcacaaatttatatcagattaggataaactaagccattttatgtattttattttaaaccttattttggcagagtaattccttagaattggaaaagctgttactttgaaattaccaatttattacaaaacatagaaatgtattgtagctacaaagacaaccaagcattttctgtgttttaatgaatatctaaaaaactacatttagtttattttactcagttttgaaatgatttttttactggctctattgccttaaaataactaagagattaatgattctttgtataattttccttttctttgttcttttttttacatttcgcagagttatatctatagttttagtaacaatttcttatgtattctggataactgaaaacaactaaaggtgttgggcgttagaaaataattgtgagcagtaagattactgatgtaatatgtatgttggactgaagtatttctttataaacattctatttgattttaagcaaaatgtatgttaaagcatgtttttacatcagtaaagtcatttgtcgaccttctggaaatgaaaggtttttacctagatactgtaagttacacctccttaacaatcatatttgtcattgttgttttctgcaaacaaaaatgtttatgggcttcatgtaggcttaagattgtaggcaaaaatggactgagttcaggacccttcaagcagtaggcattcagttacagagcagttggtactttgtaacccagacttacagtttaaaaatatcaagttagctgatgtttcattataataaaaatactattttgctt

SEQ ID NO: 1543 - DNA, 2484 bp, Homo sapiens
catgagccagcaagatgcggtcgctgcactttcagagcgccttctcgtagctgcgtacaaaggccaaacagagaatgtggttcagctcatcaacaagggcgccagggtagcggttaccaagcatggccggactcccctgcatcttgctgccaataagggccatcttcctgtggtccagatcttgctgaaggctggctgcgaccttgatgtccaggatgatggggaccagaccgccttgcaccgggccacagtggtggggaacacggagatcatcgcggcgctcatccacgaagggtgtgccctggacagacaagacaaggcggggaacacagctctgcacctggcctgccagaacagccactcccagagcacgcgcgtcctcctgctggccgggtcccgcgctgacctcaaaaataatgcaggagacacctgtttgcacgttgctgcgcgctataatcacttgtccatcattaggctcctcctcactgctttctgttctgtccatgaaaagaaccaggctggagacacagcacttcacgttgctgctgccctaaatcacaagaaggtggccaaaatcttactggaagccggagcagatacgaccattgttaacaatgtcttgcgcttcagtcgtgggcgaagcctgaggaaaaagagagagaggctcaaggaagagaggagagcccagtctgtgccaagagatgaggtggcccaaagcaagggcagtgtctcagcaggagacacccccagcagtgaacaggctgtggccagaaaagaagaagccagagaagagttcctgtcagcctccccagaacccagagcaaaggatgacaggaggagaaagtcaaggcccaaggtgtcagcgttttctgaccccaccccaccagccgaccaacagcctggacaccagaagaacctgcatgctcataatcaccctaaaaagaggaacaggcatcggtgttcatccccacccccaccccatgagttcagggcgtatcagctctacacattgtaccggggcaaggatgggaaagtgatgcaggcaccaataaatggttgtcgatgtgaacctctaatcaacaagctggagaatcagttggaggctactgtggaggagataaaagcagagctgggatcggttcaggacaaaatgaatacaaagctggggcagatggagaataagacccagcaccaaatgcgtgttttggacaagctgatggttgagcgactttctgcagagaggacggagtgcctgaaccgcctgcaacagcactcagacacagagaagcatgagggggagaaacgacagatatccttggtggatgaattaaaaacctggtgcatgttaaagattcagaatctggagcagaagctttctggagattctagggcctgcagagctaaatccacaccatctacttgtgtggaccaattagtggtgactgcaggtccagcagcagcttccgacagctcccctccagtggttaggcccaaagagaaggccctcaactccactgctacccagagactccagcaggagctgtcgtcttctgactgtacaggctcccgactgagaaacgtcaaggtccagacagccttgctacccatgaatgaggcagccagatctgatcagcaggctgggccctgcgtcaacagaggcactcaaactaagaagtctgggaagagtgggccaacaaggcatcgtgcccagcaacccgcagccagcagcacctgtgggcagccgccaccagccacaggcagcgagcagactggccctcacattcgggacacctcccaagctctggagcttacccagtatttttttgaggctgtttctacccagatggaaaagtggtatgaaaggaagattgaagaagcacgaagccaagccaatcagaaagcccagcaagataaggctacattgaaggaacacattaaaagtttagaagaggaacttgccaaactaaggactagggtgcagaaggaaaattagcaccaataaagaggaaatatgaaaggattcttgaagatttccagttttgcaactgcataatagctatgcccaaggagtcaactattgtatatattgcagatttgcctttttaaaaaaatcactaattctacaatgtgccagatacatgtttcctatgcccaggaagttatgaagacttcaacaattaaactgaaaccaggggaagcttgcttagttttgggtttcattataaactcttagcctcagtccaggttaatctgaagtttgaaagctcagattaagcaagccatgccaagaaactggacgatgtgtaagcctagactctaaaattcaagatgtgtgaaataatataagtcaaaagcaagaaaaacgtaatcccgtctgaactcaagtagaatataaatttgaacacacctgctgtgcctagacaagtgtctttctgtaagagctgtaactctgagatgtgctaaataaaccctctttctcaaatt

SEQ ID NO: 1544 - DNA, 1998 bp, Homo sapiens
atatagcagcgaaagggccttggagagagtgccaagcatggagctggggcgcttggagatcccggctgagctggccgtcatgctgaagacggcggaaagccatcgggacgccctggctgggagcatcaccgagtgcctgccgcctgaggttcctgcccggcccagcctgactctcccagcagacattgacctgttccctttctccagcttcgtcgccatcggctttcaggaaccgtccctgcccaggccagggcagccactggcgaagcccctaacccagctggatggagacaaccctcagcgtgccctggacatcaacaaagtgatgctgcggctcctgggggacggatccctggagtcctggcagaggcagatcatgggcgcatacctggtgcggcaggggcagtgctggccagggctgcggaatgagctctttagccagctggtggcccagctatggcagaacccagatgaacagcagagccagcgtggctgggccctcatggctgttttgctcagcgcctttcccccactgcctgtcctacagaagccactgctcaagttcgtgtctgaccaggcccccaggggcatggcagcgctgtgccagccaagagctggcccggagcagccaggagcacctccagcgcacagtcaaatatggggggcgccggcggatgcccccaccgggtgaaatgaaggctttcctgaaaggacaagcgattcgcctgcttcttattcacctgccggggggtgtggattataggacgaatatccagactttcacagtagcagcagaagtgcaggaggagctgtgccggcaaatgggtatcacggagcctcaggaagtgcaggaattcgccctcttcctcatcaaagagaagagccagctggtgcggcccctgcagcccgccgaatacctcaacagcgtggtagtggaccaggacgtgagcctgcacagccggcggctccactgggagaccccactgcacttcgataactccacctacatcagcacccactacagccaggtgctgtggggctaccttcaggggaagctgccagtcagcgccaaggcagacgcgcagctcgccaggctggccgccctgcagcacctcagcaaggccaacaggaataccccctcagggcaggacctgctagcttacgtgccaaagcagctgcaacggcaggtgaacacggcctccatcaagaacctgatgggtcaggagctgagacggctggaaggacacagcccccaggaagcacagatcagcttcattgaggccatgagccagctgcccctcttcggctacaccgtctatggggtgctgcgagtgagcatgcaggccctgtccggacccactctcctggggctcaaccgccagcatctcatcctcatggaccccagctcccagagcctgtactgccgcattgccctgaagagcctgcagcggctccacctgctaagccctctggaggagaaggggccccctggcctggaagtcaactatggctcagctgacaacccccagaccatctggtttgagctgccacaggcccaggagctgctatacaccactgtcttcctgatagacagcagtgcctcttgcactgagtggcccagcatcaactgagaggagtgcaggccggggagagaagaggatgaggcctcccccggcccaagtctcacccacatggtctgccttggatgctatcagatcactgttctagaacctgcctcagcacagcccagccggcccacatgcaggccatgaggcaggggctgctatcacgtcaccagcaggcaaagaaaacagccagaccctctccaggacggcctggggccaaagcgggctgcaggaactcggctggggcacctgaggttgcccagtctgagggagatgcccacccgaccccaggctccgcccaggccccacattagcacaagcccaggcatgggagaaacagctgctgaggaaataaaactccctggagaaaagg

SEQ ID NO: 1545 - DNA, 1938 bp, Homo sapiens
gtgtatgaacgatgttcactttgaaactgtttcagtgtagctgggcatggtggctcacacctataatcccagcactttgggaggctgaggcgggtggatcacctgaggtcaggagttcgagaccagcctggccaacatggcgaaaccctgtctctactaaaaatacaaaaaatagctgggcgtggtggcgcgcctgtaatcccagctactcaggaggctgaggcaggagaattgcttgaacctgggaggcggaggttgcagtgagccaagatgatgccattgcactccagcctaggcaagaaaagcaaaattacctctaaaaaaaaaaagtttcagtgaagtcaaggctgaaagccagaggagagccttcttgtcttcacccttgaatgaacacctctagaatactccagttctctggggttgcctggacctcggggtgcacaaagtacagccatgcgtctttttgatagggcgttgctcataggagtcctcagtcttcagttggcttattttagcagtggtgaatggcctggtgtttcccccgacctgaggtgggggagcatttgctcctgtgtttagcctcacagtgctgtggtgggaatgaggcgctgtgtgcaggagctactttcccgggagcctggcatttgtcatgtacttctaaggtcaggctccatgctccatctgtgtatacaggtattgccctggtaagaagcagaattgtcggcccggtgcggtggctcatgcctataatgccagcactttgggaggccaaggcgggtggaacacctgaggtcaggagttcgagaccagcctggccaacatagtgaaaccccatctctacggaaaatacaaaaattaagcgggcatggtgacacatgcctgtaatcccagctactcaggaggctgaggcagaagcatcactgcaacctccgcctcccaggtttaagcaattctgcttcagcctcccaagtagctgggattacaggcacccgccaccatgcctggctaatttttgttttttttttgttttttcgaaacggagttttcctcttgcccaggttggagtgcaatggtgcgatctcagctcaccacaacctctgcctcctgggttcgtgcaattctcctgcctcagcctcctgagtagctggaattacaggcatgcccctccatgcctggctaattttgtattttaagtagagacggggtttctccgtgttggtcgggctggtctcgaactcctgattttaggagatctgcctgccttggtctcccaaagtgctgggattgcaggtgtgagccgctgtgcctggcctaatttttgtatttgtagtagagacaggatttcatcatgttggccaggctgctctcaatctcctgacctcaaatgatctgcctgcccctggcgtcccagagtgctgggattacaggcacatgccaccacacctggctaatttttgtattttcagtagagagggggcttcaccatgttgaccaggctggtctccaactcctggcctcaggtgatcccacccaccttggcgtcccaaagtgctgggatttacaggcgtgagacaccatgcctggtcaaaagaaggtatttactttggagggttattgagaattagaaaatatgtataaaaagtaccttagcatggccaggcacggtggctcgcacctgtggtcccagcactttgggaggccaagatgggcatatcataaggtcaggagatcgagaccatcctgactaacacggtgaaaccccgtctctactaaaaatacacaaaaaattagccgggcgtggtcgcgggcacctgtggtcccggctactcgggaggctgaggcaggaggatggtgtgaacccaggaggcggagctttcagtgagctgagatcccgccattttactccagcctgggcaacagagcgagactccatctcag

SEQ ID NO: 1546 - DNA, 1550 bp, Homo sapiens
agccccgctgcgcgcttgcgctctacgcccaagggagccgggctgcagagctggagaaacttccgcggctacgggtgcagttgccttcggttcccggttccgggccgacacccgcgcagggctgagacaggtgtctgcgctccccgcaatgggctgctccagcagcgccctcaacaaggccggcgacagcagcaggttccccagcgtaacttcaaatgagcatttttcaactgcagaagaaagtgagtcctgctttgcccaaccaaagccacatgcactgggaagagaatctactgttgatggcaatgtacaaagggaaagccgtcctcccttacaaaagctcaaggtttcagcagagcctacagctaatggtgttaaacccctccaagaacagcccctggccaaggacgtagcccctggaagggatgccacagaccaatcagggtccacagaaaagactcagcctggagagggactggaggaatctgggccgcctcaaccaggtggcaaagaggatgccccagcagcagaaggaaagaagaaagatgcaggagcagggacagaggccgagtctctaaaaggaaatgctgaagctcagcctttaggaccagaagccaagggtcagcctttgcaggcagcagtagagaaggactctctcagagcagtggaggtcactgagaatccacaaactgctgcagagatgaagcctctaggaacaactgagaacgttctgactctgcaaatagctggagagctacaacctcagggcacagtgggaaaggatgagcaggccccgcttctagaaacaatttccaaagagaatgaatctccagaaatattggaaggaagtcagtttgtggaaacagctgaagagcagcaacttcaggcaacattgggaaaagaggagcagccccagcttctagaaagaattcccaaagagaatgtaacaccagaagtattggacagaagtcagcttgtggaaaagcctgttatgaatgatccattccataaaactcctgaaggtccaggaaacatggagcagattcaacctgaaggaatagttggaagcatggagcatccagcacgaaatgtagaggcaggagcatatgtggaaatgatcaggagcatccatactaatgaagaggaccaacgcattgaaggtgagacaggggaaaaggtggaaacagacatggagaatgagaaagtgagtgaaggggctgaaaccaaagaagaagaaacaggagaagtggtggacctttcagcagccacatagatagaagagtgaaccgacacagtgtgttatcatagaggagacaaaaatggtagtgaagcttgtggttatgtatcttatctttctacatttacatgttttctgtaaggagtgtggttatagagagactgttggaaccatgagaaggatgtttctgtgttcttgattatattgttctgcaaaactgctaagccatgaacagttttcttagctacttagaatggttatacatttaaaagtataaaaaccaaagccaataaaaatgatgtgattatttaag

SEQ ID NO: 1547 - DNA, 2158 bp, Homo sapiens
ctccccagctcacccacctcctctccggcccacctatcacccccccagctcacccacctctttgacaatgatggcacggtggtgttcgccatcttcatggctctctgggccacggtgttcctggagatctggaagcggcagcgcgcccgcgtggtcctgcactgggacctgtacgtgtgggacgaggaacaggtgaggtggagctggcagcgcagctgaggccgacccgagcaggggctgttggcgcccgatgccctgcacggcccacatatgcctgccgtgtctgaggaggaaatggcacttcagctcattaactgccccgactacaagctccggccataccagcactcctacctacgcagcaccgtcatcctcgtcctgaccctgctcatgatctgcctcatgatcggcatggcccacgtcctggtggtctaccgcgtcctggcctccgcgctcttcagcagctcggccgtgcccttcctggaggagcaggtgaccacggccgtggtggtgaccggggctctggtgcactatgtgaccatcgtcatcatgaccaagatcaacaggcgcgtggccctgaagctttgtgacttcgagatgcccaggaccttctcggagcgagagagcaggttcaccatccgcttcttcacactgcagttcttcacccatttctcgtctctcatctacatcgccttcatcctgggcaggatcaacggccaccccgggaagtccacgcgcctggcgggcttgtggaagctggaagagtgccacgccagcggctgcatgatggacctcttcgtgcagatggccatcatcatgggcctgaagcagacgctcagcaactgcgtcgagtacctggtcccgtgggtgacccacaagtgccgctctctgcgggcctccgagtccgggcacctgccccgggaccccgagctcagggactggcggcgcaactaccttctgaacccggtcaacaccttcagcctgttcgacgagttcatggagatgatgatccagtacggcttcaccaccatcttcgtggccgccttcccgctggcgccgctgctcgcgctcttcagcaacctcgtggagatccgcctggacgccatcaagatggtctggttgcagcggcgcctggtgccgcgcaaggccaaggacatcgggacctggctgcaggtgctggagaccatcggtgtgctggcggtcattgccaatgggatggtcattgccttcacatctgagttcatcccccgagtggtctacaagtaccgctatagcccatgcctgaaagaaggcaactctactgtcgactgcctcaagggctacgtcaaccacagcctgtccgtcttccacaccaaggacttccaggaccctgatgggattgagggctcagaaaacgtgactctgtgcagatacagggactaccgcaatccccccgattacaacttctccgagcagttctggttcctcctggccatccgcctggccttcgtcatcctctttgagcacgtggccttgtgcatcaagctcatcgccgcctggttcgtgcccgacatccctcagtcggtgaagaacaaggttctggaggtgaagtaccagaggctgcgtgagaagatgtggcatggaaggcagaggctgggtggggtgggggcaggctctcggcccccaatgcctgcccatcccaccccagcatccatcttcagtgccaggagcacagacgtgtagggccagagcccgtccagaggccaccaggagctgagacagtgccaccaccagcacctcccacaagcccaccgctgtgcgtgttgaggggtgctgtgagaaggctgtgcccatgtggggccgcaggaatcccctgtatgttcagggctgtgagctgccaccctattccgcctgctccgtctttgtgggggctctcaggcttggcacagccctgacttgaactctgggtgaccctgggcacccacagaactgggagtgagggctcctcaggcagccacaaggcaggaaaactggcgcaaatttcctgggcctccctctgacttctgggcgccagatcctgccgtgcccccatcctggctgttgggggtgtcctgagcccacctcgctggcctgttcccttcagccaacccgtttctgcagtaaaattaagcctgtctgt

SEQ ID NO: 1548 - DNA, 1173 bp, Homo sapiens
aaggagaaaacataaagcatcattacacaccgactgctgacctccctgaagtcctgctggccaagctgaatgccatgaatatcagtgagacgcgttataaggaatcctggagcaaacttcgagatggtggctataaactgaggttggatgcccctccattccaagcatcaaaggcttctggtgaaatcataagtgattacaaatacaaagaggcatttgagaaaatgaaaggacagatgcttggttcccggagcttggaagatgatatcagccttgcacattcagtgtatgcgacctcactgcagagtgatgtgaattacaagaaaggctttgaacactcaaaggcgcagttccatctgccgttggacatggccgccctggtgcatgccaagaaggctcagaccctggccagcaatcaggactacaaacatccactgccccagtacacttccttggcagaagacctgaggctgagctgtgccaagaaagctcacaaagaggctttcctgcgggaccgaggcctgcagatcgggtaccgcagtgtcgacgatgacccaaggatgaagcatttcctcaacgttggcaggctccagagtgacaatgagtacaagaaggactttgccaagagtcggtcccagtttcacagcagcacagaccagcccggcctccttcaggccaagaggagccagcagctggccagtgatgtgcactacaggcagcccctgccccagcccacctgcgacccggagcagctgggcctcaggcatgctcagaaggcccaccagctgcagagtgatgtcaagtataaatcagacttgaacctgaccagaggtgttggctggacccctcctggctcctacaaagtggaaatggctcggcgggctgcggaactggccaacgcaaggggcctgggtctccagggagcttaccggggggcagaagcagtggaggctggagatcatcagagtggggaggtgaacccagatgccactgagattctgcacgtcaaaaagaagaaggccctgctgttgtgagccatgtccaccctgattcctgagaggccagagaggaagtttgttcaccagagacaggcttcagatggctttgatttcggcaagctggaatggcccaccagcccatcccagatcttcctttattaaaataataactctg

SEQ ID NO: 1549 - DNA, 1204 bp, Homo sapiens
aaaaacatggcggcgcccagcgcgcgaggacgtgatccgcttctgctccggcttggattgtagccttgacgaggtctgagcgaccatggaccggccggggttcgtggcagcgctggtggctggtggggtagcaggtgtttctgttgacttgatattatttcctctggataccattaaaaccaggctgcagagtccccaaggatttaataaggctggtggttttcatggaatatatgctggcgttccttctgctgctattggatcctttcctaatgctgctgcattttttatcacctatgaatatgtgaagtggtttttgcatgctgattcatcttcatatttgacacctatgaaacatatgttggctgcctctgctggagaggtggttgcctgcctgattcgagttccatctgaagtggttaagcagagggcacaggtatctgcttctacaagaacatttcagattttctctaacatcttatatgaagagggtatccaagggttgtatcgaggctataaaagcacagttttaagagagattcctttttctttggtccagtttcccttatgggagtccttaaaagccctctggtcctggaggcaggatcatgtggtggattcttggcagtcagcagtctgtggagcttttgcaggtggatttgccgctgcagtcaccacccctctagacgtggcaaagacaagaattatgctggcaaaggctggctccagcactgctgatgggaatgtgctctctgtcctgcatggggtctggcggtcacaggggctggcaggattatttgcaggtgtcttccctcgaatggcagccatcagtctgggaggtttcatctttctgggggcttatgaccgaacgcacagcttgctgttggaagttggcagaaagagtccttgaagcagagacaagcctcacctccacttctgtcaagagaggggcctgcagtgcaaaccctcttccgctgagcagctgtctgaactataggccccagtgctgaagaccagttgtgctaagataccggcatggagattgtgccatccgtggtataggctggctggtatgaagtcattggcctgtatgccagagagctaagagaagaaaacggggtctgtggcggtactctgaacaatttcctcagaacctcttaataaataagtttggtaatgctgaggccaggccttttagagcttt

SEQ ID NO: 1550 - DNA, 1161 bp, Homo sapiens
aaccgtctccgctgcggagagtcatgagctgtctggatgttatgtaccaagtctatggtcctccgcagccctacttcgcagccgcctacaccccctaccaccagaaactagcctattattccaaaatgcaggaagcgcaggagtgcaatgccagccccagcagcagtggcagcggcagctcctcattttccagccaaaccccagccagtataaaagaggaagaaggcagcccagagaaagagcgcccaccagaggcagagtacatcaactcccgctgcgtcctcttcacttatttccagggggacatcagctccgtggtggatgaacatttcagcagggccctgagccaacccagcagctactctcctagctgtaccagcagcaaagcaccaaggagctctgggccctggcgagactgctccttcccgatgagccagcgcagcttccccgcctccttctggaatagcgcgtaccaggcgccagtgcccccgccgctgggcagccctctggccaccgcgcactcggagctgcccttcgccgccgccgacccctactcgcccgccgcgctgcatggccacctgcaccagggcgccacggagccctggcaccacgcgcacccgcaccacgcgcacccgcatcacccctacgccctgggcggcgccctcggcgcccaggccgccccctacccgcgccccgccgccgtgcacgaagtctacgcgccgcacttcgacccgcgctatgggccgctgctgatgccagccgcctcggggcgcccggcccgcctcgcaaccgccccggcgcccgcgcccggcagtcctccctgcgagctctccggcaaaggcgagccggcgggcgccgcgtgggccgggcccgggggacccttcgcgagcccctcgggggacgtggcccagggtctgggcctcagcgtggactcagctcgtcgttattccctctgtggtgcatccctcctgagctgatctgctgacccagggtttccccttccccttcccttctgaccagccttggaggctcagcatctgtgcctctcactccgtggatgaggacatgggggaaggcagagacttcagacttctcagtgtgttgggaaaaccaaaaaccacaactacagaaattcatctaaataaaagttctatgatctgc

SEQ ID NO: 1551 - DNA, 1835 bp, Homo sapiens
gtgcgcgtgtgtctgtttggagcggaggagaggcttgggtgacaggcgaggggtggggggaagagttcagcctgagtcacagtctcattcactgatttctcttcggctggacggaggctgcctcctcacgcggctcccaactattcccgtagctcagtgcccccctcccgccgctctactcagccaggcagacagactgacagactcgctagtcggcagcttcactcccgagggtgccgcgagcccaggcggcgaacacccggtacccctggcgcagcgaggtgggatgctgtacggacagcagcgctaagtgcccccccacccccggcgcagggtgcactcgctcctggccgcgggcccagcggcggcggcggcggcggcggcggaggggatgagcccgggacgcgcgaggcgcctgcctcaagctaccgcccggagagggacgccgagtagggctcatcgcagtaccgcgcggacccctgccccctgtggcacgcggctgcggagccttgaagccgtgtctgtgatcaggatgcactgggcgcctcgcagctggtgaggatgccctgctgcgcggccctgcgcccccagccccagtcccaggtgggcaagactgactgggcccggcttcggcccctcgtgccggtggatgaaacgtgccggagtgcttgggtgccatcagctatcaaatctgaattctaagcgccatggacgaaggcactggactgcagcccggggcgggagagcagctggaggcgctggccactgcagaagctgtccaagagaggtgcgagccggagaccctcaggtctaagagtttaccggtcctcagcagcgcctcctgccggccaagcctcagtcccactagtggagacgccaacccggcctttggctgtgtggattcttcgggccaccaggagttgaagcaaggcccgaacccgttggcccccagtccctctgccccgtccacttcggcggggctcggggactgtaaccacagggtggacctcagcaaaaccttctcggtgtcctccgccttggccatgctccaggagagaaggtgcctctacgtggtcctcacggattcccgttgcttcctggtgtgcatgtgctttctgaccttcatccaggcgttaatggtctctgggtacctgagcagcgtaattaccaccattgaaaggcgctacagtctgaagagttccgagtcggggctgctggtcagctgctttgacatcgggaacctggtggtggtggtgttcgtcagctacttcggcggccggggtcggcggcccctgtggctggccgtgggtggactcctcatcgccttcggggcagccctcttcgccttacctcacttcatctcgcccccctaccagatccaagagttgaacgcctcggcccccaacgacggtctgtgtcagggtggcaactccaccgccactttggagcctccggcctgtccgaaggactcgggaggaaataatcactgggtctacgtggctttattcatttgcgcgcagattctcattggaatgggctccacacctatttataccctgggaccaacctacttagatgacaatgtcaagaaagaaaactcctccttgtacctagccatcatgtatgtcatgggagcacttggccctgcagtgggatatttattaggtggacttcttattggtttttatgttgatcccagaaatcctgttcaccttgaccagaatgaccctcgtttcattggaaactggtggagtggattcctcctttgtgccattgcaatgtttcttgtgatattcccaatgtttactttcccaaaaaagcttccacctcgacac

SEQ ID NO: 1552 - DNA, 1679 bp, Homo sapiens
gattaaagtccttaaatggacacaatagacattatcccaaagagaagaaagcagggcacggtatgtttggtaccttccaaggtagtttgccttaaaacgttagcagttgcaactgcttactcaatcacttttttccatgtagtttatgcagcacaacctccccttcagttgctcaaatcctccatttctgtctccataaattatattctcaggttattcaggctcttctttttattaacttgtatgcagggagtacctatcatatgtgatgtactcctctattttcatactttctcatctgtaaaaacttcctttttttctttaaacttcctcactgttctcttctgtcaaatccttcaaggcctgcccttggtaattcctctgccaaagtctttctgttccccatagaggagataaatgtttctttatgcacttagtgtactttggagggacctctgttctagaaaattaacataattattcattacagtgaattccacaaatagagaaaaagagtaagaagataaagtccattcccttctttggggaactggggaaggactgataagcaaacaaagaattaacagagtgatacagtaaaataaaatacagagattatattttcatgtttttcccatgttcactcttttcctctcagtagtttggaaactttgtgaaagtggagatgcagtgcattttacatggttcattgcatctagcatttttttttttttttttgagatagagtcccactcttgcccaggctggagcgcaagtggcgcgatctcggctcactgcaacttccgcctcccggtttcaagcagttctccagcatcagcctcccgagtagctgggactacaggcacgtgctaccacgcccggctaattttttgtatttttagtagagatggggtttcaccatgttagccaggatggtctccatctcctgacctcgtgatcagcccacctcagcctcccaaagtgctgggattacaggcgtgagccaccgcacccagcccatctagcataatgttttgcatagttgtcagcagataaatattgaatgacaaaactcagatggaggaaaaagaacaaaataacctagttctcagaaagatttaatgagcaaatgggaaaatgtcaaaaagatttgcaaagccattcctaaataactatttccccttttagtcattagaaaacgtctaaacactttcaacatttaatctttcacttgcattttaacagagcactacttaattttgggttaccttttatatactttgtacattttaaggtgattatactggagatagaagggggttagactctagatgtgtgttgtccaatacagtaacttttagccaccagtggctattgagcacttgaaatgtggctagtctgaattgagatctataaatataaaattcacactggattttgaagactcagtatagaaagaaaaatgttaaaatatctcaatttttttcatattgattgcatgttgaaatatttttgacattgtgttaaaatatattgaaaaattaattatcctcattttgccattgtttaatgtggctactagtaaatctaaaattacataggacagcatgtctcgacttcctgaggaatatctgaaagcatataaaatatctgtaaaaattaaacatgttaatactttc

SEQ ID NO: 1553 - DNA, 1992 bp, Homo sapiens
attttcacttggaggaaagagagaaggaaggaagctgaggacttagcagggtatcactggacaggccatggctccacgttcccggcgacgaaggcacaagaaacctccctcatcagtggctcccatcatcatggccccaaccacaattgtgacccctgtgcctctgaccccctcaaaacctggccctagcattgacacacttggcttcttctccttggatgataatgttcctggcctatcgcagctgatccttcaaaagctgaacatgaaaagctatgaagaatataagttggtggtagatgggggtacccccgtatcaggctttggatttcgatgtcctcaagaaatgttccagaggatggaagacacatttcgattctgtgctcactgtagagcactccctagtgggctttcagactccaaggttctccggcactgtaagaggtgcagaaatgtctattactgtggtccagagtgccagaagtcagactggcccgcacacaggagggtttgtcaagagcttcgtcttgtggctgtggaccgtctcatggaatggcttctggtcacagagcacctcaacttcacccctggaacctggcacaattcagcttagtgcccacaggggcctctaccatgacttctgggaggagcaagtagagaccgggcagacacaccatccagatttggtggcggcattccatccaggttttcattcctccccagacttgatggaggcttggctgcccaccctgctgctacttcgtgactataagattcctacattgattactgtttacagccatcaggagttggtatcctctttgcagattctggtggaactggatacacacatcactgcctttgggtctaatcctttcatgtccctcaaacctgaacaggtctattccagtcccaacaagcagccagtatactgcagtgcatactatatcatgtttcttggaagctcctgtcagctggataataggcaattagaagagaaagtggacggcgggatttaaatagatcataactggacatctggaaaacggggagtttgtgatgaaattaccctgctaatgccaggttcttgcaaactttgaaaaacattatattctaaacctcatttactgtttgggtaaaaattctaagctgaatgagagtttctgtataacataactggtttctttctttttttgagatggagtcttgctctgttgcccaggctggagtgcagcggcatgatctcgactcactgcagcctccgcctcctgggttcaagtggttctcctgcctcagcctccctagtagctgggattacaggtgcacaccaccacacctggctaatttttgtatttttagcagacagggtttcaccatgttggccaggctcgtatcaaacccttgaccccaggtgatctgcctgcctcagcctcccaaagttctgggattacaggcatgagccaccatgcccagccaatgtaactggtttctaagagtttagccacagtagcttctagagataggaaattagatttagtgggtgggaagaggccctgatgctggtctttccagagcttatagttgctaacacttttctttgtaaagaagtttaccttttgactggaaccagatggcactgagaaaaagaatgagaaccaccttattcttctgaaaaagactttcttctcatccagtaatttgggctaaaaaatggaaagatgttgatgacttgaagtgatgcaagaatggacaagtcagggaagtcattgggaacatggatgaggttgtaagcattggtacagtgtcctgtttcctgactttttttgagagaaatgtctacttttcctgttttctcttggggacttttgaccctagagtagccctggtgttatattttagatatcccaagctatatcagactttacctgaatatactggagttacttattatcccccattctataccccaataaactcggtttggggcttctt

SEQ ID NO: 1554 - DNA, 1406 bp, Homo sapiens
tgactttgtgaaggagcgagggaaactcatagggccccagagtgtaagagacgacccccggatccagcactgccggcgcatgggccagctgcagagcgagcttcagtacaggaggggggcgaccagcagccaagcccagttccatctgcccatggacatggtgcacctggtccatgccaagaatgcccaggctctggccagcgaccacgactacaggacacagtatcacaagttcacagcactgcccgaggacctgaagatggcctgggccaagaaagcccatgccctgcagagtgagttgcgctacaagtcagacctgatcggcatgaagggcataggatggctggcgctgagatccccacagatggagagtgcaaagaaggctggagaactcatcagcgagaccaagtaccgtaaaaaaccagacagtatcaagttcaccacagtggttgactccccagacctggttcatgccaagaacagctatatgcactgcaatgagcgcatgtatagatctggagatgcagaatccctgcacagatacaccctgatccccgaccatcccgatttcacccgagctcgcctcaatgcgctgcatctgagtgacaaagtctacagaaactcctgggagcagacccgggctggcagttatgacttcaggctggatgccatccccttccagactgcccgggcatctagggagatcgccagtgatttccggtacaaagaggctttcctgcgggaccgaggcctgcagatcgggtaccgcagtgtcgacgatgacccaaggatgaagcatttcctcaacgttggcaggctccagagtgacaatgagtacaagaaggactttgccaagagtcggtcccagtttcacagcagcacagaccagcccggcctccttcaggccaagaggagccagcagctggccagtgatgtgcactacaggcagcccctgccccagcccacctgcgacccggagcagctgggcctcaggcatgctcagaaggcccaccagctgcagagtgatgtcaagtataaatcagacttgaacctgaccagaggtgttggctggacccctcctggctcctacaaagtggaaatggctcggcgggctgcggaactggccaacgcaaggggcctgggtctccagggagcttaccagcggggggcagaagcagtggaggctggagatcatcagagtggggaggtgaacccagatgccactgagattctgcacgtcaaaaagaagaaggccctgctgttgtgagccatgtccaccctgattcctgagaggccagagaggaagtttgttcaccagagacaggcttcagatggctttgatttcggcaagctggaatggcccaccagcccatcccagatcttcctttattaaaataataactctg

SEQ ID NO: 1555 - DNA, 1443 bp, Homo sapiens
cgacaggagccctcaagctgatctggtcgggaccggatacattattaaccccagtgcagtagggtccccaggggcaacctgccccacagcgcccaagatgcctagcagaactgcccgctatgcccgctacagcccacggcagcggcggcggcggatgctggctgatcgcagcgtgcgtttccctaatgatgtcctgttcttggaccacatccggcagggtgacctggagcaggtggggcgcttcatccggactcggaaagtctccctggccaccatccacccctcaggcctggccgccttgcatgaagccgtgctctctggaaacctggaatgcgtgaagctgctggtcaaatacggggctgacattcaccagcgagatgaggcgggctggacacccctgcacattgcctgcagcgatgggtaccctgacatagccaggtgagggggccctgggtctacacaggcttgaacccgacccctccgggcctcagtgggtccccaggatgggagccccaaaatgtagcccgggtggtgtcggcaagaaccctagaggctgggggcggtggctcacgcctgcgcctgtaatcccagcactttgggaggccgaggtgggcggatcacctgaggtcaggagttcgtgacaagaaccctctcactactaaaaatacaaaattagccacgcgtggtggcgcgcgcctgtaatcccagctactcaaggctgaggcaggagaatcacttgaacccgggaagtggaggttgccgtgagtcgagatcatgccattgcactccagcctgggtgataagagcgaaattctgtctcaaaaaacaaaaaaaacaaaaaaagaaccctgcaaaccctagaggcttctggaatcctgtttctgcctttgtcctcaatagaaccaacttgaaaagctggccacagcttccaaagggtcaggtttcttcctcctcaccctacccggaccttaggaccccaaggtgggggacacacaggtgaccccaggactctggccctctgacctgggttggggcgagcactctcctggctcctccccgcttcagccagagcgacctttacaccccaggtaccttatctccctgggagcggacagggatgcaaccaacgacgatggcgacctgccctccgacctcatcgacccggactacaaggagctggtggagctcttcaaagggaccacgatggactgagccagctctgcccgcccgcccccgcgcccagggccgcctccctggagaagccgcgcgtcgcccatgggccagcacgtgccccacccgtgggccaggggcggccggacccgtccctccacgaccccgccacccctcctaggcctggctttgtccccaggtgaattttttactgtgacactttttactttttcaataaacgtgactcccaggtgagggggcctgggtctacac

SEQ ID NO: 1556 - DNA, 1371 bp, Homo sapiens
gtttttccaatctgtccgcggctgccgccacccaagacagagccagaatgttcaggatgctgaacagcagttttgaggatgaccccttcttctcagaccatgcaagcaagaagagaatggcatgaaatatataaagtgttgagaggaaaaaaacccactgacctagaattctgtatcctgcaaaattatcctttaaaagtcaagaagaaatagactgtctcagacaaacaaaatttggtgaatttgttgacagtagacctgccttgcgagaaatgttaaaagaagttcttcagagagaaggaaaatcatacaagtcagaaactctgatgtacattaaaaaagcaagagcatcagagaataagttaagtgagtccattcttgcacaccgagaaaatatgcgacagatgataagaagtttttctgaaccctttggaagagacttgctcagtatctctgatggtagagggagagctcataatcgtagaggacataatgatggtgaagattctttgactgcaacgagttgttctcttgtgccttttggcgattttggtggtatgcatacagatgtcagctctttccagacaatggaccaaatggtgtcaaatatgagaaactatatgcagaaattagaaagaaacttcggtcaactttcagtggatccaaatggacattcattttgttcttcctcagttatgacttattccaaaataggagatgaaccgccaaaggtttttcaggcctcaactcaaactcgtcgagctccaggaggaataaaggaaaccaggaaagcaatgagagattctgacagtggactagaaaaaatggctattggtcatcatatccatgaccgagctcatgtcattaaaaagtcaaagaacaagaagactggagatgaagaggtcaaccaggagttcatcaatatgaatgaaagtgatgctcatgcttttgatgaggagtggcaaagtgaggttttgaagtacaaaccaggacgacacaatctaggaaacactagaatgagaagtgttggccatgagaatcctggctcccgagaacttaaaagaagggagaaacctcaacaaagtccagccattgaacatggaaggagatcaaatgttttgggggacaaactccacatcaaaggctcatctgtgaaaagcaacaaaaaataaatagccatgcatttgatttgtttagttttgattgttttaacagttagtaatggtgctgggtaataagcataagaccaatctcttgctgttaaatcagttctgtccttggcaactttcttctgatatctgaatgttcatgaaggtcctagctttatattgtccctcttttaggaataaaattttgattttcaacaatgtg

SEQ ID NO: 1557 - DNA, 1343 bp, Homo sapiens
gtgctttgcggccgccctgccgcgcgcacatgtaggcgttccgagcggcggcggagattgtccgcagtgactacactcatggcaggtcccctgtggcggaccgcagcatttgtgcagagacacaggacaggcctcttggtgggttcctgtgcaggcctgtttggagttccagtctcgtaccacctcttcccggatcccgtggtccaatggctctaccagtactggcctcagggccagccagctccgctccctccacagctgcagagcctcttccaagaggtgctacaggacataggtgttccttcaggccattgctacaagcccttcaccaccttcaccttccagcctgtgagtgcaggcttcccaagactccctgctggggctgtggtgggcatccctgccagtttcttgggagacctagtgatcaacactaaccatcccgtggtcatacatgggcatacagtggactggcggagcccagcaggcgcccggctgagagcttccctgaccttgtcccgtgaagcccagaagttcgccttggccagggaagtggtgtacctggaaagcagtaccactgccgtgcacgccctgctggccccagcttgcctggcagggacctgggcactgggcgtgggtgccaagtacaccctggggctccatgcaggccccatgaatttacgggctgccttcagcttggcggcagcagtggcaggctttgtggcctacgccttctcccaggattctctcactcatgccgtggagtcctggctggaccgccgcacggcctccctctctgcagcctatgcctgtggtggagtggagttctatgagaagcttctgtcgggcaacctggccctgcgcagtctcttgggcaaagagggggagaagctgtatacacccagcgggaacatcgtccccagacacttgttccgaatcaaacatttaccctacaccacccgccgggactctgtgctgcagatgtggagggggatgctcaatccgggccgctcctgatgggctcatcacaaggacacttccagcttgtgcagacaccaccctgccattgagtctggagggccctgttggagcctttggacctatagctcaaggccagaaaaatcactggctttggaattaaatagcttagattgtactataaccactacttatgaactcagggactatgagggactattcaggggctatgaatctgagcctttgtttcttgaactgtaaagtggagatgatgtaaaccgccttgcaagattgtagagttgggtaaggtcatgaacataagggcctggcacaaagggtgcactgtaaataaacagacatccctcctt

SEQ ID NO: 1558 - DNA, 2225 bp, Homo sapiens
aactattcatgggcactcacagcaaggcaaccccatcttgtaggagggcatctgtccccagggcagggatcaggagagctgtttccagaggcttccagggtaacttggagcaaatcacttacctttcttggactcagtccctggaagaagaggccattccagaccgcttcctcccacgaactcattcattgtgtcagcaaacgtagactggggttctgctgagggaggccgatacaacccaccactgcccacggctgtgcacggccttgctgtgggaacaggcctgtaactgcggcacaacctgcgatctggacaaagggcagaggaagctgagactctttcccctggggtgggggcttgaggggcttgggaggactctgcagaagaggtgacatttcaacagggccttgaaagccaaatagtccgctcccatgtaccagtacctggataggaaactgttcaaggaagcctaccagattgcttgcttgggtgtcacagacactgattggcgtgaactggccatggaagcgctagaaggtttagattttgaaacagcaaagaaggccttcatcagagtacaagacctccgatatttagagctcatcagcagcattgaggatttccttggatctggagaccccaaagaaacaaagatgctaatcaccaaacaggctgactgggccagaaatatcaaggagcccaaagccgccgtggagatgtacatctcagcaggagagcacgtcaaggccatcgagatctgtggtgaccatggctgggttgacatgttgatcgacatcgcccgcaaactggacaaggctgagcgcgagcccctgctgctgtgcgctacctacctcaagaagctggacagccctggctatgctgctgagacctacctgaagatgggtgacctcaagtccctggtgcagctgcacgtggagacccagcgctgggatgagacctttgctttgggtgagaagcatcctgagtttaaggatgacatctacatgccgtatgctcagtggctagcagagaacgatcgctttgaggaagcccagaaagcgttccacaaggctgggcgacagagagaagcggtccaggtgctggagcagctcacaaacaatgccgtggcggagagcaggtttaatgatgctgcctattattactggatgctgtccatgcagtgcctcgatatagctcaagatcctgcccagaaggacacaatgcttggcaagttctaccacttccagcgtttggcagagctgtaccatggttaccatgccatccatcgccacacggaagatccgttcagtgtccatcgtcctgaaactcttttcaacatctccaggttcctgctgcacagcctgcccaaggacaccccctcgggcatctctaaagtgaaaatactcttcaccttggccaagcagagcaaggccctcggtgcctacaggctggcccggcacgcctatgacaagctgcgtggcctgtacatccctgccagattccaaaagtccattgagctgggtaccctgaccatccgcgccaagcccttccacgacagtgaggagttggtgcccttgtgctaccgctgctccaccaacaacccgctgctcaacaacctgggcaacgtctgcatcaactgccgccagcccttcatcttctccgcctcttcctacgacgtgctacacctggttgagttctacctggaggaagggatcactgatgaagaagccatctccctcatcgacctggaggtgctgagacccaagcgggatgacagacagctagagattgcaaacaacagctcccagattctgcggctagtggagaccaaggactccatcggagatgaggacccgttcacagctaagctgagctttgagcaaggtggctcagagttcgtgccagtggtggtgagccggctggtgctgcgctccatgagccgccgggatgtcctcatcaagcgatggcccccacccctgaggtggcaatacttccgctcactgctgcctgacgcctccattaccatgtgcccctcctgcttccagatgttccattctgaggactatgagttgctggtgcttcagcatggctgctgcccctactgccgcaggtgcaaggatgaccctggcccatgaccagcatcctggggacggcctgcaccctctgcccgccttggggtctgctgggctgtgaaggagaataaagagttaaactgtcagaatgtg

SEQ ID NO: 1559 - DNA, 1302 bp, Homo sapiens
aatcatttggagccacactgaaaaaaaaatttccccctgcaatctactcttaactgatagtcgctaactttggttatgtgtgtctattcagaatattacattaattgatttctcaaacaaaggtcctttctgaaatggtatctatgattcagctattcaaaacctaatgaagttggtgactatgacaatgtggagaaatcatgacagaaaatgtggtttgtactggggctgtcaatgctgtaaaggaagtttgggaaaaaagaataaagaaactcaatgaagacctgaagcgagagaaggaatttcaacacaagctagtgcggatctgggaagaacgagtaagcttaaccaagctaagagaaaaggtcaccagggaagatggaagagtcattttgaagatagaaaaagaggaatggaagaccctcccttcttctctgctaaaactgaatcaactacaggaatggcaacttcatagaactggtttgctgaaaattcctgaattcattggaagattccagaacctcattgtgttagatttatctcgaaacacaatttcagagataccaccagggattggactgcttactagacttcaggaactgattctcagctacaacaaaatcaagactgtccccaaggaactaagtaattgtgccagcttggagaaactagaactggctgttaacagagatatatgtgatcttccacaagagctcagcaatctgctaaaacttactcaccttgatctgagtatgaacgattttactacaatccctcttgctgtgttgaacatgcctgcccttgagtggctggacatgggaagcaacaaacttgaacaacttcctgatactatagaaagaatgcaaaatctacatacgttatggctgcaacgaaatgaaataacatgcttgcctcaaacaatcagcaatatgaaaaatctgggtactcttgttctcagcaacaataaactgcaagatattccagtatgcatggaagaaatggcaaatctgaggtttgtcaacttcagagacaacccactgaaattgaaagtatcacttcctcccagtgaaggcacagatgaagaagaggaacgggaattatttggccttcagtttatgcacacatacatacaagagtcacggagaagagcagatcaccaagtcaacggttcaactactttaccaatctccataaatacggatggataatataattcaagatgcccttctaaagaggattactttggtgaattctctaatgtttggatttctgaagtaaaaagaaaagctattaccaaagttt

SEQ ID NO: 1560 - DNA, 1691 bp, Homo sapiens
agtccaataaaaacctcatcagttaccaactaaatcagggcatggtgtttttttgttgttttctttttaaagcatagttttagtaatatatttactaaaaaccttagacattatgaaaaaagtcaggatttggaatcttacactgcttggctaaattgacacaatatagaccaacagtttcatcctggggcttatgggtctcataggagcacccgtatgctgaagaaaggcaaagagagaactacagaatttgtagaaaagttttgttgtagttgcttctgaacaattagtttttgtttgttttgttttgttttgtttttctggtaacctagcagtcaaagctcacatttttggacaatgactcattcttcccaggacactggttcttgtggcattcaggaagatggaaagctttatgtggtggattccataaatgacttaaacaaactaaacctctgtccagccggatcgcagcatctgttccctctagaggacaaaatcccagtccttggcacaaactcaggaaatggaagccggagtctgttttttgtggggctgctaattgtgctgattgtcagcctggcactggtttttttcgtgatatttctaatagttcaaactggaaacaagatggatgatgtgtcaagaagactaacagctgaaggaaaagacatagatgatcttaagagaatcaataacatgatcgtaaagcgactcaaccaactcaaccaactggactctgaacaaaactaaaggactgattttctgaaagcacctgctaacaccttgagctttttactttcctgggagtgtacagggttaggaactgagaaagtgcacttcctcaggcaacagatgatctggtcaggcaacccacccctggggcccactttctgcagcaagatgggagcaattccaaggcaagtgggtatgggaatagcaactaaaaaggggtgaacttgtctcagcccccttttatggtagggcacttcaactttaatggggtgggcggctagcagggaggagaatcaacaaagcaagagaacttgactatgtacgtccaacttcttacagaaggagctttgctaccagaacaagttcactgtgtcaatgaagttcatgacacctcatgcacctttacagatatctgggaaagcctgagaaattcattgagttttatgtattgaagggaaccaggtgattactcttttcaataagagggattctgctcaggtgattagactttgactctatttccccagggacagtgatgggtgggccccagagctagttgctgtctggtgtttgctggtgaaaacatgagcagtagttatgtggggctgagagtcaaaagggaaagcctaattaattcaactaatgtttattaagctcctactctgtgcaaatcactctactcaagaggagctcacataagagtgcaggataaagaaaggagatggacagttatatgtaattatataaactttgtgtattttgtttctcatgaaaaaacccctttggcaccctgctgattgatttggaagaaatctgatagatttgtggcctttcctaaattgcactaggaaattatgtagttagaatatttggaacctgcattagttccagcaatgaaagtaagacacacagcatatgacataagacacagtgtgaaataaatgagtttaaaaagc

SEQ ID NO: 1561 - DNA, 1239 bp, Homo sapiens
atgtcatcttttcaccaatggatttgcttaaaatttctcacacaaagctacatttactggaggatctttctataaaaaataaacagaggatgtcaaacttggcacaatttgactctgatttttaccaatctaattttactattgataaccaggagcagagtggtgatgactctaatacctatggaaatctttatggatctagaaaacaacaagctggtgagcagcctcagcctgcctcctttgttccatcagagatgctcatgtcatcgggttacgcaggacaattttttcagccagcatccaactcagattattattcacaatctccttacattgacagttttgatgaagagcctcctttgctagaagaacttggaatccattttgatcacatatggcaaaaaactttgacagtgttaaacccaatggagccagtagatggcagcattatgaatgaaacggacctcactggacccattcttttttgcgtagccctgggagccaccttgcttctggtaatgtgtcacaggaagcaccagattttaatgcttgtcctttccagtgctggctttgaagcaatctgtataaatataagagaaactgtgtcaccttacatagtgaattttttaagtgagagagaataatttaaccatagtgacaaaaatatgctaccattatgcattgcaacagctaaaaagtataaatttaaatagaatttcaaaaatcaagaagcagatcaaagcaggagatcatttatgtcttttttgttattaagaaaagactgtaaatctggaataatggaaggaaaacatagatttgggagatataaggcctacattttattttttgttattttgtgagagttctattgtgacactgaagaagtcacttctctttggtcaccatcttctttgctgtgatatatctccagactatttctaacatcttatgaggtacaagacagatctccttgttttgggttaggctgctatgaaaaattaatttgcaatgacaacctatgttttgtttactcaacctacatatttcctctaaaatgttagttttccaccttttatgaagacatttgttccctgacttcactatatgtcttatgtatgctttcattctttatatctggaagtaatgatattaagggtcactagaaaagtaaagaaaaatgtacttccacctaagtaaagtttaaaagacattctagctcatagtttaggaaaatgtttc

SEQ ID NO: 1562 - DNA, 1269 bp, Homo sapiens
aaaaattgttaacagtgggaaacgagagccccagctgctccaggttggggccgtgggggctccctaaggaggggacaccagggccccaatgtttcacagaggggcggggggcagcgaccctgggcagcatggcctcaggctgaagcccgatctggcatttccttgtgctcataatgagaatagttctccaattagccaagatgaacctcatggacatcaccaagatcttctccctcctgcagcccgacaaggaggaggaggacactgacacagaggagaagcaggctctcaatcaagcagtgtatgacaacgactcctatactttggaccagcttttgcgccaggagcgttacaaacgtttcatcaacagcaggagtggctggggtgttcctgggacacccttgcgcttggctgcttcttatggccacttgagctgtttgcaagtcctcttagcccatggtgctgatgttgacagcttggatgtcaaggcacagacgccacttttcactgctgtcagtcatggccatctggactgtgtacgtgtgcttttggaagctggtgcctctcctggtggtagcatctacaacaactgttctcccgtgctcacagctgcccgtgatggtgctgttgctatcctgcaggagcccctagaccatggtgcagaggccaacgtcaaagctaaactaccagtctgggcatcaaacatagcttcatgttctggccccctctatttggccgcagtctacgggcacctggactgtttccgcctgcttttgctccacggggcagaccctgactacaactgcactgaccagggcctattggctcgtgtcccaagaccccgcaccctccttgaaatctgcctccatcataattgtgagccagagtatatccagctgttaatcgattttggtgctaatatctaccttccatctctctcccttgacctgacctcacaagatgataaaggcattgcattgctgctacaggcccgagccactccacggtcacttctatcacaggtccgtttagtcgtccgcagagccttgtgccaggctggccagccacaagccatcaaccagctggatattcctcccatgttgattagctacctaaaacaccaactgtaatcttgcagtctccccaggaacttatgatgcctccgaaaaccacctggggactcacgtagctggagagcattacagcctcatccacttacctggagctgctctcctgtattatcctccacaataaaattctccagaaaat

SEQ ID NO: 1563 - DNA, 1503 bp, Homo sapiens
cagatgctctgtgtcaccggcttagtaacataccccatttaggagcatgagcacaacttgtttgcagtgggaatgaattaactgaattctagatattgttttttggctgcctttttttgtttgtttttatttcaaacacagctaactaatcagggctgtggacaccaagaatgccaactttgattcttcaaggaaaatcagcagctgaccacacaccacccttcctggtcctccccaagatgccaagaacatccaaagtctgcagttttgaggaaactgaagctgatctgacaccacttcctttttctccagatgttacccttcggatgcatacctcaatctgcctgaaaatcatggaattctggagatggaagggacctcagagattttctggttctctctgttctggttgtaagtgttcttaccacacaccactcccaaccatggggagcctttccaccactgaagagagctggggttactaaagccacaatcagcttctctgcaacttctaaccatttggctaagatcagtttttctgaaaccacaaagaaaaaaaatctacgaacaagtactagcgtaccaatgttcacagtagcattattcacaagtcataaggtggaagcaacccaaatgtccatcaacagatgaataggtaaacaacatgcggaatatacatccaatggaatcctcttcagcctcaacaaggaaggaaattccagtgcatgctataacatagatggacctcaaggacactgtgctaagttaattaagctagacacaaaaggtttgaaagcttgaggcaggaaagttcccttttgcattttaaagtgtgttgaaactgagtagcctgggtgttggtctcattccacaagtgagtaatccatttcctgaaagtaagctgctccccctttggaagtggcccagcgatttgggggtgctgttagaggtgtcactaactcggtaaatatttattggcacaagcaaggagcttttctgggaatatcagttaatttgctaaactaatggctttaaggtagcacccttgaaaaaaattaattcctttctgatgggtgagcaatttatgcctgggacagggcaccagacaggcagtgtgtttcacttactagttagaataaccacaaataaattaaaaccaggcctgactttaaaatctctaccttcttccttttcttgactcctgattttctattaatatctgagccagtaatggattgactttggaaaactcttttctatggcaatattttgctgggagtttgaaatgatggggtttgaaaactccctttcctgtgagtcttttggcttctgggatcccatacggatgatctcatatatctacccctcactaagactgtgcccacctggatctatctggagacgtgcctcctgttcttctgtgtagagcaatttagactttcatcacctggcttgaaaaagccttttgccttgaagaataaaaacttggtttctttatggctc

SEQ ID NO: 1564 - DNA, 1836 bp, Homo sapiens
aaaagtaagcggcgcgagcgtgcgagtttctgacgcgcccgcgtcgtcccagctccctggactaccagtattgtcgcccacgtgggcttctctttcgtccgctcaggcctcacttttctccgtaaacaccccggcacgatggagcggccccagcgttcgggagcggcccgggagcggaaagcggcagtgtcctgggagcctcgaaagccgcaggggcggcagctcgcctcggaatgacctctgacggaagaaataaaacggggcctgggacgcttgcacgaaagaacccgacaaaaaccagagcccgcactcactctcgtactggggaggtggacttcagggagggttatctggaggaggaatctctcaaagtacaacacaggagaaagacagtatcgcaatacagaaattttattttttattttattattattttcctgagaccggagtctcgctctgtcgcccaggctggagtgcagtggcgcgatctcggctcactgcaaactccgcctcccgggttcacgccattcggctgcctcaccctccacagtagctgggactacaagcgcccgccaccacgcccggctaatttgcaatacggaaattttaatagctgacgtgaaaaggggttgtctccataaaggatgcgggccttcaggggcagcattattctgcaggtctcctgcttcctgatggcacaaggactccacatcacccagtcctaccttaaatccaatcggacaccagtccacaaactggttggtgtgcttgctcttgatggtggcgacagccgcactgacatctttcaggaccacatcccctctgtacaacatgcagcaggccatgtacttgccatggtgagggtcacacttgaccatctgattggctggctcgaagcgggcactggcgatcttggccacggacagctgctcatggtaggccttcttggctgagatgaccagggcgtaggtggccagggggaggtggatgtgggggtatggcaccaagttggtttggaattctgtcaagtacacattcagggccccatcgaatcacagggaggccgtgatggaggacacgatctgcccagacgactgaggttggtgtacatgggacactcgatgtccaggttgtgctgacatgtcataggtggctttgctgtcgactatgaaggcacagtcagaatgttccagggtcgtgtaggtggtcaggatggagttgtagggctccgtcatggccatggagacctggggggctgggcaaatggcaaactccagcttggacttcttcccgtagtccaccgagagccgcttcatgagcagagacacgaacccagagccagtgccgcccccaaagctgtggaagatgaggaagccctgcagtcccatgcacagatctgcctgagagaaaccagacaacgtaagccaatgcccgtgggagccacaccaccaacctccaccaagccggggccacttctctttgcctctgagagttgatacggattcagaccatccataatgaacacgcatcacactttgaagcagagaaaagcagacaatacagatctatgcacaaatcaccacgcacacttcacagtaagacgttgcagaggtctaggaaggctggtttgaagaaatacacagaagaaaaacggatggactaaccagagcgctcagccagcctgctggactggcacccgtggctacagacactcttgtttagcaccatggagagctccctgcacagaagcaaggactcagggcattgccccctctctacctgagaactagactcagcgcccagcactggatttgataatacaggtactcaaatacg

SEQ ID NO: 1565 - DNA, 1381 bp, Homo sapiens
accgcagcggacagcgccaagtgaagcctcgcttcccctccgcggcgaccagggcccgagccgagagtagcagttgtagctacccgcccagaaactagacacaatgtgcgacgaagacgtgaccaccgccctcgtgtgcgacaatggctccggcctggtgaaagccggcttcgccggggatgacgcccctagggccgtgttcccgtccatcgtgggccgcccccgacaccagggcgtcatggtcggtatgggtcagaaagattcctacgtgggcgacgaggctcagagcaagagaggtatcctgaccctgaagtaccctatcgagcacggcatcatcaccaaggccaaccgcgagaagatgacccagatcatgtttgagaccttcaacgtgcccgccatgtacgtggccatccagaccgtgctgtccctctacgcctccggcaggaccaccggcatcgtgctggactccggcgacggcgtcacccacaacgtgcccatttatgagggctacgcgctgccgcacgccatcatgcgcctggacctggcgggccgcgatctcaccgactacctgatgaagatcctcactgagcgtggctactccttcgtgaccacagctgagcgcgagatcgtgcgcgacatcaaggagaagctgtgctacgtggccctggacttcgagaacgagatggcgacggccgcctcctcctcctccctggaaaagagctacgagctgccagacgggcaggtcatcaccatcggcaacgagcgcttccgctgcccggagacgctcttccagccctccttcatcggtatggagtcggcgggcattcacgagaccacctacaacagcatcatgaagtgtgacatcgacatcaggaaggacctgtatgccaacaacgtcatgtcggggggcaccacgatgtaccctgggatcgctgaccgcatgcagaaagagatcaccgcgctggcacccagcaccatgaagatcaagatcatcgccccgccggagcgcaaatactcggtgtggatcggcggctccatcctggcctcgctgtccaccttccagcagatgtggatcaccaagcaggagtacgacgaggccggcccttccatcgtccaccgcaaatgcttctagacacactccacctccagcacgcgacttctcaggacgacgaatcttctcaatgggggggcggctgagctccagccaccccgcagtcactttctttgtaacaacttccgttgctgccatcgtaaactgacacagtgtttataacgtgtacatacattaacttattacctcattttgttatttttcgaaacaaagccctgtggaagaaaatggaaaacttgaagaagcattaaagtcattctgttaagctgc

SEQ ID NO: 1566 - DNA, 1233 bp, Homo sapiens
gcttttgcctggggttctcaggaggggagagttgggagaggctttgctgctgaggaaatttatttggtagattgaaggtttgaacgagagctacagaaacgaaagaaaaagtctgtataagccaatggtgttcgggaagaaaataaccccattgccttgagtttgtaggtgccactactactctggaaaaatggcagatgacgaagactatgaggaggtggtggagtactacacagaagaagtggtttacgaagaggtgccgggagagacaataacaaaaatttatgagactacgacaacaaggacatctgactatgagcaatcagaaacttccaaaccagctctggcacagccagcactggcacagccagcatcagcaaagccggtggagaggaggaaggtcatccggaagaaagtggatccttcaaagttcatgaccccctacattgcacacagtcagaaaatgcaggatctttttagcccaaataaatacaaggagaagtttgagaaaacaaaaggacagccatacgccagcacaacagatactccagaacttcgcagaatcaaaaaagtacaagatcaactcagtgaggttaagtatcgaatggatggtgatgttgctaagactatatgtcacgtagatgaaaaagcaaaggatattgaacatgcaaagaaagtgtcgcagcaagtcagtaaggttttatacaagcagaactgggaagacaccaaggataagtacctgcttcctcctgatgcccctgaacttgtccaggccgttaagaacaccgccatgttcagcaagaaactgtacactgaagactgggaagcagacaaaagtttgttttacccctataatgatagcccggaactgaggagagttgcccaggcccagaaagctctcagtgatgttgcctacaaaaaaggtctcgctgaacagcaagctcaattcacgcctctggccgatcctccagatatagaatttgccaagaaagtaaccaatcaagtgagcaagcaaaaatacaaagaagactatgaaaaaaaatcaaaggcaaatggagtgagacaccttgctttgaagttgcaaatgccagaatgaatgctgataacattagcacaaggaaataccaggaagattttgaaaacatgaaagaccagatctacttcatgcagaccgaaacaccagagtataaaatgaataaaaaagctggtgtggcagctagcaaggtaaaatac

SEQ ID NO: 1567 - DNA, 1381 bp, Homo sapiens
ttctctggttccctgacctcagtgagacagcagccggcctggggacctgggggagacacggaggaccccctggctggagctgacccacagagtagggaatcatggctggagaattggatagcagagtaatgtttgacctctggaaacactcaccatcatatttaagaacatgcaggaatgcattgatcagaaggtgtatcaggctgaggtggataatcttcctgtagcctttgaagatggttctatcaatggaggtgaccgacctgggggatccagtttgtcgattcaaactgctaaccctgggaaccatgtggagatccaagctgcctacattggcacaactataatcattcggcagacagctgggcagctctccttctccatcaaggtagcagaggatgtggccatggccttctcagctgaacaggacctgcagctctgtgttggggggtgccctccaagtcagcgactctctcgatcagagcgcaatcgtcggggagctataaccattgatactgccagacggctgtgcaaggaagggcttccagtggaagatgcttacttccattcctgtgtctttgatgttttaatttctggtgatcccaactttaccgtggcagctcaggcagcactggaggatgcccgagccttcctgccagacttagagaagctgcatctcttcccctcagatgctggggttcctctttcctcagcaaccctcttagctccactcctttctgggctctttgttctgtggctttgcattcagtaaggggaccatcagtcccattactagtttggaaatgatttggagatacagattggcatagaagaatgtaaagaatcattaaaggaagcagggcctaggagacacgtggaacaatgacattatccagagtcagatgaggctgcagtccagggttgaaattatcacagaataaggattctgggcaaggttactgcattccggatctctgtggggctcttcaccaatttttccagcctcatttatagtaaacaaattgttctaatccatttactgcagatttcacccttataagtttagaggtcatgaaggttttaatgatcagtaaagatttaagggttgagatttttaagaggcaagagctgaaagcagaagacatgatcattagccataagaaactcaaaggaggaagacataattagggaaagaagtctatttgatgaatatgtgtgtgtaaggtatgttctgctttcttgattcaaaaatgaagcaggcattgtctagctcttaggtgaagggagtctctgcttttgaagaatggcacaggtaggacagaagtatcatccctaccccctaactaatctgttattaaagctacaaattcttcacaccatc

SEQ ID NO: 1568 - DNA, 1516 bp, Homo sapiens
aaaacagaaacaggagagttcttactacaacattgttaaaactcaaagccaaaatcaacacataacagaggtggaaaaggaaatgccattacaaaaaaccaatgaggaggtttccctatctggaattgattcagaatgcactgtggttcaacccagcccaggctctcaaagtaatgctcggatactaggagtgtgttctgataaccaactctccacaacatcgccagaaacagtcgctgccaagaggctccaccatgttttagcagcttcagaagacaaagataagatgaaaaaggaagttttacaaagctcaagggacattatgcaatccaaatcagcttgcgaaattaaacaaagtcaccaagaatgtagtacccaacaaacacaacagaagaagtatttggagcagttgcacttgccccaaagcaaaccaatttccccaaatttcaaagttaaaaccatcaaacttccaactctagatcatacattaaatgaaacagaccacagctatgaaagtcataaacagcaatctgagattgatgttcaaacctttaccaaaaaacaatatctgaaaaccaagaaaactgaagcaagcactgaatgtagtcataagcaatctctggctgaaagacattatcagttacctaagaaggagaaaagagtgacagtacaattgcctacagaatccatacagaagaaccaggaagataagctcaagatggttcccaggaagcaaagagaatttagcggatctgacagagggaaacttccaggaagtgaagaaaaaaatcagggaccatcaatgattggtcgaaaagaagagagattaataactgaaagaaaacacgaacatctgaagaataaatcagcaccaaaggtcgtcaagcaaaaggttatcgatgcacatcttgattcacagactcagaattttcagcaaacacaaatacagaccgctgaaagtaaagctgaacataaaaaattgccccagccatataatagtctgcaggaagaaaaatgtctcgaagtcaagggcatacaagagaaacaagtcttctctaatactaaagattcaaagcaagagattacacagaacaaatctttcttttcctctgtgaaagaatcccagcgggatgatggaaaaggtgccttaaatatagtggaattcttgagaaaacgtgaagaactgcaacagattttgtcgagagtgaaacagtttgaagcagagccaaataaaagtggccttaaaacatttcagacactattaaatactatcccaggatggctgataagtgaagataagagagaatatgcagttcacattgccatggagaataatttagaaaaagtaaaagaagaaataacacatattaaaactcaagcggaagatatgcttgtgtcctatgaaaatgtaattcagacagccatgatgtcctccaaaacaggaaaaccgggaaataaacccactagtcttgatgaaacatcatccaaagtatctaatgttcatgtcagcaataat

SEQ ID NO: 1569 - DNA, 2872 bp, Homo sapiens
aaaaacaaaaagtccaattagcaagttctgacctggaatcaaagctgctctgcacagcacctgccccagtccccaaagccaaaccctggggtgagaccatcgagccatggctaaaggcagcggctctgggtgcatctggagaactcagggcagctcaagatgcagtaactagagttgacagtgattctgagcatgcagaaggcagaccaagcggccttctctagactcgggccctgcacatacagaccaagccaccttctccagactcaggccctgcacatacagaccaagccaccttctctaaactcgggccctgcacatacggaccaagccgccttctctaaactcaggccctgcacatacagaccaagcggccttctctagactcgggacctgcacatatggaccaagccgccttctccagactcaggccctgcacatacagaccaagccgccttctctagactcgggccctgcacatacagaccaagccaccttctctagacatgggccctgcacatacacaccaagcggccttctccagactcaggccctgcacatacagaccccgccttctctaaactcgggccctgcacatacggaccaagcggccttctctagactcgggccctgcacatacagaccaagccaccttctctagacatgggccctgcacataaagaccaagccgccttctctagactcgggccctgcacatacagaccaagcggccttctctagactcgggccctgcacataaagaccaagccgccttctctagactcgggacctgcacatatggaccaagccaccttctctagacatgggccctgcacaaaaagaccaagccgaagctgctctgtttaagttgacaaagtcatcgagccacaccgtcatgtccgcccatgtcctgtactgtgagtgctcccccgttcacggcaccccacagtgaaggatgcaccaaaccccagcaaacgcctacggacccaacggacccactccactactctccacacgtgtaaaggaagcatcccacggcagctccatgggatctgagcacagaagatggagatgaagaggatgccgggtggccacccagacgctgatgccatctgtgggaacgagggacccaccaggcgtcacttcaggtcccctctcacagggcgcatcaggagatgacagtgccccaaccacagataccagggcacactcagcaaagcctgtggtcacgtggtgtcaacagcagccgcctagagcgatgtcactctgtggtaggagacgccgtgccgggcaccagggcttttcccagcactcccctgctcagtggccccgtggtctggccacagcctggcaggcaaacaccgctgctggccattgtgtgggcacaggaaatgaggctcagagccatcaaggtcgctgctgggacagcagagctgtgtctccaccctgcactgcgttcccaacagggcagtggcctggacaccccttggcagccatgtccactgcacggtgttccgtctccctgcacacagccatgtccccctgcgtcctccaccagggccagcccaggcgtgctgacgagctgcaccttcacgtggatgctgggggagaggccatcccaaggaggcatccagtgtgcagacacagccacggtgcagaaaacaagctcactgcaatgggcccggcagtcacgtggtccttgcagttcacagggagactggccttgggctcaggggcaggagattgaacttagaggcggactagaggagttttttttgcagaatcaccagcaaggcagcagcaatttcagctgtgggaaaaaattcaaaagcccagctcttatggaaattggataaaactgtgcagcctcagggcctgtgcagacgtgaattctaatgacttgtcagggactagtgtgggcgagcggggtggttcgtggcttccactgcctgctgctctgcacagcccctaggcctcccagccgaccaggcagactccgcccctaggcctcccgcccgaccaggcagattcggcccctaggcctcccgccccaccaggcagattcggcccctaggcctcccagcagaccagggagattcggcccctaggcctcccagcagaccaggcagactcggcccctaggcctcccacccgaccaggcagattcggcccctaggcctcccagcagaccaggcagactcggcccctaggcctcccacccgaccagggagattcggcccctaggcctcccagcagaccaggcagattcggcccctaggcctcccacccgaccaggcagactcggcccctaggcctcccacccgaccagggagactcggcccctaggcctcccgccccaccaggcagattcggcccctaggcctcccacccgaccaggcagatttttgctttaatcaccgtgtgctgcctctggctcagcgtgaatgctggctctgggaccctttcctcgtaggcagaggtgctgggtagtgcaggggtagggcttcccctggggccggtgtgcaccccgcagtgtcacagcttcccccagcgcctagcggcctccaggtgcgcatctcacctgggtcccaaagggaggtttcctaccagccctggcctgaacgtcttgggaacttctccactgccccggccatggccccaccccgtgccactgagggtctggctctcagcctcagtggggctggggtttccaacggcccccgcctgggccctgtgggcactgctgcccctctgttgctgtatctgtgtcctcagagtccctttagtccttcgttgctgagccggtgctactggttaacactgccttacactaaacccgtcataagtctttctataaaactgttcaaatttc

SEQ ID NO: 1570 - DNA, 3627 bp, Homo sapiens
gtagtctttttttttgcagaatgggccaaggggacagagacttcactcgggagccagaacctgttttcaacatgggtattttaagaagagacggagaggctgtcactgcagtggtcactgtcctggaaaagtaaccgttgcacggcccagaagtggctctgtggcggccaatgggagccgaagcctgcgaggatgttgggaattgtagttctggcgtcggtcggtggccgagatcccgggcacgctggctctggtccaccttctccaatccctgcctgctgggagaggacgatctcttgagaaaggaaagacttctgtgctcccgagcacttcctatcaggtcctggctgcagggaaacaagctgggctttttataattaaggttggaagaagtcaccacaggcagcagaactccatcttgagatgaaataacatctacctggacctctggcagaatttcaaggcacacactgggctgactctggcgccatgatgttgccttatccttcagcactgggagatcaatactgggaagagattttgcttccaaagaatggggaaaatgtagagactatgaagaaattgacccaaaatcataaagcgaaaggcttgccttctaatgatactgactgcccccagaaaaaggagggaaaggcccaaatagtggtaccagttacattcagggatgtgactgtgatcttcacagaagcagaatggaagagactgagtccagagcagaggaatctatacaaagaagtgatgctggagaattacaggaatcttctctcattggcagaaccaaagccagaaatctacacttgttcctcctgccttctggccttctcctgtcagcagttcctcagtcaacatgtacttcagatcttcctgggcttatgtgcagaaaatcacttccatccagggaattctagcccagggcattggaaacagcaggggcagcagtattcccatgtaagctgttggtttgaaaatgcagaaggtcaggagagaggaggtggctccaaaccctggtctgcaaggacagaggagagagaaacctcaagggcattccccagcccactccaaagacagtcagcaagtcctagaaaaggcaacatggtggtagaaacagagcccagctcagcccaaagaccaaaccctgtgcagctagacaaaggcttgaaggaattagaaaccttgagatttggagcaatcaactgtagagagtatgaaccggaccataacctggaatcaaactttattacaaacccgaggaccctcttagggaagaagccctacatttgcagtgattgtgggcgaagctttaaagatagatcaaccctcatcagacaccatcgtatacactcgatggagaagccttatgtgtgcagtgagtgcgggcgaggttttagccagaagtccaacctcagcagacaccagagaacacattcagaagagaagccttatttgtgcagggagtgtgggcaaagctttagaagtaagtccatcctcaatagacatcagtggactcactcagaggagaagccctatgtttgcagcgagtgtgggcgaggctttagcgagaagtcatccttcatcagacaccagaggacacactccggtgagaaaccctatgtgtgcctggagtgtggacgaagcttttgtgataagtcaaccctcagaaaacaccagaggatacactcaggggagaagccttatgtttgcagggagtgtgggcgaggctctagccagaactcagatctcatcaaacaccagaggacacacttggatgagaagccttatgtttgcagggagtgtgggcgaggcttttgtgacaagtcaaccctcatcatacacgagcggacgcactctggagagaagccttatgtgtgtggtgagtgtggccgaggctttagtcggaaatcactcctccttgtccaccagaggacacactcaggggagaagcattatgtctgcagggagtgtaggcgaggttttagccagaagtcaaatctcatcagacaccagaggacgcactcaaatgagaagccttatatttgcagggaatgtgggcgaggcttttgtgacaagtcaaccctcattgtacatgagaggacacactcaggagagaagccttacgtgtgcagtgagtgtggccgaggctttagccggaaatcactcctccttgtccaccagaggacacactcaggggagaagcattatgtttgtagggagtgtgggcgaggctttagtcataagtcaaatctcatcagacaccagaggacacactgacgggagaaacctgtgtatgcaggggtcatgaacaagacctgagtgaccagtcaagcctcatgttaccccagagagacacatggggagtagaccctgtgtacacagattgtgagtgaagttccagagatgtgtcagcccttatcaggcatgggagggacacgttcaggagaggagccttatgagtatagagtacgggcaactgtagccatcagtcggccttgagcatgcacaaaaggacacacttaggagagaagtttatgtgtagggactgtgggaaggctttagcaataatcaacatttaccagacatccaatgacagcctcaggggaaagcacccttgtctggggagtgtaggggagcatcagtaaaagaatggacactcaggcacagagtggccctcaggaaggaggtctttgtttgtaggatgtatgggcaaagcttttgtgatcacacaccacagggagaatctgcatgtggggacactgtggagctctgcccagatgaccttttcaggggtaacaccccagctgcttgagagaacagtgttgctgctggcagagatgcattccagagatgcactccgctctggaactcactctcagccacagggagctgcatgcaccacaggggcaatgcacctttgcaggggtaccttctggccccaacccttgactcaacggggacaactccagaaggtcattccagatccagagatccccatcgaactgaaggatcactgggttgcagacacattgcaggtcagcttcttcctctgcccagtcctgccctcactccccagtgaatcctcaattttctgtctcgttgtctgtccagataattgattctaaggcatgttaggtatataaggagtgtagataaggcttcagccatgagtcaccccccagtaagccccagagtatattgaatagaaattctgcatgtgtggggagaatggacaaggacttaggaaaaagtcctcatcaaagaacagcttttttgggacaagctttacatgggtggggagggaaaatgtgaaacacattagcaataagttaaacctcatcttgtactaaaggaggacacactcagggagaagacctctgtgggcagggcttgtgggtggagcttcatcccgatgtcactcctcaactgacttaggaggacagtcttgctaccccaagtcactacctcactcacctctgagggattttcaggaaatgtcttgactcccccatgtactctgtatgtgagcgaagatggcagtaactgttaaataagcattcttttctacttcttggaatcagatgaaataaaaaagcaggctttatttaagtaatc

SEQ ID NO: 1571 - DNA, 3207 bp, Homo sapiens
aaatagctcttattattttgagatacattccatcaatacctggtttattgagagtttttagcgtgaaggggtgttgaattttatcgaaggccttttctgcatctattgagataatcatgtggtttttgtcattggttctgtttatgtgatggatgacgtttattggtttgtgtatgttgaaccagccttgcatccgagggatgaagctgacatgatcgtggtggataagctttttgatgtgctgctggattcggtttgccagtattttattaaggattttcgctttgatgttcatcagggatattgacctgaaattttctttttttgttgtgtgtctctgccaggttttggtatcaagatgatgctggcctcataaaatgagttagggaggagtctctctttttctactgtttggaatagtttcagaaggaatggtaccagctcctctttgtacctctggtagaattcagctgtgaatccatctggtcctgggttgataggctattaattactgcctcaatttcagaacttgttattggcctattcagggcttcgacttcttcctggtttagtcttgggagggtgtatgtgtcaaggaatttatccatttctcctagattttcttgtttatttgcatagaggtgtttatggtattctctgatggtagtttgtatttctgtgggatctgtggtgatatcccctttgtcattttttattgtgtctatttgactcttctctcttttcttctttattattctggctagcagtctatctattttgttaatcttttcaaaaaaccaggtcctggattcattgattttttgaagggtttttcgtgtttctgtctccttcagttctgctctgattttagttatttcttgtcttctgttagcttttgaatttgtttgcccttgcttctctagttcttttaattgtgatgttagggtgtcaattttagatcattcccgctttcttctgcaggcattttagtgctataaatttccctctaaacactcctttagatagatgtgtcccagagattctggtgcgatatgtctttgttttccctggtttcaaagaacttacttatttctgccttaatttcgttatttacccagtagtcattcaggagcaggttgttcagtttccgtgtagttgtgcggttttgagtgagtttcttaatcctgagttctaatttgattgcacagtggtctgagagactgtttgttatgatttccattcttttgcatttgctaaggagtgctttacttccgattatgtggtcaattttagaataagtgtgatgtggtactgagaagaatgtatattctgttgatttggagagaagagttctgtagacgtctgttaggttcatttggtccagagctgagttcaagtcctgaatatccttgttaattttccgtctcattgatctgtctaatattgacagaggggcgttaaagtctcccactattattatgtaggagtctaagtctctttgtatgtttctgggaacttgctttatgaatctgggtgctcctgtgttgggtgcatatatatttaggatagttagctcttcttgttgcattaatccctttaccattatgtaatgcccttctttgtcttttttgatctttgttggtttaaagtctgttttatcagagactaggattgcaacttctgctttttttcttctttccatttgcttggtaaatattcctccatccctttattttgagcctatgtgtgtctttgcacgtgagatgggtctcctgaatacagcacaccgatgggtcttgcctctttatccaatttgccactctgtgtcttttaattggggcatttagcccatttacatttaaggttaatattgttgtgtgtaaacttgatcctgtcattatgatgctagctggttattttgcccgttagttgatgcagtttcttcataatgtcgatggtctttacaatttggtatgtttttgcagtggctggtaccagtttttcctttccatatttagtgcagagtggacctccagcaaactccagcagacctgcagcagaggggcctgactgttagaaggaaaactaacaaacagaaaggaataccatcaacattaacaaaaaggacgtccacgcaaaaaccccatccgaaggtcatcagtgtcaaagataaatccacgaagatggggaaaaaacagtgcaaaaaggctaaaaattccaaaaaccagaatgcctcttctcctccaaaggatcacaactcctcgccagcaggggaacaaaactggatggagaatgaattgacagaagtaggctttagaaggtgggtcgttacagactcctccaagctaaaggagcatgttctaacccaatgcaaggaagctaagaaccttgaaaaaaggttacaggaactgctaactagaataaccagtttagagaagaacatatatgacctgatggagctgaaaaacacagcacgagaacttcgtgatgcatacataagtatcagtagccgaattgatcaagcagaaaaaaggatatcagagattgaagatcaacttaatgaaataaagcgtgaagacaagattagagaaaaaaatgaaaaggatgaacaaggcctccaagaaatatgggactatgtgaaaagaccaaacctacatttgattggtgtacctgtaagtgatggggagaatggaaccaagttggaaaacactcttcaggatattatccaggagaacttccccaacctagcaaggcaggccaacattcaaattcaggaaatacagagaacaccacaaagatactcctcgagaagagcaaccccaagacacataattttcagattcaccaaggttgaaatgaaggaaaaaatgttaagggaggccagaaaggtcaagttacccacaaagggaagcccatcagactaacagtggatatctctgcagaaaccctacaagccagaagagagtgggggccaacattcaacattcttaaagaatagaattttcaggggccaggcgcggtggctcacacctgtaagcccagcactttgggaggctgagacaggtggatcacgaggtcaggagatcgagaccatcctggctaacacggtgaaaccctgtctctactaaaaatacaaaaaattagccgggcatgatggagggcgcctgtagtcccagctactcgggcgacagagcgagactccgtttc

SEQ ID NO: 1572 - DNA, 2988 bp, Homo sapiens
acaaaagcaaaatgggaaaatggcaaacagatccttttcaattagctgctgcatttatctcttcccccaaaagagaatcttctgctgcttctgcttcttcatctgcacaacggggatgtagccatcatacatgcctgcaaggctgtagtgagatcctggacatgaaagcattctgaaaactgaaaagtacaatgcacctgtgtttctgcctaagctctctaagcgtgacagcaggagcgcccgggtctccatcccggagagatgtgtccacactccgccgccactgctctcttcatcagcaacttgcttctgcagtcgctgcccaaagtttcgcggagcacccggcgacctggccgtcggtcaatcctgagaagcccagggattcggggcgcggagactgggggctgggccccgggaatcccaaagacgtccccgcggccaggaagggagtgacaggtgcgacgcgcggtcgcgggcggcgggagagcggaccacggaaaccgcgtgtgggcgcgcgagggaggcggcggccacgcgctctccttaggccgctccctgagacgcccccgcgacgtccctagccccgcgctctggaacccgcgaccctcgcgccgctttcggccccgcggcgccccagatcccacggcctcccggagcggcgcagctgggtcgggctcacgctcgcagcgccggaagggttgaggaccgccgggggcaccgtgcgcacggggttcttcccgcgcgaaccggggctgtcggggggtgggcgcacgcgcacccgggcgcgccgccgtaaccccttcctccccgcgcggcccccgcactcccacccacccaccactcaccgtcgatgtctcccagggtcagctcgtcgcccagctccgtgagggtctccatggtctccagaccacccagctcgccgctgtcgtccatcgcccggctcagcgcagaagccccccctgccgtcccgctcagggagacgcgggggcggtgccgtcgccaccgcccatgacacccgacaacccccgcccggcaccgcctcaccgacgggtgccacccgccgccatgtttgcgttgcgcccgggcgccgcacagaaagggcggggcgggattcccccgccccagcccgcgccccctgcggccccgcctccaggccgcgcgcccccctgtttgttgtcaatgggaccaggctcatctcagccaatgggcgagcgaagcggtgcgtggggtgatggcgcgtcatcgatcagcagctcagatttgcatagtgaggtccctccccccgcggcctcggagcgaatgcctggagtagccgtccggtcatcatcttaaccttctccgccttgtttaaaggagccgctgccttctccgttggatctgcgccacacgcaagtccgtccactggcctgggagtgaagggttaacaggccaccctccacctgcgaccgctggccgcctccaggcctggctgggagcacattacgtcatcttcccagctgcctacccccgccctgcccgcctgagaaagccagcggagtcaaacctggaccccagcgctcgggacgggagtccgggtcatccaagtcccgcttctcccagcctccttacaaaggcgggcacggaggcttgacaaggttgcagattgtcccagggcggtcaggattttacgtcttctgctttgcacccgccgtgacctcgcgcttactccagtggtcctcaatctctggcacctcggaaccactgaggacctgaaaaccacgccagtgcccaggcccaccgacggcctcctgagaggggggccccgggcacgagttttttgaaaaagttccaccgggattctgaagtgcagcccacccactccttcaagcacctcactgccccatcttgcagctggtcgtgttgtaaacttctaggaatttatccaaaggaataaaaattacaagtgcttaaagaagtgctgtaactaggaagaagtgagaataaggaaatgaatatgtaaattacatccacacgatggaataccatgggatcattaaaaattacgcacacaaatgtatatttattagcaagaaaaggcgttcacaatatattgataaaagggaaaagttgaagtttcctgccagtttgtgagaggcagctgttgcttagtgatcaataattaagaacacacaggctgtgtggaggcagacacatggatccactaattcactgtgaccttgggttaattgttctaagcctcagtttagtcatctctaaaatggggataaaatagcatccctcatagctgtggttaggtgagattatttgcacattcaattgacaatatttattgaacatctctgtggcagggaaacaaatggttcctgccctctgagagcttccagtctagcaaaaaaaaaatcagaaatcccacacccgtattaaacataaaaataaattacagatgatggtacaagtgatcaaggaaaggtaatggatgtgatgaaactaacaagggccctgacttgtgctgtcaagaagcctctgaagaagtgacatttaagatgaaacctaaaattatgagagaactgcagctgttacagccaaaggggaaatgatgacatggacaaaggcctcgaggcaggaggagctgctggcagccagctctcggcataagctttggcatacagtaagtgccttgcatactgctgtattgcaattgaaaaaataaggatctggccaggcgcggtggctcacaccggtaattccagcactttaggaggccgaggtgtgcagatcatttgaggtcaggagttggagaccagcctgaccaacatggtgaaaccccgtctctactaaaaatacaaaaattagccgggtgtggtggcgcatgcctgtaatcccagctaaccggtaggagaactgccggaacctgggagatagaggctgcagtgagctgagatcatgtcgctgcactccagcctgggagacagagcaagactctgtctc

SEQ ID NO: 1573 - DNA, 2211 bp, Homo sapiens
gcagatgcaggtgccggctgctgcagtgcagtagctgctggaggctggggaggcccggacccggtgcaggaagacgccgaccacgcgggctcctgatcgcgggcgcccacagcgcggacatggcgggctggtggccggcgttgtcgcgcgcggcccggcgccacccgtggcccaccaacgtgctgctttacggctcgctcgtctcggccggggacgcgctgcaacagcggctgcagggccgcgaggccaactggcgccagacgcggcgcgtggccacgttggtggtgaccttccacgccaacttcaactacgtgtggctgcgcctgctggagcgcgcgctcccgggccgagcgccgcacgccctgctggccaagttgctgtgcgaccaggtggtcggtgcgcccatcgcggtctcggccttctatgtcgagtggattgatgtactggccctttgtacagctgaccaacttcagccttgttcctgttcaatggagaacagcttacgctggagtctgtggttttctctgggccaccttcatctgtttttcccagcagagtggtgacggcacattcaagtcagctttcaccattttatatacaaaggggaccagtgccacagaagggtacccgaagaaatgagaagtcaaggactctcttaaagggaccacattttttacctaaaatgcacagaattgcctgcagacaaaatatttgatgtgccaattatgcacttcattttgaggaattactactatttatagacccactttttaaaaaattatcaatgattatttttgaattgtattcagacttttttcctgttctagtctgaaatattacttctctaatattttggttaatatgaataatagtggcaaaatggcattttagaattattaatatttctaatattttaacacaagtttcaggaaacttggttttgattgttcacatttctattctaaaatctcaggttatctcctgaacacttttgggcagatgaagttttataccaaaaaatagttcttagagtgaattttaatttacatagaactcaatcgaaatgaagatttaataaccagatttctttctccaaaacatacacaatttgttattttagtaaatacctttttttttttttttttttttgtggtggagtcttgctgtctccccggctggagcgcagtggcacgatcgcggctcactgcagcctccatcctctgggttcaagcaattctcctgcctcaggctcctgagtagctgggattacaggcacgtgacaccaggcccagctgatttttgtatttttgttcatttgcttttgtttttgacacagagtctcgctctgtcgcccaggctggaatgcagttgtgagatctcggctcactgcaagctccgcctcccgggttcacgccattctgcgtcagcctcccaagtagctgggactacaggcacctgccacgatgcctagctaattttttgtatttttagtagagatgaagtttcaccgtgttggccaggatggtcttgatctcctgaccgcataatccacccacctcggcctcccaaagtgctgggattacaggcgtgagccaccacaaccgacttttttttttttttttttgagacagagactcgctctgtcacccaggctggagtgcagtggcatgatttcggctcactgcaacctctgtctcctgggttcaaacgatcctactgcctcatccttcggagtagctgggattacaggcaggtgccaccatgcctggctcatttttgtatttttagtagagagggcgttttgccatgttggctaggctggtctctgtccgtcctctgagctcaagctaagccatcatatcccagtgacctgcacatatacatccagatggcctgaagttactgaagatccacagaagtgaaaatagccttaactgatgacattgcaccattgtgatatgttactgccccaccctaactgatcaatgtactttgtaatcctcccacccttaagaaggttctttttaattctccccacccttgagaatgtactttgtgagatccacccctgcccgcaaaacattgctccaaactccaccacctatccccaaacctgtaagaactaatgataatccaccaccctttgctgactccttttttggactcagcccgcctgcactcaggtgaaataaacagccatgttgctcatac

SEQ ID NO: 1574 - DNA, 2065 bp, Homo sapiens
gtgtagtcgggtaacttccgctctaggaggctgaggccgtctccctgatcccgtcgagaattctgggaagcgtagtccaggaggtctccgtagggagagccacttccgcccaagatgatggattagagactttaagcatgcttcagccacatggacatagcacaatagtgcataaatgtcaactctctgggctttaatttaagaagaagaaaaggaatccaccagaatcatgaaggacacaccagattccgggaaggagaatggaggcaaactgcccccatgatggcatccagctaataaaaccaaataggaagtgcaaggggttgggggattttcctttcctagccaaaggaaggcatgacagactgtacctggaaaaacaggacactcttgcccaaatggacataaatgacctgatggagctgaaaaaacacagctcgagaacttcatgaagcatacacaagtctcaatagccaaagtgaccaagcggaagaaaggatatcagagtttgaagaccaccttgctgaaataaagcatgcagacaagattagagaaaaaagaatgaaaaagaatgaacaaagcctccaagaaatatgggactatgtaaaaagaccgaacctactattgattggagtacctgaaggagatcgagcaaatggaaatgagctggaaaacactcttcaggctgggactacacagccaaggttttatatacaggagaacttccccaacctagcaagacaggccaacatgcaaattcaggaaatacagagaacaccactaagatactcctcgagaagatcacccccaagacacataatcatcagattctccaaggtcaaaataaagaaaaaaatattaagggcagccagagagaaaggtcaggttacctacaatagtttcatcagactaacagcagatctctctgcagaaaccctacaagccagaagagagtgggggccaatattcaacatttttaaagaacataatttttaacccagaatttcatatccagccaaactaaccttcataagcaaaggagagataaaatcctttccagacaagcaaatgctgagggatttcgtcatcactaggcctgccttacaagagctcctgaaggaagcactaaatatggaaagtcaaaaccagtaccagccactgcaaaaacacaccaaaatacagaaaccaatgacactatgaagaaattgcatcaattagcatgcaaaataaccagatagcatcatgatgacaggatctaatccacacataacaatactaaccttaaatgtaaatggactaaatgccccaattgaaagacacagcctggcaaattggatagagtcaagacccagtggtgtgctgtatttgggagatgcagctcacatgcaaagacacacataggctcaaaataaagggatggaggaaaatttaccaagcaactggaaagaaaaaaaaaaggcatgggctgctatcctagtctctgacaaaacagacttcaaaccaacaaagatccaaaaagacaaagaagggcattacataatggtaaggggatcaattcaacaagaagagctaactatcttaaatatatatgcatccaatacaggagtacccagattcataagacaagtttttagagacctacaaagagacttagactcccacacaataatagtgggagactttaacacccaactgtcaacgttagatgaacgagacagaaaattaacaaggatattcgggacttgaacacagttctggatcaagcagacctaatagacatctacagaactcttcaccccaaatcaacagaatatacattcttttcagtgtcacatggcacttattctaaaattgaccacataattggaagtaaaacactcctcagcaaatgcaaaagaacaaatcataacaaacagtctctcagatcacagtgcaatcgaattagaacccagaattaagaagctccctcaaaaccacacaactacatggaaaatgaacagcctgctcctgaatgactcctgggtaaataatgaaattaaggctgaaatcaagaagttctgtggcc

SEQ ID NO: 1575 - DNA, 2508 bp, Homo sapiens
acagattcccaggcgcctccctgcacgttcccagacaccttcccaggcgctgccagcctcctcctgcgcacagatcgggaggtccctggacttccacttgttgagctggactcaagccggatcgcctggaggatattctcagggcacagcggctgcctgcgcctgagcagtgctgaggagatgccaaggtcaggcatcagctttcagagaatgcagctgcgtcagagatggagacacgcagagccacgtgtcgtggagaatctaaggaagttcgctggcgccagcagcgggaaaaggccctggcttgatgaggggaactcgcagccttgcagcgcgggtgggagccccgggcggaaccgcagaagcatccccggccgtggggttttctcctccagctggagacgtggagggagtggagcagagatgagctgtgagctcagcagttcacacaggacgggatgggggaggagaacccagggatgggagagattggagaacaaggagctgctgggtctcagcctcatgtagacgacagggcctgtggggatggccacgcgtgaatctggtcctggcggggagcgtccggcgcgatgggagggacctgcagccagtgatcctcccgtggcatcgcttctagagttgagaggagaaagccagtagctgccggtctctggtgggtctcacagatgctggagcaggtgtaggaggaagcgcctccagcaggagtgacacccccatgccgcccaggaaggtgtcgcgcctgttaggagggaaaggactcaggatgtgcgttgcatggggttgtgagtgagtcagtggcagcccccccgcttcctcctcctgctttgacatgatgcaggatggactcagcaccccgccgaaggcactcccattcccctctgcatatggttttcatcatgtggaccttcaatagctatttttgattgatgggtattcagtgggattcaacatccgtaaacgttctgacccaagtcctgttgatcaatggcgtcaccgcacggcctttttgacccaagtctgcaccattctgtctttcctggagtcacccttcgagtgctctatgtgaccgtggcctcctgcggagtctgcccttggctcacggctggacagacattggctcttggcgtctctcatgttggtcacccctccagctgctctgcagcaacaatgcccctttccattcatagaaggtcgttatcgtgcttgcactcgggactgagttcacattgccttctacctgccagagaagctctgagctcctggaggaatgttccttttcttctgatgaaaaatgacgaggtgaacccctcgtgccttggcgtaatgtggtcatcagaggtcgtgagaagagcacagaaatgcgtgtttctcataatcgcctggatgctaatcactgcgtcaaaacctcccatgagccgctttctccacagaatggaggtggccgggcgcggtggctcacgcctgtaattccagcactttgggaggccgaggcgggtggatcacgaggtcaggagatcgagaccatcctggctaacacggtgaaaccccgtctctactaaacatacaaaaaattagccgggcgtggtggcgggtgcctatagtcccagctactctggaggctgaggcaggagaatggcgtgagcccgggaggcggagcttgcagtgagctgagatcgcgccactgcactccagcctggacgacagagcgagactccgtctcaaaaaaaaaaaaaatggtggaaatgccccttcctctaactgcagctgtgcacatccccctggggacagacccaaggcgccttgagatgctgaaaggcgttctctgtgttctgagtggaagtacagcctggaaagtccacggagactctgctctgagtgagccgagctggacagaggggcttttgagtcaaagttttctcctccttgcactttgccagaaaatctcaattgctagtgaggaattcttttcctttctttccctaacgaagtgagtgatgagactggctcttttgcatatttgcagggagtaagcattgtctggattttcactgagtttacctcagcaactttttaaaaactttactccaaagggagccaatgtgcccttcctttgacgtagaaaactattattttaaaattctgccattcggcattactctgatttttctgaataattagactcaaaacactctggtttattcccatctcaaaggtcttagggcagtggatgccgcctttgcttctgtttgctgcagcctgtttgagtggcaggctctttgccctcgttggccagtccccatattctggtgacgcttttctcctgcctcttggcccccagtcacattttccatggtgactctttcaacctcagccttcacgtttcaagtcatgcatccactttctgttttcctgtttcagtagacccccctctgagtttactgagcactttgagaccacttggtaccagggcacagcctcctcatctcc

SEQ ID NO: 1576 - DNA, 2600 bp, Homo sapiens
agagtagaggaggttcccagtctcctctgtcccgtttggtcaagctgttggcacccgcaaaaaggatctgagaaaagggcacggatgttctccccccgacatgcagaacaactgaaagaagccagaagccagagcactttacctcctctgaggtccaaatccgaggctgcagtgacacaacaggaggaaggaagcagagagtcattccccggagtcaggtggggctcgtcccacactaactggagttctttcccgatctctaagcgctctcataccgggcgctcgacccagccatccaaccccgcagaagagacgaggagtaacaggcagggttcccacggcaccggggatccagcatccctaccccgctgtctctgcggccgcctcccggagcgggcggtaggcgggggccagctggcaagcctgccccgcgggggtggtcccaaggactgattcgatgcgtgtaaaggagcgggccgaaggggcacccactggggcaggtttgcccactgccccacctctcctacattctccaacccacccccataactctggactgggaactggcttcgagcgttccaggacgcgcagggaactgcgcagctccgggaactggcgtgggtctcagacgccgtgcgactgcccccagaacgcaagagactccgaagggctgcgtctgggagtggggcatgggacggccttctagtcccatacgtggcgacccagaagagggtcagcagcagctggggtgcagtgagcccaccccggcaccagcccccgccccagcgcgcgcactcaccactcagcaggcgacccgtcgcggcccgcagccccaccagcagcacggccagcagcacggcctgtagcgcggttcccggcctcatggcccgactcgggtgcgccccccgacactcgggcgctacggcggtggagcgggctggcgggcagaggcgtgcgcgacaactgcaaccgcggcagcagcatctctaggccaccgacggaccgcacgggaggcgggggggagggcgcggagtcagtcggtcgcccctccgccccctggggcgtcactgcgaggagggcagccccgctggctggcccgcccccgacagcctcctccagcgaggttggcgccagacactcggccagccagagaggggcgagtcgcagaggggaaccagctccctgtccccctccgagcttccctgggagatcccgcgtttgcccgaggcgctgggcggaggaatacttcagtcgggcccctaggcaatctgataacgagcacagtgtgcctaaaactagcaccacatctcacccctcctctcccgctgaccttagccaagttcgccagctgtgcgggtgcacctggagagagaggcgatgcgtggactcctacctggggctcagcaggccgcagtcccagcacgaagggcgacgcctgagcagggaatggtcgatgcagagaacaaacactcacgcaggcagtgtgcccaccggccaggaaagttatgggacaccgcgcggatggcatccaaagaacttggctgagttggagccctcccgactgaaaggaaagcggcttctaccagaagccaaaagatgtcccagatccctggaaggaactgattctgttttttgcagggaacaggttgggaggtgtgggtcatagttagggagttcagctttggcccctcgccccgcaggaaagaatgaaactattatctcaggaaaagctttcctaacctagccctcaatgtgtgcttcctcttgtaaactcccaaagtaggtgtgtttcactttggtttcgtaaacaaaatgcttttaaatatagtcaagcaatagagtgagccatctgtccaaagattaaggcactaagtagcagaaggtgaatctgactttctgccttttctgccacaccatgctgctgtgaagcatagcagaagccccatctgggccacgacctctggattttggttccagcttgctgcttcttacgtactctttctgcttttcaaaacagccaagaaagcagtgatgcttctaaggcctctagccactgcaattctaaacaaacagcctgaatacaggctgggggtgagaggggagtgggatgaatttcagtatcagctgagactatgggggagctctgctgcggcacgtaacagctaacagcggttgtggcaggatgaggcctgacctttatggcaagatcatttatagaccttccttctgtcccagttagaatacgtcaatgtcacatctaacacactttcttcttagaaattcttggttatcaaaacaacttgagagaactgttatggtgaaaagaagcactggagttggcatttgagggtctgtttcagattctgctcttcatttaatgtctgtgtggcctttggcaattccgtttgcctaagtttcacttaactgttggtaacattaacagttgccttaagagtttagtgagtgtttgataaggcaaatatatatgtaaatgttcagatatctaggcacttaatgtcaattgaaaaggatttatttctaatattataacatctgctacaactttaaaaagctgttacataattaaatcgtgtcccgac

SEQ ID NO: 1577 - DNA, 1733 bp, Homo sapiens
agtcaggaccagcccagcagcccagccacagaggagccagcgaacctctcccggcgcctgttctgggggctttctgttccagcgtcaaggatggaggagggggagaggagccccttactgtcccaggaaactgcaggccagaagcccctctctgtgcacaggccacccacctcaggctgcctaggtccagtgcccagggaggaccaggcggaggcctggggctgcagctgctgtcccccggagaccaagcaccaggccttgagtggcactcccaagaaaggaccagccccttccctctccccagggagcagctgcgtcaagtatctgatcttcctctccaacttccccttctccctgctggggctgctggccctggccatcgggctctggggcctggctgtcaaggggtctctgggaagtgatctgggggggcccctgcccacagaccccatgctggggctggcactgggagggctggtggtcagcgcagcgagcctggctggctgcctgggcgccctctgcgagaacacctgcctgttacgtggcttctccgggggcatccttgccttcctggtgcttgaggccgtggcgggggccctggtggtggccctctggggcccgctgcaagacagcctggagcacaccctgcgtgtggccatcgcccactaccaggacgacccagacctgcgcttcctcctcgaccaagtccagctcgggctgaggtgctgcggagctgcctcctaccaggactggcagcagaacctgtgagtcttggagtgggcgagggacagggccaccacagggtcgcagaggccacacacccttgtgcgtgtacacacagtcactcacacgtacatactcattcgtgcatgcccacatgcatgcacacgtatacccacatgtacacgcatatccacactggcacgtctcgtgctcacaggtttcacgtgtgtggacacacacctacacactcctctacactgacatgaacatgttcttgtgcacacacaaaacagcctcacactcaggcacacactcacactcaaacatgttcatacacacacgtgtcatgcacacaaggtataggggtgcttgcctctccttgttctatgggctcagggccccaatcagccctgcggcccccacaacgtgcagggtgactctgttccccccgccagggccaggaggactacccaggagcttagttgagaagctgagcccacaaacttagaaagtcatttttctgctgggcacgatggctcacacctgtaatcccagcactttgggaggctgaggtaggcggatcacctgaagtcaggagttcaagaccagcctggccaacatggtgaaaccccatctctactaaaaatacaaaaattagccaggcatggtggcaggcacctgtaatcccagctactcaggaggccgaggcaggagaatgacttgaatccaggaggtggaggttgcagccaaaacagcaccactgcattccagcatgggcaacagagcgagcatccatctcaaagaaaaaaggccgggcgcggtggctcacgcctgtaatcctagcactttgggaggccgaggcgggcggatcacgaggtcaggagatcaagaccattctggctaacacgatgaaaccccgtctctactaaaaaatagaaaaaattagccgggtgtggtggcgggcgcctatagtcccagctactcaggagactgtctcaaaaaaaaaaaag

SEQ ID NO: 1578 - DNA, 3442 bp, Homo sapiens
atcaatcaaccatttattgagcccagatgtggtacagccccagccggagatgacccagaggtggggtcgggaggagagagatggggaagctgagtccggggccacaggtgcagccaggaggtgcaggtgagcagcgctcagaccagcctgtcagcctcagtcctgagcttacttctggtgatggagggagatatacagaaaagatcctgcagcctgcaggtgtggcacagctgatcttgggccaaggatgcacagctgtgtgtgtgcctggccaccggcaagggcacgcgggctcagcagcacaggtgtgcccacaccctgcgtgcctgtgtgtggcgcagcagctcccgacgcgtgcaggacacacacacagcacagacagaccctcccatggccacacggacaaagatggcttcactatagacaccggtgcagacaggatgtgcactgctttccaaggcctgtgcgcaacacagactcagggcctgtgggcatcagcaccgcccagacccaggcacacgtgatcctcagccaaggtggcctgtccagtcctggtgctgttggatggaaaggctaacctgggaggtcaggggctgtggtatatcagctgggctccctcggacgctcctgcagaagtggccaggacctcaggaacgcacctgctcctggtcagacaggaggggctgccgtgatgcaacttgcccgtgcctttgggtgctgtgagctggctgcgtgccacgtcgtttcgaggacgcaagaaggtgtttccaagtccagtctgtccaccgacctgaacctttaccattgaaagaacaaaggggtggggcccgagggacccttccctgccgtcccgtggtgtgtagtcagggatgctcctgcagacacacaggtgggctctgactgccagatcgcaggggcggtgccgtggtcctcacctgccatgtcactagcgtgctgacgcagacaccggcgagagctacagtgctcggcccggcacatcccagacaattcctctgtaaatgctgcagcagccagaggccccagcaccttgaggttaagcaaagagaaggaatagagttctccagagccccaaggagcgggagggtctgtcccaatggatgggctcagccaatttcaccctctcctccccctgccaacactgcggcctgcagcctggacctggcccgggttgtggaggggaccggggatgcagctgccacctgctgggcggacgtgggcctaggtggtcctcagccctcatgacaggagcccccgaagcactgttgcggcaccctctctgacattgggtgggagactctgggagccgagtgcagagccagggcccagcacgaaggccttgggctccagtccgtgtgccccacatccctacatgagtgagggtggagggatggtgcctctgccacggccacggtgccgccgtccacgtcagctcactctcagcacaggtgctgtgtgacggcctcgggccacaccgcttgttctgaggcccctagcaggtcgggcttgtgctggctgcacattggctggtgagcttggcgggtctgtgggcacggagagaccagaacgtgcgtaacaggcccgatgagggtgccaggctgtggcgacccccgagcttcagaggagaggggcaccagccgggggccctgcacaggcagcctcaggtgcgaggagctggagcccaggccagctggggaggggtggggtgccgtggctggaagttgctgttctcagacctggttctgagaccctctccaactgcatgggggggtccaggctggaccccagatgtgacggtgtatgtgctgggatgggagccccctgagagcagggcttttgttaattcaccggcaatcccacatgtctggcacgagataggtgctcagtcagtgaaaaccacacacggggtcctccattgtgtccaggggagggtgggccctgctcacagccagactcctagccctgggcagccctgctgcctgcctgctccttccactcctaccacctgcccaggtgggactctgcctgccttcctgtccccagtgctctgtaggagtttgaccacaggtatcctcttcatcagagagaggaaagctcacgatctgggagaactccaggcctggcccagtgaagacgtccttatcttcagcagacattgcccagtgcaaggggaggtcagtctcaggagacagtctcctggacagtggcgtggcatctgtcctaaggccttgcctgcagcacagggtgccacagaggtcccctgtgacagagcctcatggctggggcaggcgggggtcgcacctgctcctgcatgaagaggcagataaagacccacagcatggtctctggggtcccacatcccaggtagagaatgacccaggtcgctggcgtctgtgccatctctgctccactgaccactcatgggggtcctggagatcctgacaccggtggccggggagcagcagcccaggcacaggccccagtgcacatgcagatcccaccgtgtctgcacaaggccttgccccaacgaggcctgggtgccgtgtgagggccgggacgctaacacagcggagggtacccacgcgtgagctgctctggggtccctccccgtgtttcttcctgtaatgaaacttgtacccaaatgggatatgcagggttgcactgtgcagtcgctgtgtgttttagggtctcatacccgtgtgcgccagcaggaccacagctgtgaccggctgctccagaagaagtgggtgggttgagaccccaccggcagggtcactgggggtagcaggccctctgtcagcactgacttctgtatcatgtcagggatttttagggcggcaagctcaggtggacaggcagttttattctgtttcccatgtcaagtccagccccagactgactttctgaggtcacagacggagcctcaccccatccaaggcggtgtcctggactcccactgtgctccccagagggcagggtgagtgcgtggcatccttttggcgggcgtgggtgcctctgtggacctggcgtgaggcttctctgtttctgagtctcctatggaccatctgtcttctgtgtggctgctgaggaatcacactggggtggccgtgccggtggctgaatgagaacaggacccccatgctgcacagccctgcttaacgcgggggtggccccagaagcgggtgggcgaggctgggcagcagggattggctgaaatcatatgcagagcccaagaggcaggggaaaggcggcaatttcagggtccctttgttcgccaggtacctggggcccagcccgggcggcaggagggactcagcccctcgcccaggcaggaagggtcccaagcagaggcccctccctcaggcactccccagcccacacctgcagcactgggaccaagactaataaaacaccagcctcacgg

SEQ ID NO: 1579 - DNA, 1808 bp, Homo sapiens
agcggcccgcaaggatttgaaaccgtttggcaggggcggcggtggcggcggcgttggcggcagcggccgagcggaaagcttgcgtgtggtggtgccagattggattatggaagtgggaagtgaagaagaaaaatgggagaagctggatgcagaatttgatcactttgtggttgatatgaagccctttgttctaaaattacctcataggacagaacggcagaggtgtgctctttggattagaaagctgtgcgaaccttcaggaacaggtgcaggaataatggggaggaagaatcggaacctgtatgcaaaattgttattgcatatgcttaaacgaggtgcgcttgaaggcccttttacacaccgacctgaacccgggacactaaaaattctaccttcatacatgtccatctattttgatgaaccaaatccagcacgagcaaaaggttcaagcccagagggattaccagcctgggtactgggtgagctggagacaagtgaacacaaattaaatgaatcatggaaactctcttctggagaagataacactttagtacagtcgccaactgatgtctacagcagggaacagtacactgggaagctccgagtgagatcacactccttgagtccaactcacagagaagatggacaaaatattaccccaaagatttgtgaagtttattcgaaaaaatctcctgtttctttggatgatagtgacattgaagctcgccttaatagttggaatcttgggatagaaaatcctcgatacctgagacagaagcctatcccagtttctctgatgacaccgaaattcagcctgagaaaatccagcagtttccatgatgatcattttctctctcgaatacgtgagaaagagctggacatgaaaacaaaaatgatggaagctaaatttcatgaagaaaagcttaaactgcaacagaaacatgatgctgatgttcagaagattttagaaagaaagaataatgaaatagaagaactgaaaactttatacaggagtaaacaacatgaaactgaagagactattagaaagcttgaaaagaaagttcagacactgatacgtgactgtcaagttatcagagagactaaagaagaccagattgcagagctgaaaaagatatgtgaacaaagtacggaatctctaaataatgactgggaaaaaaagcttcacaatgctgtagcagaaatggaacaggaaaagtttgatcttcaaaagcaacacactgaaaacattcaagaattgcttgaggatacaaatgtgcgtctgaataaaatggagagtgaatacatggcgcaaacacagtccacaaaccacatgatcaaagaactggaggcccgtgtccagcagctgactggagaagcagagaacagtaatttacagaggcagaaattaattcaagaaaaagcagaacttgaaagatgttaccagataacgtgtagtgaattacaagaagtaaaggcaaggcgtaacacactgcataaagagaaggaccatcttgtaaacgattatgagcaaaacatgaaactgttacaaaccaaatatgatgctgatataaaccttctaaaacaagaacatgctctttcagcttctaaggcatctagtatgattgaagaattagagcagaatgtctgtcaattaaaacagcagttacaggaatcagaacttcaaagaaagcaacaactaagggatcaagaaaataagtttcagatggagaaaagtcatttaaaacacatctatgaagaaaaggctcatgacttgcagagtgaacttgataaaggaaaagaagatactc

SEQ ID NO: 1580 - DNA, 2033 bp, Homo sapiens
gagaactgtaaataccaagccttgaaagggaccatggtgcggcctgtgagacataagaaaccagtcaattactcacagtttgaccactctgacagtgatgatgattttgtttctgcaactgtacctttaaacaagaaatccagaacagcaccaaaggagttaaaacaagataaaccaaaacctaacttgaacaatctccggaaagaagaaatcccagtacaagagaaaacccctaaaaaaagactccctgaaggtacttttagtattccagctagtgcagtgccttgtacaaagatggctttagatgacaagctctaccagagagacttagaagttgcactagctttatcagtgaaggaacttccaacagtcaccactaatgtgcagaactctcaagataaaagcattgaaaaacatggcagtagtaaaatagaaacaatgaataagtctcctcatatctctaattgcagtgtagccagtgattatttagatttggataagattactgtggaagatgatgttggtggtgttcaagggaaaagaaaagcagcatctaaagctgcagcacagcagaggaagattcttctggaaggcagtgatggtgatagtgctaatgacactgaaccagactttgcacctggtgaagattctgaggatgattctgatttttgtgagagtgaggataatgacgaagacttctctatgagaaaaagtaaagttaaagaaattaaaaagaaagaagtgaaggtaaaatccccagtagaaaagaaagagaagaaatctaaatccaaatgtaatgctttggtgacttcggtggactctgctccagctgccgtcaaatcagaatctcagtccttgccaaaaaaggtttctctgtcttcagataccactaggaaaccattagaaatacgcagtccttcagctgaaagcaagaaacctaaatgggtcccaccagcggcatctggaggtagcagaagtagcagcagcccactggtggtagtgtctgtgaagtctcccaatcagagtctccgccttggcttgtccagattagcacgagttaaacctttgcatccaaatgccactagcacctgagtgtggtacaggaggaatgtttggttgggagaatcacagctttacaagggtgtttatatttgatttgtgtttatatttgaggcaggtattgtaatataaaggaatccattaccatgtcctataaatgacctctagccattttatgattatgttctctgtaaaactcttcaagacttcaatgagaagtttgtttataagaattatcttctcatacctttccttgtgaagagcgtattctgtttttctatcagttcgacatgaagtccacatcacatgctgttcttttctagttacatgatgtgcctttctagctttgtctagtttatagcaccttaactttaactgttcagttttatctggcagaggaaaacattcttatttctttcagaagacatttctgaaatcttataagctacttaagctacgttgtcagttttatcgcaaagatgtttcgtattttagccaaatctttttatagtacaaacttagaattattttacacactaaaatggttgcagttttatggcatatgtctccgatttagatggttattctctagaaaatagtatttaaagacattttatgaaatcttcattgtcaaaacctttaataaaagtggaaatattttgaaatgccctttttcttgataccactcatccacgtgttcctgattgtccacatttcatgataaaatgagagctctgcagagaatgttagcctttctgttgtaaatgtaatcttcaagtagtcactttttgttaagttctttagaaagtagttgtcaagtacttagtcatccctattatgatatgagatagtacagcttttcaggaagcttagatctgaatttactttgaaaaacaattgtaatgaatattttatatttacattgagaatttcaactagcttctgatcaatttttaataaaaaattttcaaatc

SEQ ID NO: 1581 - DNA, 2786 bp, Homo sapiens
acatcactcaggagcccatggggatgagaggcattcacagagcatcagggaaaatggaaagcaacattttgcttaacaggagaaaccgccccttattcatctttctcccacatcacctaactctagggaatgcttaacgtggcttgaaggaaatgaagacagcgacctaaaagcacacagatgcaagacttccaggaagaggttttcccatcctgctggactcctgtagtgtcagtatttggggctccctctaatgctacatttctgctgagcctgcagacatacttggaacccatcaccttcgggctcccagactcaggctccgcacagcccgcgagggaaacggtcatgggcacgcacggacacgtttccatctttgcatgtttatctacgtcgactgtgaattcaagcaagtgtggccctcgtggacaacctacgagccttagggacacaaaaggcttcctgcgcaaactgcacggaatctcctgacaggacttcacgttaatcatcattcataggtgggttctggggctggaccccacggaactcctcttggttgtgtcttggacttctcactgccccaaaggagcctactactttggttttatggtctgaggaacagttaggcctcgaaggcctggcctagggagagtgcactctgcatcccgagctcccgccttccccactcggcggccgggaccgagtttcccgccccacagcccgaccagaggttggtggcagttggaggcagttgggaccggccccagcaggttggaaccggtctgggccgggccggaggaggaagggggggaggaagaggccgcctcgcgctctccctgcgcgcgtgactcacgctggccgctgacgtcaggcgtgcgcgcgcggcggggggggggggctctacgtacgtgtagtgctgcggtttctcgggctgtgcctgcagcacctgagcggtagcggccgggggcgccgaggaagctgcggagccgccgggcccggggcccttcgacatggtcttgtcttcctgcctcttcgccgctccccttttattattcagtctgcgcggtccgcgccgaggacccagtgcgcctgcgccgcgccacgagaacgtgaagaccccccacacggcagcaggggttgctgggagttgtggttctatgtccggctggaattttaccgtcggcagagggttgctggcaaagcacagggccacaatacccagggatccttgctgctagtgtcccggatgctgagggcctgcgacggcttctgggaattgcagtccggtcgcatttctccttcttaccagcgcgttttcagtttcatagggaagcctttccatgaaactggagcgcctggaggagaaggggcccagagctagggaggccctagcgatttctgcgaaagagttccaagtataatttcactgccaacagtgtcataactactttgcctttatacttagtacagctaggttcggttctaatgccagctcagagcagtgctccaagcagggcttaagaatctgtgttgtcggttcttagttctgggccctgtgctgcaggcacctgcaatccgccagcaaccccttcatccctgcggcgggtctaacctaagaggcattgagaaagctttgctaaggaggaggtacaccgcacgctacagttcccgcgcctttgccgaggcgcttcatttacctttgccaaactcgacacctggaactccacgacctgtgtgctttctcagcctgacacctggcctgaccaacttgtttccagtacattaagggccaaggacgaatttaatctccgcctagaatagtctctgaggtacactgacaagttgccagtgttgagaagcatcacagggtccagaggaaaggcctgggtttgagtagggcgtgcccgtatttatccactctagttttcttgtctggacgtcagcctttttacttgggacattatctttcccctctctgcttcccaccagtcaagcaaagttcttcactttataaaataagccagatgccccagacctaggcatttgtttctgtgagttttagaatgttctccgtagatattttaaccgttgtcatttaatttggtttttcatattgaatctatttcaaatccactggttttgatttatattttcttagatgggattatattaacaaatgattatctcattaaagaaacacattccaaataaccttagggatgaagggtggtggggctaatggaaaatcgttaatgtttgagtgacacatacttattttatttagctccaagttccctcacatcagaagccacatcacagagttgagaaactggtttttcctaaacaggctaaatcgtttagccactaggggcgtttgaaaatgaaaaattacaaaaggacaaataaaagttgtagtatattgctttaatcctatgattaaacgcaagttacttggtttatgttagcctcacaatactcaagtgtgatctgactgaagaaatagagttcacagcactggattttaaataatagatgtatatcatgagcttcagaataagtgtgtactggtggagttgggagatgatatcatccaaactgcttaatttacaaaagaggaaaccgaaacccagagaagctaagtaacttgcacaaagttactcagcaagttggtaacaagaggaactaggacagtagcctacaagactacatcacattcactgttgggttttgtttgttttgttttcttctgctttttttcattgtataaacatttttgattcttcctc

SEQ ID NO: 1582 - DNA, 2013 bp, Homo sapiens
atgaagtgggcgatccagactcctagcttcccaccgaggcactaagggaatcagagtgggtcagcgagtacgggaagtgtggtccacgagggctggttcctgagggagaatccacaagccccctcccctcttcagtggatactgaagactccctcgacgaaggacccggggccctggtattggagagtgatttgctactaggccaggatctggagtttgaggaggaagaggaagaggaggaaggcgacggcaacagtgaccagctcatgggcttcgagagagactcggaaggagactctctgggggccaggcctgggcttccctatgggctgagcgacgatgagtctgggggcggccgggcactaagtgcggagagtgaagttgaggagccagccaggggtccaggggaggccaggggtgagaggccaggcccagcctgccagctgtgtggggggccgacaggtgaggggccgtgttgtggggcaggagggccgggtggggggcccctgctgcccccacggctactgtactcatgccgcctctgcaccttcgtgtcccactactcgagccacctgaagcggcacatgcagacacacagcggagagaagccgttccgctgtggccgctgcccctacgcctcagcccagctcgtcaacctgacacgacatacccgcacccacactggcgagaagccctaccgctgtccccactgcccctttgcctgcagcagcctgggcaacctgaggcggcatcagcgtacccacgcagggccccccactcctccctgcccgacctgtggcttccgctgctgtactccacgaccagcccggcctcccagtcccacagagcaggagggggcggtgccccggcgacctgaagatgctctgctccttccagatttgagcctccatgtgccaccaggtggtgccagtttcctgccagactgtgggcagctgcggggtgaaggggagggcctctgcgggactggatcagaaccactgccagagctgctattcccttggacctgccggggctgtggacaagagctggaggagggtgagggtagtcggctgggagctgccatgtgtgggcgctgcatgcgaggagaggctggagggggtgccagtggggggccccagggccccagtgacaaaggctttgcctgtagcctctgcccctttgccactcactatcccaaccacctggcccggcacatgaagacacacagtggtgagaagcccttccgctgcgcccgctgtccttatgcctctgctcatctggataacctgaaacggcaccagcgcgtccatacaggagagaagccctacaagtgccccctctgcccttatgcctgtggcaatctggccaacctcaagcgtcatggtcgcatccactctggtgacaaaccttttcggtgtagcctttgcaactacagctgcaaccagagcatgaacctcaaacgtcacatgctgcggcacacaggcgagaagcccttccgctgtgccacctgcgcctataccacgggccactgggacaactacaagcgccaccagaaggtgtatggccacggtggggcaggagggcctggtctctctgcctctgagggctgggccccacctcatagcccaccctctgttttgagctctcggggcccaccagccctggggactgctggcagccgggctgtccacacagactcatcctgaactaggtccttcttccccatgttttatacagacggaccagaagccacctttttctcccccgctggccaggggctccacacagactaacgtaggcactataaggaccagcccaaccccatgggcgggggggcccatatggaccaggggaccttgccttgactgaggcacttcatgagctcagtgagaagggccctgtattcacctccactgcccccaggggctgtggacaaaccggctgggggactgcccagcctcccacctgtttatttaacttatttcagtgctttataataaaggaaacactaac

SEQ ID NO: 1583 - DNA, 2285 bp, Homo sapiens
acggaatccgggggaggccgaaacccggtagtcgatggaacctctcactgcaaaatctccctgctttttgaggctagagccgagaagaacgccacaggacaacgcgggggaagagggggcacctcccccttaccttgatggctttgtccatgtcgctctcctccgacatactcagtggggcccccacagccgggagaggcggaggctgctcagcagccctgtccccgcgcggccgagggagcaaagggctcggcactcgggcccctgggcctcgtggcgacgggcagcagccgcccctcgggaccggtggggatgaggaccccggcgccggctctgcttcggcgggcggctctaggctggcggcagcagcagcggcggaggcggcggcccctggggacaggtctttgtgctgggccccacgcggccgcctcctagcctcatccccagctggggaggcaggctcctggggtagggcgaggcggggagggcctcgacccggggcgccgtgcaagggcctcgcggggccgccgcttagacctgggctcgccaggtcctaaagaagagcctgcgcctccgcctccgccgcctgcaccgccgcgaagccgaagccgaagccgaagcagagctcggcgccgctgctcccgccgccgcctcagcgccacacatcgccgggacacccgcgccgggcagccccgccggccgccctcacgcacgcgctgtgccccgcgggagctccaggccgcccctcctgccgcccagcttcgtgactccacggccccacgcgccccttgctgccttccgctggggtttccgagccgcccccgaaccgcgcacccgacttgcaggcgtccgcctgggcctccctaagacacgccgcatacaggacaggcccctgggccttccgcggcgatggcgctgcgctaatgacgtcataggcccggactcgcgtgagtgcgcgtgcgttggggcctcagcctttatctccactctgcggagattcacgcctggaaaacgctcttctgagaggatctgtggaggtcaacccaggagagagaagacaggactgaagcactgaaagggtcctgccgttaagggcgcaggattgtatagaatatataatagcagtagcagctctgtttacggagcattaaccttacgtggagttatttcctgcatttcctcctttcgtctttacaaggtagccgtttggcgtcgtgaggtatggatgttcccatccctaatttgcaaaataggtaactgaggctcaggagagctagactagtttgtgcacagccgagaagtggtcaagctagaatgggaccccaggtttgtgctccctactctccaccgataacctatcaaagggctttgcaagagcttttgactaatcgtctgtcaatggttcttcattcacgtattaattgcacatcagtatgtgccaaatctactagacattggagaaacagtaggaacaacacatggtaccggcacatggatctttcaggaaaacgaagtaggtaataaacaggaaaaagcccgagtctgatgctaagaagaacataaacaggatgctgagagattgggtctctccacattgccccggctgctctccaacccctgagttcaagtgattcacctcccttggcctcccaaagtactgggattacaggcgtgagccaccgtgcctggctgagaagatggatttaagacatattttggaggtaacattgtcaggacttcctgaaggattagatgtggaagggaaggataagaaacagaccaaggataactttcaaatgtatggttaagcaactggatggataatgatgccattgagtgagtgaaaaacttgatggaagtggaagattcagagttcatttctatctaggttaatttgagacataccagagcataagttaagtaagtaattgaatattggagtggagacttatttgtctaccgaattattgttttctttgtcggacatacacctacactgcattcctcaaagtaaaatttaagtgtggctctgtgcctatgctctccccagcggaaagtgaccagaagaggtgtgcagtttccaggcctggcccatacagacctccaacaggtgctcccctgtgctgttactccttctgccaactggaagcagatggtgaccaggctctggagaaggcaaggcctgaagatgggagattcctaagtggaggagaactgtgccttactgacctaaatatccactcagtattgttatgtgagaataaataaacttgtgttgaccgttt

SEQ ID NO: 1584 - DNA, 2106 bp, Homo sapiens
ttcatgctggtgagtgtggtgtcccaaccacagacggaggggctgtcacgcggcgggtcccacctcccactctgtcatggcgggatttttgtcatgtttttcagatttctctggaatccccttggccaagaagggtccattcagcttgttggtgcgggagctcaggatttcatttttagttctcacatggcaggtgagtgaaaacgttataagggactatccaaacctttcccgaagtggctgtagtatcttaactctcaccagtcgtgtgtgacagttttggtgtctttaaaagtcggtggtgtcgagatttcacaactacctcttctgctgattgtgtggttctatctgttcgtggcttaaacttgcatttccctcatgacaaaaagtgtgaaaccatcagtcatgaactgtctgtccattccaatctcttctgttcatttttaaagtggggctgtgtatctttttattgatttatgatcattctttctatattctggatacaagatttttgtgtgggatttgttttgcagtatctccccagacttcctggtcattttctttgtagtgtcttttgataactagagcattttccttcggataaagcctaattgattatttttaaatgtgcttgtcactgctttttcctccctgccaggaagtgtttgtgcactctcaggtcacacaagagatggtaatttgtcagtgagctgaggaaggcagatctggcctcagctatgagggtgggtagcacccagcccattgcagacccagactccggaggttcctctgtcttcttgggctggggcgtccatctcctcctgcccgcagacacaggagtttctgggtcccaggccttgcgctctgggactgacaccagcggtttgggcttggactgaatgacgccaccggctgttcgggttcactggcttagggacagcggtttgtgggacttctcagcctccgtgatcaaggagccgattcctgtaataaatctcctcctaaacgtatcgcccagcagctctgtttctctggagaaccctgactcacatatgggggcctagaggtttggttgtagcaggccccaggccctgttccagcacctggcagtacccccagctgatgggccccaggtggggagggacagccggcctgagggaggtgcctcctgggccccaccgtgggctcccgtgcagacaggcagggtggggagcaaggacaaggctgtcccctcctctggcctccgtctacaggtgggacttctttccagccctttctgtgggtggggggtgcacacgggcaggccagccccaggcgccctcaggaccgcaccctaggcctgccttggggggagtggggatggggctggggcctcaccttgctcaggacccaaccctggtgcagctccactcctggcttttcgcctgcaggacagaggggcctggagtggcctggccctgccgtgggcagcatggcgtgggcatgcagggcgcagactgaccactctgttcccacacctggctcaaggtgggtcgagggccttcccagccttctcagagctaacccagaggagtgcacaggacggctcgtctcccccgagagccacagggagtgctggacccgcctgagcggggggcatatggggctcagcacagcactgtggggcctggatgagaagccgctggtctcttctgcccctccctgacattgaggactggaaccttggggagcctcgggtgaggtcgcctcccaggaagtcctgagctgagacatcgcgggcccattttgaggtggctgtgaggggtacaggtgagtgtacttggggttccttcaaggccaggcccagcaggtcacctgcagaaggccttgggcaggtgccccccaccccgtcctggaacaccattcttccccatcgccccagaggaccaggcccaggcaaggctgggaatgcttagccgacctgctcagcatgaagctcctgccccaaccccctccttccaggtgcccggcctgggctctgccagaggctgaggtgcccagggtgtcaggacggccaccctgaaggccctacccctttataggaaataaagtcttctttccaaattt

SEQ ID NO: 1585 - DNA, 944 bp, Homo sapiens
gatcaggactcctcagttcaccttctcacaatgaggctccctgctcagctcctggggctgctaatgctctgggtctctggatccagtggggaaattgtgatgactcagtctccactctccctgcccgtcaccgctggagagccggcctccatctcctgcaggtctagtcagagcctcctgcatagtaatggatacaactatgtggattggtacctgcagaagccagggcagtctccacagctcttgatctttttaagttctaatcgggcctccggggtccctgacaggttcagtggcagtggatcaggcacagattttattctaaaaatcagtagagtggaggctgaggatgttggggtttatttctgcatgcaggctctacaaatgccaggaacttttggccaggggaccaaggtggagatcaaacgaactgtggctgcaccatctgtcttcatcttcccgccatctgatgagcagttgaaatctggaactgcctctgttgtgtgcctgctgaataacttctatcccagagaggccaaagtacagtggaaggtggataacgccctccaatcgggtaactcccaggagagtgtcacagagcaggacagcaaggacagcacctacagcctcagcagcaccctgacgctgagcaaagcagactacgagaaacacaaagtctacgcctgcgaagtcacccatcagggcctgagctcgcccgtcacaaagagcttcaacaggggagagtgttagagggagaagtgcccccacctgctcctcagttccagcctgaccccctcccatcctttggtctctgaccctttttccacaggggacctacccctattgcggtcctccagctcatctttcacctcacccccctcctcctccttggctttaattatgctaatgttggaggagaatgaataaataaagtgaatctttgc

SEQ ID NO: 1586 - DNA, 2194 bp, Homo sapiens
gaggtggggaagccatcggacgtcggcggtgaggatcttctcctgacccagcatcgctcatcacaatgaagaaccaagacaaaaagaacggggctgccaaacaatccaatccaaaaagcagcccaggacaaccggaagcaggacccgagggagcccaggagcggcccagccaggcggctcctgcagtagaagcaggaggtcccggcagcagccaggctcctcggaagccggagggggctcaagccagaacggctcagtctggggcccttcgtgatgtctctgaggagctgagccgccaactggaagacatactgagcacatactgtgtggacaataaccaggggggccccggcgaggatggggcacagggtgagccggctgaacccgaagatctgccctcttaggttcataggccaaagtgatgatcgtgtgtgcaggacctagagggcgctcccctgacccacccctttccttgccatacttcatcctctgggaacaaagctgcttgtttggtttgaggggagttggtttggttcttatccctcagcgctgagacatagaggcttcctgggccactacagtgagacacgaacttcaagaatctgaatacccccgttttctctccccgccaaggcaaaaaaggacttagtactacctgtggagaaggaggtgcaggactaccaggccctgctgctttgcatttacagccctccccagacagacacaggcaccctcatcatacccaaactggacttacctgctaggcaccttcccttccccatccaaaaaaatggagttattttcccttatttcagcaagtccagttgattttacctttgaagtagcacctgagtccttcaccttctctccatcccttctctctcacctgacacaggtctgcagcgctcctctagtaggcaggacagccattccttggggatgcacatgtctagtctttgcctagatatggcaagtctttgccaactgagctaggctgttatgttcttagaggcattgtttttgcccattcttcccatttacaagagaatcagggacacagaagtgagggcttccagcccataggtgatcaatcctggggtcagagatttgagtgtgtttattgcttgccttcttgggagcagattccatccataaaccatgtgcttaccaaggtctgactcactgggagagaaacgacgtgaggttggaaagctgaccttccagagacttggggcccatgttgtgtggtacacatgggagtccatcatatcagattgagatggggggctgggcaaagtgccctggtctgtggctgtggggctaccctgagaaagggagcgcctgacaagccgactgctcccaccatctttgttgcagcatatcgacaaagtcttcaaacacaaggacctacaacagcagctggtggatgccaagctccagcaggcccaggagatgctaaaggaggcagaagagcggcaccagcgggagaaggattttgtgaggctcaggccccagggttggggtgggggtgggaggagacaggctgggctctggctcagctcatagccgggttatatgggagaagtctggccagaccaggcacagattccttgagtaccagtctgagagcaggaagcctcagtgggtctggtgcttgtggctaaaaaccaaacatagcccctgggggcttctgacaggatctggggttctgtcttggaaatagctcctgaaagaggcagtagagtcccagaggatgtgtgagctgatgaagcagcaagagacccacctgaagcaacagcttgccctatacacagagaagtttgaggagttccagaacacactttccaaaagcagcgaggtattcaccacattcaagcaggagatggaaaaggtaactgtggtccaggccaggcatggctgctggggcataagctgcttcattcaaaattgttgggcctgccttcaggaagctcccatctggggtgtctcaagggcagggctgttaggaaggttcacagcctttcccctcttgaggcagtatcagtggtatgtatacactccaggttgtcccagggaatggggcagtcttttctgtttgtttggtttttttggggggtttgttgttgttgttgttgttgttgttgttgtttgagatggagactctagcctgggtgatataccgagactccatctc

SEQ ID NO: 1587 - DNA, 2842 bp, Homo sapiens
aagtccagtggtcacatgcaatatgtaatgacaagaattcaccttcgtatttctagacgatgtactgctgctgctgcttgatccttaagttttcaatttagacgttagttaagggctttttctatggaagatgaagaggctgagatctctcctgttcactgccacacatccacatccactctcacacacacacccactcacactcacacacatccactcacacacacacccgctcacacattcacatccactctcacacacatatccactcacactcacacacatccacacacacccccacacacacatatccactcacacacatccactcactgtcacacacatcactcacactcatttactcacacacatccactcacactcatttacacacgcacacatgcactctcacactcacatccactcacacacgcactctcacattcactcaaacacacccactcacacacatccactcacatccactcacatccagacatccactgtcacacacacgcactctcacacacatgcacacaaacacacatacacacacacatccactcacacacacccactcacatttactcacacatatccaatcacacatccactcacacacacacccactcacacacacacacatgcactcacacactcacacacacatatccacacacacatgcactctcacacacatccactcacacacacatccactcacacacatccacacacacacaatgtttggctaactcaagacttggtgtttatgttaatgattttagcccatccatgtagaggattatagatgttgccggccctttcttctctgtagcattgatcccggcttggtgcttggtcttcaaattgtttacagtgttgtcactcaggaatgcccagcgtgaggagaaagaatcccctcttacattcatgctcacacacacatccaccctcacactctcacacggcacacgcctgcaggtgccctccaggcctccccgcgtgccgctgggcttcctcacggcatggtggtctcagggcggttgcagtttctcccatggcagcccagggcttccacgagggcagcactggaagtggcagtggcctctccgcggggccgggacaggggcaggtccctccagtgacttctcggcggggctgcgacaggggcaggtccctcctgccctgctgtggtcaggcagggcccatggggcgcctttgtcctgacaggaggagtggcggggctggcgtggccccgtgcaccctcggctctgcaggctccgctgccttccccgtccctgtgctctccacccaccggctggtggagaactggggctgacagtgtctgtctctctgtttgttggatttagggggctgctctcttcagggcccagggttggccttgggttgcggggctgacgggatcgtctgtccccgccaggtctttttgcctgaggtggccatccggggcctgcgtgggctcaggtggggggtgatggaagcagggctgacacctggggctccgcacagatctgggaaagggttttcccctcagggtctagccctcccttcccaccctgggatccccatgcgtggggctgtgtcctggtggagggggcttggggctcctccccaggctcgggtctccacggggccgtcagtgcgaggcgagggtccccggagtcatgtatgggggtccttccacaccatgagcccggcacaggcatggtcgtcagcccccaccaagaggccacaaggctccaggcccgctggcttctccgtggccctgcgtgtagggcctgtggactgcgggacttcagggctgtggtctgagcccccaagcatggaagaccctgcactctctcccagcacagccgggctgtgggccctgagggaaggagggccggcaggagctggggggcggtggaggtcccgggtgagcctcaggccctccggggcaccctgacctgctgctcagaccttgaggggctggtcccccatactcgaccctgagttaaatctctgcccctttttgctttcccccaaggtcaccgacgatgagggcgcacctgctgtcctggagcttccgatctctgttcggggaccctgtgagccttctggccggctgcgtgcagagcccactgggcacggtggtcggcctggtgtgaggccccccggggaccggcagtgtgtccagggaggggatggccctgagcccagcggctcctcccgctgagtgtatttcttcccaccactcagcgcatggctgccctggctcacgaggcagtcgggactcgtgacttgctggctgctggctgctgctgcctcgcgcgctggggttccatggaggaactgggcctgccgccccggcctcacctgctgcccgcatgctggggtcccatggaggaaccaggcctggcgccccggcctcgcccagcggctggtgtgggcagctgttccctgcctcgcagtgtcctggaggcagctgtctcgcagactcagcttggtctcccgcaggcttcagaaaaacccaattgcacgtgtgggattcttccccagcccttgggtgcggggtctctgtgcacttgagagctgggggacccacccaccgtctcccactccaagttcatcccagagcgtggggcccgctgggcacctggcacctggcctgcagatgctgctacgagtgaccagtgctgtgtggaggaggccaagggcggcccctgggaaaccgggcttcaacagtacaaggaaaagaaacttgctctgttttgtaagagcgtgttccttttcctcttttttgtcactttaaagaccaaaaagaataaagaaagaaaag

SEQ ID NO: 1588 - DNA, 2025 bp, Homo sapiens
agaatgcagcggccgccagcctggagcgcgggccctggggccgcaacccgcgccgggcgaggtggcagcacaccctgggccccccactccccgccgcaagtcctgaggatggccagcagagaaacaagaaaatggactccctggctgctggagagttgaatgccagccaccagccatgggtgccagagtttgtagcctattggaggaaaacacaccaagggaatcttcaaactcttcttctccactggctcctgctgtgctcctgtctccatcacctgtataatgcttcctgccatcctaccttccccgtggagtacagccatgctgtctgctgcttacagccaagattctggaaagaaatgtctcctttttcctcgtcatcaaccactcatttattcagcaagtgtttcttttacacttgcctgtgctgggcatggcagcaatgcagcagtgaacaaaaccaccagccctgctctcatgcagcttataatcaagtagagagacagacataaatgattaatagatgctcctgtaatggcggttgtgaggtgtgctgccacagcccagccacacacgccagttcccttctctgcacatgtacatgtctgctcatccttcccacctgaactcatgtgccacctcacttatgccccttcccaatgccgcacccacacaacagggtgtccctctgtgcccacagcagcccttgggtataactgttccccacagaggctgaaccccaagggcagagtccaggccacactcaccacggagacccctgcctggcacagagcccagcccagcagagatgctcagaagatgaatgaaagtccctgctgagattgatccaatctgtttgtgaacatctctggggtccaagaattcacggctttctttttctttagagagccttttgtttctttttgccattatatactatatttgggttagggcacaacaatgtgaatatacttaatactgaactctacacttgaaaatggttaagatggtaaagttttaagttatatgtattttgccacaattttttaaaatgcagagcataggtacaaagaaggaaaaaaagggggcaaggtccattttattgagaaataaagaacaaagggttcaattcagagaggattggattttaaaacgtaatttagattagggaaatgcaaatgaaaaccataataagtaagataccacttcacatctgttaggatggctattttaaaacaacaaaaacaacctgaaaataagtgttggcaaggatgtgaagaaatagatacccttgtgcattgctattgggaacgtaaaatcatgcagcctttgttgaaaacaatgtggtggttcctcaaaaacttagttatcatatgatcccgcagttccacttctaggaatatacccaaaagaattgaaagcagggactcaaagtgatatttgtacaccagtgtttgtagcagtattattcacaatagccaaaaggtggaaacaacccagatgtccatgacaagaggagtggataaacaaaatatggtgaatatgtacaatggaacataattcagctttaaaaaggaatgaaattctggtacatgttataacatagatgaaccttaaaaacattatgctaagtgaaataagccagacacagaaggaaaaataccagatgatcccacttatatgaggtacctagaatagtgaaattcatagagacagaaagtagaaggatggttgccaggggctggaaggaggaagaacagggagatactgcttagtggatgcagagtttatgttgagggtgatgaaaaagttctggagatggatggtggtgatggctgcacaacagtgagaatgtacttcatactatggaactctgcacttaaaaatggttaaaatggatgtagacattttatgtctattttgccataacaagaaagtaatttgggtgtattttagagattttagaaaatactgtaagcacaagaggaaaaaaattaaaatcattcgcaatcaccaggtagagac

SEQ ID NO: 1589 - DNA, 1936 bp, Homo sapiens
acacagccgcagtgccctgtgtgtggacagcctgtgggagactcgcacgcccacactcaccccgcctggctgcacccctgcccagcatgtcggcgctcgagtggtacgcccacaagtctctaggcgatggtatcttctggattcaagaacgtttctacgggtcgggcaaccgtgccaacatctggctggtgcgcggctccgagcaggacgtggtgatcgatacaggcctggggctgcgcagcctcccggagtacctgtactcctccggcctcttgcaggaccgagaggccaaagaggacgcggcgcgccggccactgcttgccgtggccacccacgtgcacttcgaccactccggcggcctctaccagttcgaccgcgtggcagtgcaccacgccgaggccgaggcgctggctcgcggggacaactttgagaccgtgacctggctttccgatagcgaggtggtgcgggcgcccagccccggctggagggccagacagttccgggtacaggcggtgcagcccaccctcatcctgcaggatggtaatgggcccccgcgggcgcgcgctctcgttaagggagggtattgggaagagactgtccgagtgccgcatgttgcagacttgcgtggccataaaggggattattttggcacctcgcagagccacttctgtttcacccttccctgagtaaaaacccacttgaccagagtcaaggccatcacagccttccctgccagagaccagctctggcatcgtgtagagattctgagtactcctttgaaagccggcaccaccccctccctagccactttcctgcatcggctgtagcagtaacactacaaagacttgtgactgactagggatttctcattctttccctaagcacctgcccgacatttccaggagctttcgtagtgagcagacttttaaggaatgacccctcacggagagtgcatgtcatgatctgtgcttttgagaattgcagacttcatcagcttggtccccaccgggtatgggcagttcccacctgtagccttagagagtcatcagaccagtgattccaatccgctaatgcgattggaaacctttcagataggtttctgttcttgatgttgcctcacgattgcaaaagcttaatagtaatcataaacgtagaatatgtctgagtcttactttatgacagatatttggtccggttgaaagcaaagcctgagaaagatcaataaggaagtaattttcggtagaggtaaattatgtggactaatgcataggtagccatggtcctctttggctctgtgaaagacaagtatggaattcagagagaaattcatggaatgaaaataaatagggcctcagcccattctccctacgtagggacttaaataattgagctaattcgccacatcagcaatatttggtatattagttttctattttctttttaaaatacttttgatttcattttatcttcacaacacatttaaagtgaggccactgaccccccagttaaatggcttgcctgagccagatcatgataaaagctaggatatgaatctaggcacaatagatcaaggcatgcagaacatacataaatcctgcctcataaatatatgatgattttgagtagaatgtgaaagaccccttctttcctttagcgtgagatcattttaattaccaatgtggtatattaaaacgtgcctctatatggtagaaaaattcagttgctgcagtataatgaagctcactttatgaccaaacaatatggcaaataatgaaatattttacaaaaatcagtttatctcacagatgacatcttcatttgagatattttaaaaattgcaatattgtactgcttatcggtgctaaaaaaaaaattgcaagattctgtacctcacacccaccgaacaagtcttcattaaagttttaaatctaaattt

SEQ ID NO: 1590 - DNA, 3077 bp, Homo sapiens
cttaccacctcctgtcatcctggtccaaatccccattgtcttgcacctgattaattatgttacctccttattggtcttcctgcctttctccttgcccctctgcctatcctcaaaggacatccacatttatctttcaaactcaggtcagttatggtaatacccagtctcttaatggctctcaagactttccccagtatctagctcccggcacttcttcctccttcctccaattctccccttttctcaccccacattgccctccttgttctctgaatatgccaggcacattcctgcctcagggtcttcctcttgctctttctctgcctggaatgtccttcttccagatatttcattcaagtctgctcgaaggtcactttctcagaggggccttccatgatcattctatttaaaatcatacccctaccttatactcctaattttccttccctgctttatttttttccgtagcacttatgtatagcttacttttttaaaaaagttctgttttgtcttcactagaatgtaaggcctattaaagtgccttgtacttatcagatattcaataaatatttgtcaaatgggtgaataaatagtatcttcaactactttttttcagtcaaatatatactaattgtctgccctgcacgtagcactgagccaaagaatgaagacatagcagcaggtcagcagatagtcccatttgcaccatggcaatctagtgaagcaaacacagacagaactagctaacaatatgatgcaacaaagaaaaacctagcaatttatatgtaaagcaccagttatatagaggccaaagagaacatttctacttttggtagacaatgaagagaggatgttggagtcggctttgaaagacaggtaggactagaataggcaaaggaagtgcagtggtgggggcattctaggcaggtgaagagtatgagcaaagttctagaaacacagagagaagtgtgtgtgtgtgtgtgtgtgtgtgtgtgtgtgtgtgtgtgtgtgttgggggaacagaggtttggtgaagaggttagttttttagggtagaaggaagtagggcagttatagtgcgaaacctagactggagccaggctgtgaaacgtcttcaatgtgaggctaaaccgttgggtttttatttgacagatagccattaaagggttgatttctttggagctttgttttaaatgaaggaatgtggtgtgtaaagaggtaattcaggaatattgttttggtaacactggctgtaggagattctagatggaggctgagttaagagactgtagcaatagtttagttttttgggtttttttttttgttttgttttttgagatggagtctcgctctgtcacccaggctggagtgcagtggcgcgatctcagcttctcagctcactgcaatctctgcttcccaggttcaggcgattctcctgcctcagccttccaagtagctgggattacaggcacatgccaccatgcccagctaatttttgtatttttagtagaaacggggtttcgccatgttggtcaggctggtcttgaactcctgaccttgtgatccgcccgcctcggcctcccaaagtgctgggattacaggcgtgagccaccgcgctcagcccaatagcctagtttttagccatggcaattctcagtgtgggaggggcaataggaaggaagggatgaagtgagggaagtcacaggggagaacttgacagggcttgctggtctcattatataatttagaattaattatttacgtagacaaagaaatgacaattgctcaaagcagagtcacagtataaacagatgttatgtgaaaatattttggagcttctcatatggatccaattcaggcgggcggtaaaccatgccaaaatatgcaggtattgaatgctgtaattgtacagaactactacaagatgcaaacttgaacactgtagactcattttaactgtgaaccaagtttgaactgtctggagggagaacgcctatatgctatgttgtctcctttaagacctgcaataaagggaaaatagaaacatggaatttaaaaaaattctatcctcttttttagacatatccaaagaattaggttaaataacaaagtttaggcaaaccaaagtggtatttgaatggcttctgcacctcttaataactttctaaagtcaaattggtataagagcagttgtatctggaaagggttagggggaaaaaggctattgtccatcttttagatttaagcgcattttaaagtgagagcttaaataaaaacaaagaacttctataaattgagtgagagctcaagtttaaaaaatgagagctcctatacgaaatagaggggtttggtctaataacagggatgagatgcaaaactaaatacattgtctatggtgcattcattagagaaccaaaagacgtaccacttatatttacgctttggagattgctagctattgttcacttatacccacttgtttcatttttgcaagtgacttctgaaactacttaaattcaaccttagatttctgaggtttgcgggatagtgaaagctgaagaaaatgggagggaaatctgaccaaatctcccaggcacaatttcccaggcagaggctagaattaaaatatacattcttattcctattcttaggtagttattattcctgttaacactctacttttatgcaaaaatgtaaaaaccaaagaaattactcagctatcaagccagtacgtttagcactgaaaaagagaaatattatgtcctgtcagtttttccatctcccacttaacacacatacagttttcctttacttttgtcagtctcttctacctttttaaaaatttattttccttaacctcctcctcagtcaaccagtcactcacctttgtgagattatatgatactgtgaacagtatatgtacaagcataccacagagatactgtagattcagttccaggccaccgcagtaaagcaaatattgtaataaagcaagtcatgcgaattttttggtttcccaggcacataaaggttgagtttatgctgtagtctatcaagtgtgcaatactattatgtct

SEQ ID NO: 1591 - DNA, 2181 bp, Homo sapiens
acatgtggccactgctcaccatgcacataacccagctcaaccgggagtgcctgctgcacctcttctccttcctagacaaggacagcaggaagagccttgccaggacctgctcccagctccacgacgtgtttgaggaccccgcactctggtccctgctgcacttccgttccctcactgaactccagaaggacaacttcctcctgggcccggcactccgcagcctctccatctgctggcactccagccgcgtgcaggtgtgcagcattgaggactggctcaagagtgccttccagagaagcatctgcagccggcacgagagcctggtcaatgatttcctcctccgggtgtgcgacagggtaagaggattaaatgacacagtggcacctggcacatagtaggtactgatgaacgtctactgaatctggttcttctggcactcagctcaggtcgggaggaatggctgaggatggctgggcagggggacagtccgctctttgttttttccctgtatcagaattattccaaagattcttagaagaaaagatcacccaacacctttgaggcttaaacacctaatccttataaccaccttgaaggtaacaattcctcccacttgacaaatgaggaagtgacgcccagcaaggttcagacatctgtcctgggtctgacagcaaataagtcaccagccagtcacctgagctgccggagccagtttcttcatgtacaaaactgggggtgcagaggttgacggggtgactaatgagggcacacaaacctgaaggaggcccgggctcggtgtgacacctggctgcacccaacatatttaagttccttacttccctcccctggcacaaaggagccgagctggcacagccaggggcagtcacggagctgcgggggaggctggcagggaaagggaaacgcttccccagcccagactctagctccctctggctgcggggagccaaggccccggcccattagtcggtccttctggactggaagcaggctggtcccgtttgtttccagggaaagcgggttaggactgcctgtggaaggccccgttgcaggctcctcacaaccccagtggtagacattattccccccacgcagaggaaatgaaggctccgtgagtgactgacacggcgataaaccaagtctaacttggctcaagatcttttctttgctgggaggggctggtgaggctgcagcagagggtcccccaagctttctggccaagcgacctgggtgggtgtccgtgactgtacctgctcagggcttgcctctagctgcctccgaaccctacccttttccaggctggtggcccaggggatgcaggaacagctctagtctactaagctgaacccggactcaatgctaacgcgtgcccccaccgccttgagggttgggatgggcctgtcactaggccacctccaaggaaacaaatccctcttcccactcacgtcccgccgggacattcaggggcctcagcttgaagctagactggagcaatcgccaagcaccgctcccctgcaaggcagcacatccagagcgaaacaaagagtcaagggttgtggctcctggaaccggcattccctctgtccacagccgccccaggactctgctgggccggggtcggggcttcccactaggggctcccaaggctacgagccaagaacccacgcagatgaaggtacggtggggtgcaggggcagaaagaggagggaaaatgggccggccagaaagccgacttggaaccctgcagtgtcatcgcagccaagtgtcttcacctcgcagggcccgagtcctcctcggtaaatgagtccactcggtcccatggggcggttgggtagctttaacaagccagtgagccccgggtcaccgcactctcctcacaggtgccccaacctggcatccgtcacgctctcgggctgcgggcagagcacagcgccgccgcggccctcggcaagctgctgcagcgctagacgccgccccgccgctgcccccggggaaggagcgcagccccagaccgtcctggcttcgaacccagctcttccaccttcagaccaccaccgcatattctgagcctcattttccccgtctgcacagtggggataagaaagcctacctcacgttacgattttatacataggataaacgcaagattaaatggatatttgg

SEQ ID NO: 1592 - DNA, 1988 bp, Homo sapiens
agccgcgagcggcggccgcggggccgaggagcctgggccgggccgggcggggactactccggagtcaggaggcagcagcggcggaggacgaggatctctggcagtcagcgccgctcggacgccgccggcaccatgggctgctgcaccggacgctgctcgctcatctgcctctgcgcgctgcagttggtctcagcattagagaggcagatctttgacttccttggtttccagtgggcgcctattcttggaaattttctacacataatagttgtcatattgggtttgtttgggaccattcagtacagacctcgatacataatggtgtatacagtgtggactgccctctgggtcacctggaatgtgttcattatctgcttttatttggaagtaggtggactctcaaaggacaccgatctaatgacattcaatatctctgtacatcggtcatggtggagagaacatgggcctggttgtgtcagaagagtgctgcctccctcagcccatggcatgatggacgattacacgtacgtctctgtcacaggctgcatcgttgacttccagtacctggaggtcatccacagtgctgtccaaatactactctctttggtgggttttgtgtatgcctgttatgtgatcagtatttccatggaagaagaagacacatattcatgtgatctgcaagtatgcaaacatctttttatccagatgctgcaaattattgaataagcaagaattagtaagatattatcaccaaattgtcacatcagtcaagcctcatgtgcttcctaagaactgaggtgatgcattattttagagtgtcattctaaaccccagattcaacatcttcctaatctttctagtgcagtctaatatataaattttatgaaaagcataggtttttttttaaccagcagtgctctttgagaatttacattgattcctaaagattgccattgctttgtataaaatgttataaattatcttagcatcttacctggaatttccactaaattcaccaatttatgatttgtgaaatctgattttactttttgaaaattttcatgtgaatttcccattttcagtgttgtagcacctctctcttcctctaagatcctccaagctcatcaaaagccatgatcttattataccagcagttttatttattcaatctttcaacaagtagttattgaacttctataatgtgccaggctctggagctcgccttacaccaaacagacacaatcgatccattcgaagtgtcgtaattacacattgagggaccaactagaccttttctcattgtaaacttggagcaaaagtaaattcattaaaataaatttacattatagtgccacaaaaaaatgaacagaaccagaaagcattttttacaaaaattaacagaacagtgtgatagaggggaaaaggatgtgagatcatggtgccctaccttcaatagggtggccagaaaacacctctctgaagaagcagcatttgagctgagacctgaagaacgaggagtcagtgatgcagagaacctcaggagatgccttccaatctgagaaaagaggtgtacaagcaacatggtgccggcacctgctcagcttttggaaaggactcaggaagcttttactcatgatggaaggcaaagcgggaggaggcacatcacatagcaagagtggaagcaagagagacgtcatgctcttttaagcaatcagctctcaggtgaactaatagagtgagaactcactcatttctgtggggagggcatcaagctatttataatggatccatcctcatgacacaaacactgctatctcccacctctaacactggagatgacacttgaacatgagatttggaggagacaaatatcaaaactatatcatatggtttgcagatattttcttccatccttgagttatcttttcattttgttaattgtttcctttgctgtgctgaagctttgtttaatgaaatcccatttgtct

SEQ ID NO: 1593 - DNA, 3308 bp, Homo sapiens
ctgtttcctaaggtagggtgggagtgtgtgtgagtgtgtgggggggagagggtgagagtgtgtgcgtgtgttagtgtgagtgtgtgtgtatgtaaggagcaggagtgactgggtcctgagtttagggagttgggaagaggaaggagagatggagacaagcctggaccaagagccactcagagctgcctggaagggaagccaggctgagaaaaaggcaaggcaaagaaataagacactgacaaggatcaagccagggttgagtagggactgggaacagagtctgcctccatgagaagctgtcacattgctgctctggtgccctgtgacagcggcaccatctccagctggagactcccctctctggatcttgtcattgtgactttgctttgttggacaaccaggagtggtgataggcagggaatatggtgcccagggcagctagccatgccacgccagtccagctgccaacccacccgtcactggccatctcatcacctgctggagggagtggggtggtgcagatgaaaccagcgatcagcttggctgcccttgcttcctagtgccacagtagaggctaggggagcaactggctttcctccccaaaaggcgggcagggttatccacactttgcccaggtccctgaagcctgcggctgagctcggggataacaggggccaagtcaccggtcccagacacctaggaactattagagacaggaaccagcatatgagacaggggcttttaagtaggaggttggagaacacacgtttttggtctaaaccgggggcccctctctttgcccactgaacccgcggcctgcgtggtgctgagactgcctctggccgcgtccgcttgggacagggcctgagcggtggctgatcccacctggatgtcctgggccggctcccacccgacgcccgccatcccgggacgtggtggggagaggctggcgctgctccttgccatgcttggccgctgctgcccggctgggggtcccgagtcgcacacgccccgcaagccctggccaccgacccggagggaacgccctgggctacggtccccgaagccaagagaagaagcaggtcccagggccgactccaaagccgcatctccagctttgttcatgggtccgggaagcagaggccgccgccggccaccgtcgtgggcgagaagaagggcacgaggcggccggggctcctgcccggaaccacatgtgcgcgccgggcccgcttcttcatcgcacttgcggccccggctgcccggggcctgcgagtttccagccagggcccgggactctggcgcggtccggccgcgaggaaggaaggcgcggcccgggtgggggtagcggcaggcctgcggctccggccacggggcgggggcagaaaaacgaccccggcgctgtccgggcatccagctcggttcccgctgcagccaggagactcccgggagcgctctaggaaccacagagccctggaactcacctggcagcctcgcggcgctaaagccggcggagcctgagacagcgcgcggcgaggcggtcacgctccacccccgcgtggcagcaggactcggatttcgcccctggttttaaaattgtgccggtggagcccgggacgctgggaagagcgttctgcgcccctccagtcgcggtctccgccctaaaccgacttccagagccgcctctgctccctggaggggcgcagtggcggacaccggcgtcccacgaagtcgcaggtcctcagtctgagggctgccccacacgctcggaatgcaggagggtctccgcctcgctgcgctgcccctgggggcggaggcgtgcgctgcaggcgagagaggcggcccggtatcgatggagaggcacagagggctttgaggtcgcagcgtcccggttgctgagcggagtcgggagtcaggttccaaagggacagcgctcagggttgtaatcaccacccggcccaccgcttccgcagctgcgagtctagggcggagctgttgggtggaccgagcaggcgaggcgcaggcaggcagcggctccgcctcggaatccgcctcgaccggggcacaggtgcccgccccacctgtccctcggtcaccccaaccctgtttcctcgacccccagcactcctccaggcctagttcgcttcagaagcgcaagacccggaaaacaaggaagaagcgagctcagcctcaatccccgtccccaccccactttcgggaccgctacgctggagaattgaagggggcggaccccggattaaagccgctcccttcccagcctcgccccgctttcctaatgtccgtgatgatttcgttattggcagggaagagccaggctccctgcgctcccaagacggggcgattgggagggggttctggagctcacgcctggggtcggcccggcgggggtgaccccgcgccctcgccggtgcaaggagaacagctggttcccgccggggcagggaagcgtggacggtgtgggctcaggcgcctggcaggcacgcggggcctctaaagcttggtcactgtcacagatcatgtggttgtttcttccgtccccgccacgccttcctcccgggatggggattcattccctagcaggtgtcggagaactggcgcccttgcagggtaggcgccctggagcctgaggcgggaactttaaaatcagacgcttgggggccgggctgggaaaaactggcggaaaatattataactgaactctcaatgccagctgttgtagaagctcctgggacaagcggtggaagtcccctcaggaggcttccgcgatgtcctaggtggctgctccgcccgccacggtcatttccattgactcacacgcgccgcctggaggaggaggctgcgctggacacgccggtggcgcctttgcctgggggagcgcagcctggagctctggcggcagcgctgggagcggggcctcggaggctgggcctggggacccaaggttgggcgaggcgcaggaggtgggctcagggttctccagagaatccccatgagctgacccgcagggcggccgggccagtaggcaccgggcccccgcggtgacctgcggacccgaagctggagcagccactgcaaatgctgcgctgaccccaaatgctgtgtcctttaaatgttttaattaagaataattaataggtccgggtgtggaggctcaagccttaatccccagcacctggcgaggccgaggagggaggatcccttgagcccagaggttcgagactagcctgggcaacacagtcagactccatccttccaaaacaaacaaacgaaaataaaacaaacagaaaacg

SEQ ID NO: 1594 - DNA, 2633 bp, Homo sapiens
tcctccggaagtgcggatcccagcggcggtcgtgtagctgagcagccctggggcttggttctatgtccctgtggctatgtttccagtgtcctctgggtgtttccaagagcaacaagaaacgaataaatctctggaagctcttggtttactgtgtcacccaagcgactgggagccaggtcctgctctgggactgagccgttggagccgaccgatgactgcactgggctgaccgcaacaagctgaccacacacactcctcactcccctggccctggtgggcggcagacaccatggtgcagacggatgtgctcctaccagagctggccccacagacagtgccaccctacgagctgccctgcaaagagtatgacgtggccagaaacacgggcgcctacacgtcctccggcctggccaccgctggctggaggtgtggttccagaactgctatgctcgctaccgccaggccttcgccaactgcaaccagtcagagcgggagctgcaggggcacgagagccagcagctggccgcagagacccaggcgctggcacagccgacacagcaagactccacgtgcagggtgggcgagcgactgaaggacacgcacagctggaagtcggagctgcagcgtgaggtggaggcactggctgcggagaccgacctgctgctggcccagaagcaacggctggagcgcgccctggatgccatggaggtgcccttctccatcaccactgacaacatgcagtgcagccagcgccaccagcacaccaaccttttgcgtgaccatgtggagacagagctgctgaaggcctatccccctgcaccctctcagtgcctcaagaactgctgcagctcccgcaaaccctctgcctgcaacaagggtgcctgcgaagtgatggagacactgacagtgcaggaagaggaaaacccagggacagaggggtgcaggactcgggctctggcacacaaggaggtgttgaccaaggcctgcagcagctgggcctcctgggatcctcaccaaggaccggctctggtgctcagggcgtctcctccctcaggaagctgagctcatccggaacattcaggagctgctgaagagagccatcgtgcaagcagtgagccagatccggtgggtcgagggctgcccaagggatgactcctgaccccacccacggctggtcctggggcaaggcattgaacgacaggaccctgaagctcagagccggcaggggctgtcccaggtcacagtgggagcacagggctgggtgggggaggttccggaccagcctgagtttgagtggccaaagcccagtgccacaactgctctgcagcctcccagcatgggcggcagctcttggtcactgctgagcacgaggacagccggcccagagctccctcctgaagcgggcatgaagtcctagcctgcagcatggagggtccccagcggggccctccctggccacacgccaaggccctgccccaccccgccccagactgaaccgagagcacacggagatctgcgagatggactggtcggacaaggtggaggcctacaacctcgacaagacttgcgggcgccaccacagccagagcaccgaggtgcaggctcatccggcactccaccaccttccaagagaggggggccccagctctgccccgtgcttgccctggctgtggtctcgcctccctctgcctgggggccccagcggcactgcttcccccagcctggcccagaggccctcgcccccgagggcacttgggcaactgtctgcccctggcatgagaaagcgtgcaagacctcctcaagtgcccagcgcgtgcacagcctggttgcccgtagacaggacagggtgggatgcggtcagccccaggtgccggcaggattgcatttccaccgaaggccagcagagggagcacgaccaccgcccacttgagcatggcaaactcctggccccgcagcgcctccaccccagagacccggaccaagttcacacaggacaatctgtgccgtgcccagcgcaagcgcctggactcggccaacctgtgggttcttgtggactgcatccttcgcgacacctccgaggacctgggactccagtgtgacgccatgaacctggccttcgggcgccgctgtgaggaactggaggacgcgcggcacaagctgcagcaccacctgcacaagatgctgcgggaaatcacagatcaggaacacaatgtggtggcactgaaggaggccatcaaggacaaggaggaacctctgcacatagcccagacccggctgtacctgccctcacaccggcccaacatgcagctgtgccgcgaagcagcccagttcagccccagctcacaccccccaacacccccaagctggtgagtgaggtggaggagctgtacaagtccatcacagcgctgcaggagaagcttctacaagcagagcagtccctgtgcaacctcgaggacatccacatgagcctggagaaggacatcactgccatgaccaacagtctcttcatcgaccgccagaagtgcatggcccatcgtacttgctaccccaccatcctgcagctggctggctaccagtgagcagcggcacggtgcttccccccagtcccccaaataaacagtgcgttaactttc

SEQ ID NO: 1595 - DNA, 3560 bp, Homo sapiens
agaatccaggggacggttgctgagcgggcctgggacagcgggtcgcggcacctccggcctgcgcgtgtctaatccgtctgtcgggtcccgaaagagctaagccgagcctgcgccggacgggtgggctggactgagagaattctctgagctggtgacaggtgccacaggcactggggatctcaccagaaaggaaccgacggagctaggggccagcgagatggcggacgaggccttagctgggctggatgagggagcccttcggaagctgctggaggtcacagcagatctggcagagcggcggcgcatccgctcagccatccgggaactgcagcggcaggagctggagcgcgaggaggaggccctggcatccaagcgtttccgtgccgagcggcaggacaacaaggagaactggctgcacccacatcctccacgacctggccatggcagtggtggttatagtcatgatgtctctgcagctctcagcagcgggaagctgagcagcgggctgccctggcacggctggcagggcagctggagtccatgaacgatgtggaggaattgactgcactgttgcgaagcgctggtgagtatgaggagcgcaagctgatccgagctgccatccgccgtgtacgggctcaggagattgaggctgtcaccttggctgggaggttgtacagcgggcgtcccaacagtggctcaagagaggacagcaaggggctagcggcacacaggctggaacagtgtgaggtgccagagcgagaggaacaggaacagcaggcagaggtttcaaagccaacccccacccctgaaggcaccagccaggatgtgaccacagtgacactcctgctgcgagccccacctgggagcacatccagctcacctgcctcacccagcagttcacccacccctgcctctcctgagcctccattggagcctgccgaggcccagtgccttacagctgaggttccaggcagcccagagccaccccccagcccacccaagaccaccagccctgagcctcaggagtctccaacgctccccagcactgagggccaggtggtcaacaagcttctgtctggccccaaagagacccctgctgcccagagccccaccagaggcccctctgacaccaagagagcagacgtggctggaccccgaccctgccaacgctccctgtcggtgctcagcccccgccaaccagcccagaaccgagagtccaccccccttgccagcggaccttcctcattccagcgggctggctctgtgcgggatcgtgtccacaagttcacatctgattctcctatggctgctaggctccaggatggcacaccccaggctgccctaagtcccctgacccccgcaaggctcctgggcccctccctcaccagcaccacccctgcctcctcctccagcggctcctcctctcggggccccagtgatacctcctcccggttcagcaaggagcaacgaggagtagcccagcccctggcccagcttcgaagctgcccccaggaggagggccccagggggcggggcttggctgctaggccccttgaaaacagagcaggggggcctgtggcacgttcagaggagcctggtgccccgctgcccgtggccgtcggcactgccgagccagggggcagtatgaagaccacattcaccatcgagatcaaggacggccgtggccaggcctccacaggccgggtgctgctgcccacaggcaaccagagggcagaactgacactggggctgcgggcgcccccgaccctactcagcaccagtagtgggggcaagagcaccatcacccgtgtcaacagccctgggaccctggctcggctgggcagtgtcactcatgtcaccagcttcagccatgccccccccagtagccgaggaggctgcagcatcaagatggaagcagagccagcagagcctctcgctgcagcagtggaagcggccaatggggctgagcagacccgagtgaacaaagcaccagaagggcggagccctctgagcgctgaggagctgatgactattgaggatgaaggagtcttggacaagatgctggatcagagcacggactttgaagagcggaagctcatccgggctgcacttcgtgagctccgacaaaggaagagagaccagcgggacaaggagcgggaacggcggctgcaggaggcacggggccggccaggggaggggcgcggcaacacagccactgagaccaccacgaggcacagccagcgggcagctgatggctctgctgtcagcactgttaccaagactgagcggctcgtccactccaatgatggcacacggacggcccgcaccaccacagtggagtcgagtttcgtgaggcgctcggagagtaaggccacctggtgtcgccctgtgcctgcctgcctgtccgcccacctcctccggctcttccttgagctctctctccgtgtcttcaactgtgccgtcactttctcttctctgcctgtggctatcaccacccctccatacagcctcccatcccatctcctgatgtccagcccaggccctcacctggtgccccttccccttttttgcagatggcagtggcagcaccatgatgcaaaccaagaccttctcctcttcctcctcatccaagaagatgggcagcatcttcgaccgcgaggaccaggccagcccacgggccggcagcctggcggcgctcgagaaacggcaggccgagaagaagaaagagctgatgaaggcgcagagtctgcccaagacctcagcctcccaggcgcgcaaggccatgattgagaagctggagaaggagggcgcggccggcagccctggcggaccccgcgcagccgtgcagcgatccaccagcttcggggtccccaacgccaacagcatcaagcagatgctgctggactggtgtcgagccaagactcgcggctacgagcacgtcgacatccagaacttctcctccagctggagtgatgggatggccttctgtgccctggtgcacaacttcttccctgaggccttcgactatgggcagcttagccctcagaaccgacgccagaacttcgaggtggccttctcatctgcggagacccatgcggactgcccgcagctcctggatacagaggacatggtgcggcttcgagagcctgactggaagtgcgtgtacacgtacatccaggaattctaccgctgtctggtccagaaggggctggtaaaaaccaaaaagtcctaacccctgctcggggccccacggatgctggtggactgtgtgcccctggtggaggtggacgacatgatgatcatgggcaagaagcctgaccccaagtgtgtcttcacctatgtgcagtcgctctacaaccacctgcgacgccacgaactgcgcctgcgcggcaagaatgtctagcctgcccgcccgcatggccagccagtggcaagctgccgcccccactctccgggcaccgtctcctgcctgtgcgtccgcccaccgctgccctgtctgttgcgacaccctcccccccacatacacacgcagcgttttgataaattattggttttcaacg

SEQ ID NO: 1596 - DNA, 2094 bp, Homo sapiens
ctctggcccgagccaggtcagtccggcagtgcagatggcccatcccgggctctgggctcctagaccggggtgggccctgccaggagtgggcctgagcctcgcacgtcctctgaaactacgctatgctctgcttttgcggcgcgatgggcgtgggagcgggggctgcccaaagatgggctggggttggaggaagtggcccggtagccgctgtgtgtcctgaggccgtgaggcgcctgaccccacccctgaagctggcgacggagcagggcctgttttctctacactatagtcatgatccgctgggcccccagcgcatctcctggaagagcccactcaccctggacgagctcttcggtagcctcagaccgtccttgaagaggatgactgagacattatgggccacgcgctgtgtgtctgctctcggggaactgtcatcattgacaataagcgctacctcttcatccagaaactgggggaggggtgagtgtttggaagtcagttaactagtcctcaagtttatgatcattgaaggacagcggtgtgcatatgcttggggcacaagggttttatccctatccctgtcctctctcacctgacagaacctagctacacagtatcaagaaggtggattctggagccaggcctgctaaatccacctcgtgtgaccttgataaaccatgtttttttcatcagcttaatggagatgattattatccctcactgatggagttgtgaggattaaatgagataatgtgtataaaatgtctcacccaatgcggggttgacaagtacttgataagtgttggctattatttatttagcatctgtcaagtgcagaggtctctattacgaccataggacctcaaagatttctatatctctgctcctgaggagctcacggtgtaatattcttcagatttctcttagagccacatcttgggaaggtttctgctaaatgggaaggacaccccactccccaccaggaaatttctctaggtccaagccatgtgggagatgaccatggccctttattgacccctttggcccacagtgggttcagctatgtggacctagtggaagggttacatgatggacacttctacgccctgaagcgaatcctgtgtcacgagcagcaggaccgggaggaggcccagcgagaagccgacatgcatcgcctcttcaatcaccccaacatccttcgcctcgtggcttactgtctgagggaacggggtgctaagcatgaggcctggctgctgctaccattcttcaagagacttgaagcccaccaatatattgcttggagatgaggggcagccagttttaatggacttgggttccatgaatcaagcatgcatccatgtggagggctcccgccaggctctgaccctgcaggactgggcagcccagcggtgcaccatctcctaccgagccccagagctcttctctgtgcagagtcactgtgtcatcgatgagcggactgatgtctggtccctaggctgcgtgctatatgccatgatgtttggggaaggcccttatgacatggtgttccaaaagggtgacagtgtggcccttgctgtgcagaaccaactcagcatcccacaaagccccaggcattcttcagcattgcggcagctcctgaactcgatgatgaccgtggacccgcatcagcgtcctcacattcctctcctcctcagtcagctggaggcgctgcagcccccagctcctggccaacatactacccaaatctgaaaaagcagcatgttgagaagatggccccttgtgccttggaaagaggttcccatccctcattggaatcaccacccattccatccaggacttctcttacacttgagggtagcggggtcaggacaatcatctcagtcctgcatcttttcttctgctttcttccctccaagagcaaaacctgggcaaggggacttactgagtgggggtgggtgggggttgggaaaagggaaactggtgggatatggaacatggctctgagcaggactgttgagctcacatagtgttctgactccaaatctgggagcaggagaatgtgtaaacaagaataaagtggaagcaggttggtgt

SEQ ID NO: 1597 - DNA, 1837 bp, Homo sapiens
gtcactcgcatctggctaccagctccccgctgccctgcgctcggcgggctggcatcgggcccggggaaagcggagcagttcggtgtagcactgtttgcggcgaggagaaaggaaggagaggagaaaactgcactggatcaaggaggtcttcccataggcctgcagtagggctgtttaccattggaagcaagggaaagaggaggagatcaatctagaagcatggagatctgcctgcatgtctgctgcagggcttaagatcactggaagcaaagaaacaaagaggagattgctcctgatcagtatagactgggtgtattgccaagagaagcaagaggagaggagggaactgcctcggatcattacaggtccacctccagaggcagctgtagtggcctttgagtggctgaagaccagcaccctcacaggcctacacccacaactaccactctctttaccccagcccgagtgcgctctaccataccttgttcgtgcttttagcaggggtgattacatgggccgcattcaggaagtgggctgggtgactgcaggactggtgatctgggctggcacctgctactacatttacaaatttaccaagggaagagcccagagtgtgaggactcttgccagaaatggatccacagttaagatggagactgtggttggggtacagagccagaccttggccataaatgaagcagagattaagactaaaccccaagtcgagattggagcagaaactggagcaagaagtgggcctggggctgaagtagagaccaaggccactgctatagccatacacagagccaactctcaggccaaggcaatggttggggcagagccagagactcaatctgagtccaaagtggtggctggaacactggtcatgacagaggcagtgactctgactgaggtcaaggccaaagccagggaagtggccatgaaagaagcagtgacccaaactgatgctgaggctggcaaaatagttaagaaagaagcagtgacacagaccaaggctaaagcttgggcgctggttgccaagacagaggccaagagagaagcaatgacccagaccaaagctgaaactcatatattggctgaaaaagagacagagattaacagagtaatggttacacagagtgagaccttggcagtacccagggaagtggccaagatgggggccacgaacaagactggaattgtggatgaaaccaagacaagagctctggaagagactgtgttgatcccaagagcattccctagtaaagacgcttcatgctgaactctatctctgggcctgcttcctgggaagccaacctgcaacagttggtacaagaagtggttcgagaaagcaaacactgtgatgaaattttggagatgaatcacctgctacccagctgtcaatgaagactccatcattggtggtagaaggtggagaaatctgaggagtagactcaggatttgttaaaagcaagcttcaaagaaagttaaaattctaaccaagacaagtcttctatgccgagttatgtgccatggttaagaaggaatgggactctgacacttggaatgggggacatctggattgatgtccctaaaaatcttatatccccagattcccctgagccccttgagaagtgtcctactcctccctattaagggccggcactccatcttgcttcaatatatggaatcctttcccctgtaagataacctgggtttccctcagaatctgcccgcacctcctatcctggccactgggcctataactagggttaagccacgcataatctagctggtgatgtgctgggtgtaataaggagagaaagagagagcgtgc

SEQ ID NO: 1598 - DNA, 3357 bp, Homo sapiens
gcgagccaggctgcacgaatgtaagctccatgagggaaagtactttgttgctcttcttctcctcagtatcctcagcgttaggacaatgcagtgatattgaatgaattcactgcgtgctgtcctcacttgttctacaatgagtgccaaatctgctatcagcaaggaaatttttgcacctcttgatgaaaggatgctgggagctgtccaagtcaagaggaggacaaagaaaaagattcctttcttggcaactggaggtcaaggcgaatatttaacttatatctgcctgtcagatatcaagtcagcttcaaaggagaaaacatttagtgaattttagagagaagaccagctaatgaggatgaaacgtgtgttatggttgaacatcccagcgtgtctgctaagaaattcagtttaagaaaaggccattatcacattgtagtggtggactgaaaaagtgacaaacaagaaacccacacaggcgtccatcacaaaggtcaaacagtttgaaggctccacatcatttgttcggagatcacagtggatgctcgagcagcttcgccaggttaatggtatcgatcctaatggggattcggcagagtttgatttgttgtttgaaaatgcttttgaccagtgggtagccagcacagcgccagaaaaatgcaccttcttccagaccctccaccatacctgccagaggtacctcacggacaggaagccagagtttattaactgccaatccaaaattatgggaggaaacagcatcctccattcagctgctgacagcgtgaccagcgcagtgcagaaggcaagccaggccttgaatgagcgtggagagcgattaggccgagcagaggagaagacagaagacctgaagaacagcgcccagcagtttgcagaaactgcgcacaaggtgacctttcggggaaggaaataactggctttaacagaaacaccacttctgctgaggaaacaaggatggataacctaaaaagcaatgagaagaatattcccagctgagttgcggtgacctcttctggaggctcacgctcaggtccagctggggatccagctctaagtggatgactcctgccttctcttcctgcatcccctttgcacagcgctgtcttgtcgtctcattcattctctgtcgtgacagggtcttactgcactgttgcccgtggggcccatttcgagttccttcaaggagaattggctagatctatctgaaaatgcagacagccctgctggaggccagagcctcagattgctgctgttggtgcagaggcagagagagtgaacttggattgaaggtctccctagttccttcctcctttctccagcctctgtgacacagagataatgatgacatggaaatgctggcattacagcctcagcttctttaacaacaacagcagcttccgtgatttcagtgggagacggatagtggaaatctggggaaacatttaagttgttgagttgggtagaggaggctaaagggaataactttataacagtcttcagttctgggaagggtgatggtacaggcatttttctttcatgtcttcccacacagaatagagcaatcaatagtgcactgataaaattctgctaaaacaagagtttaggttaatgattaaaccatgaaccaggttaccaaggaagattgtaaaattgctcttcctaaggtggcatagacaatacctggatgtcgtccacgtaggcgtccctcccagagggggctgtacaaacactggattggataacctaaccagatggcctgaattcttggccctggtagccctgtttccctgatactgtggccaagtttgcgaggcaattgggaaagcaatatggaatagtagttaacatcttgtgtttgaatatagcactgtcatttaccatcttggtgaccttgggcaaatgcttaatttctctaagcctcagttttctcatcagtagaatagagcactattctttatgagaatagtacctacgtactagagtgttcagagaattgaatgagttcaaagctattagcacagtatgtagcacatataaatctaaattactattatttgtaatcattttcataaattttttttctactgaccctgccctattcagtcacataatgagcactgtagagggattggagaattgatactggtgattgaggatcctcaacacagggacagggaaggaatggaggagaagattttgtgcctcccaaacccaaagggaaaggggtgtgggagggccctcatgctaaatgttgatactatctaaacacagatcagcccttgaaacaggacccatcaggatagaaactaatgcggccaccaaaggcaaaggggtctctggcttgaccagtgggaaaatttatgcctagcagttacctgctttcactcgggaggggtgaggcgtggacagcttgtgtttattttggtttcccctccctcaggtcatctcggggggaagaggaggggttactagtgtctgttaatgtgtatgagagtgagagagtgtcatggccagacttgcagttgtgtgaaactgggatgtgtgcctatgaatcactggcactggcagtattcctaacaagcagattgacctctttagataaggtgtggctattttcccagggaccaggactcttgatttggacctgctagcataggctgaccatgaagctgtcattttactggacaagccacagccaggcctgctggtgaggggagagttcagagatggaacccaagcattctaccccctagacaagcatggctctgttgactcagaaggagtaagctgtgcttacaagtgggggccagaacacatggcagagtcctgagctgaaaatggcaatgccaggtggcagctcctagagctcccagttgaataagggtgccgaaccccagctggagagtttggcacacctttgtagagtccagtagaaaataacttggccttctaacttgttccaggactcctgcagtgacccaggtgcaagagtcaatggatcacttttgcacaaccctgacttcaaaatacgcaggtgcttgttgtctacagtgcagatagaaaatgatccttccgccctgccttcctagactgactcccccacctccactctggtgagcctggtttgaggaaatgtggtcctttcttgagctccgggcttcatgcaaagttaacctcaggaaagtgcaccacaatcgcagaaacagatctgctcactttcccttgccaaaaagcacaatgttgcagcagacgcaatgctttgacggccccgccatagtcagtgagtcagtagacaagagcattacccacactcagacatcctcagatgacatttcttgc

SEQ ID NO: 1599 - DNA, 2213 bp, Homo sapiens
gttttgcaacttcttgtttatgagcctggaagccacgaagtggtgggaaatacgagattcaaatatctggtggccgtgtgacgtgagtaaattactcgatttttctcagtttccatttcctatcaaatgggttgttctgggaattcggggaagtaacagtgccgggaaccgcgggaggaaccgccagctgcgtcctcggacgtccccaaagcccagggcggcgactggcacgactgtcaggggcgcgtctgttaagaggacagggggtcccgccccggcacagccgtctcctccaggacccctcccgccgacgccccacggaccccacgcccgagcggagaccggcgcgagtccggggtctccggtccggcagcccctccctggcccggcgccccaaagggaagcggcctgggggaggagacgtgtggaaagagcggcagaagataaagaggaagtagcggtagagaataaaaaggaactgtccgcagtgtgcccggacgcggggaggcgctggggtcaagcgagacccgacctgcacgcaattcccgccggggtcccggcctgcctgcgggagggaaaggacccagggcagcttctgccaaaagtgcggcttctgccggaagtgcgtcttctgccgaggggcccacataaggcgcgacagacactccagcccgaccccgacgccccgccctcacgcatgcacatgcgcggaacactcccagaaacacatctcccagagcgccccgggagcacgcgagccaattggagggcggattagcgggggcccacgtctcccagaggtctccgagtcgcggctctgttggtctgattggcagccgcaacagcctatagctgcttttcgccggaggggccacgcgccgtttgccgggactgagccgctgttgtcgctggtatcccgggagcagcgccggcaagtggagtcgtcgtattccgggcggcccgcggcccacggggatgggacgtcccggggctgtgctgaccccaaaacccttccacactttattagcctgtcgcccttctttcatgtttacagcaaatattttccgagtgcctaatgtgtcccacttactgtgccacgtgcgagggtgcacgtgtcaggcaagatcgctgttccaaggaggctgagaacaagtaaatggtaattaccagttatgaccaaagctgtgaaaggaacagatacatcagcctaacagcagcactgccgttttctcccttataatcagcagaggcgggctagagcaaggattctcaaactctgccccctcagaaccctagagtacggttgctgaaacttctgttttttccttttgaacaaatctagtaacatgctgtgagccagagaggtaatggtttggctcaaagaaggcacatgcatctggtttctttcttcttttttgagacggagtctcgctctgtcgtccaggctggagtgcagtggcgccatctccgctcactgcaagctccgcctcgcgagttcacgccagtctcctgcctcagcctcccgagtagctgggattacaggcgcccgccaccacgcccggctaattttcacgcccggctaatttttcgtatttttagtagagacggggtttcaccatgttagccaggatggtctcgctctcctgacctcgtgatccgcccgcttcggcctcccaaagtgctgggattacaggcgtgagccaccgcgcccggcccaggtttcttatttcaggagcttcataggcatagacctccctccttccctcctaccccctcccccctctcccaactaatgccagaccggccactactttttaactgttttacatatttaaccttcaagaaagatttcctttgatccaagtgtattgcagcccacaaaaaagcttggaaacccagctagatggtctgtttttctagttcctacattggatttaagtcctacccatcgagactactgtcttcagagggcatcttcatgtgtgggcaccagggctgcggctggaaccacagtggacaccccacgctccaaggacaatcctctgcagaaaccagcagctggaaacaattcttaatgctgcaggaagtagttaggagaaaacgactgtgtaagtcagagctaaaactggagttcaaaaaccacagaaaatatttccaaggctgtctgtgaagtggggatgtcaaaataccaaaaattacagctttggaactgc

SEQ ID NO: 1600 - DNA, 2338 bp, Homo sapiens
tgccaaagacatggcgtacgaacatctgatagatgacttattggctgctcagaaggaacttctgtctcagcaggaagtcatcatgaagttaaggaaagaccttaccgaagcccacagcagaatgtcggatttgagaggggagctaaacgagaagcagaagatggaactggagcagaacgtggtgctggtccagcagcagagcaaggagctgagtgtgctcaaggagaagatggcccagatgagcagcctggtagaaaagaaagatcgggagctgaaggcccttgaggaggcactcagggcttcccaagagaaacacagactccagctgaacacagagaaggaacagaagccccggaagaagacccagacgtgtgacacctctgtgcagatagaacccgtccacactgaggccttctccagcagccaagagcagcaatccttcagcgatctaggggtcaggtgcaaagggtcccggcacgaggaggtcattcagcgtcagaaaaaggccttatctgaacttcgagcgcgaattaaagaactcgagaaggcgcgctcaccagatcataaagaccaccagaatgaatcatttctagatttaaagaacctcagaatggaaaacaatgtccagaaaatactactggatgcaaaaccggatttgccaactctctcaagaatagagatcctagcgcctcagaatggcctttgcaacgcaaggttcggctcagccatggagaagtcagggaagatggatgtggctgaggctttagagctcagtgaaaagctgtacctggatatgagcaaaaccctcggaagtctcatgaacatcaagaatatgtcaggccacgtgtccatgaaatacctctcccgccaggagagggagaaggtcaaccagcttcgacaaagggacctcgacctggtgtttgataagatcacccaactcaagaaccagctggggaggaaagaggagctgttgagaggatatgaaaaggacgttgaacagctcaggcggagcaaagtgtccattgagatgtaccagtcgcaggtggcaaagctggaggatgatatctacaaagaggccgaagagaaggccctgctgaaggaggccctggagcgcatggagcaccagctgtgccaggagaagagggtcaacagggccatccggcagcagaagatgaggaaactgcgcctcagagagttaagaggcgcccaagtgcacacagcggctggtaaggacagctgggacctgaccccagatccctctgaccctggttctcctgctgtctgcagggttggccgaaagtgtagaggagcacgaactgagaaacgcaaaagaatcgacaccttgcaactgtgccttcaaagagaaagacaggcaggccctgccccacctgcctgcagtttgaacggatgacctaagagacaagcacgcgtccagccccgtctgtccattaagagacgagtatttgtagagatggtgaagaacaggatgcagaactcaaattcccaggttggaaccagaaaagcctccctaaagatggaccaagaaagagagatgctgaggaaagagacctccagcaagtccagccagagccttttgcattctaagcccagtggaaagtactagagaaacctcgtcccaccaggcctcatgtgatcctctgtgagttcatgtgactcttctgtgtcatctgtgtcaaaatactgagttgcttttgtaagtctttaaagattgttaccctagtgtttcatttcctagaccagtattttgaacaatattatattttggagactgtggggagaagggttcttctttaaaaatatctatgaatgtacacgaactcaggtatatgaagaatagaagtgtgtaacccagatgtccaggcctggtagatataattatgtggtccacgttgggtcatgatgttcccaaatatcaaacctcctaagacttccaacagactcacacttgagaaaacctaagacttgtactggagcctcagggcagaattgtaaccttggagctctcagggccttgggatagtgaattcaagtctccgttatggcctggcaggatggctcatgcctgtaatctcagcactttgggaggccgaggcaggcggattataagatcaggagtttgagaccagcctggcaaacatagtgaatacctgtctctactaaaaatacaaaaattagccaggtgtggtggcacatgcctgtagtcccagctacacaggaggctgaggtgggagaatcacttgaacctaggaggcagaggttgcagtgagccaagaccacgccattgcacgccagcctaacagagtgagactctgtcttt

SEQ ID NO: 1601 - DNA, 1930 bp, Homo sapiens
aggccggtgggtgagtgcaccgcgttctcgcacgcgtcatggcggtcctcggagtacagctggtggtgaccctgctcactgccaccctcatgcacaggctggcgccacactgctccttcgcgcgctggctgctctgtaacggcagtttgttccgatacaagcacccgtctgaggaggagcttcgggccctggcggggaagccgaggcccagaggcaggaaagagcggtgggccaatggccttagtgaggagaagccactgtctgtgccccgagatgccccgttccagctggagacctgccccctcacgaccgtggatgccctgggtctggccagcatgacccagaacttagagccacttctgaagaagcagggctgggactgggcgcttcctgtggccaagctggctatccgcgtgggactggcagtggtgggctctgtgctgggtgccttcctcaccttcccaggcctgcggctggcccagacccaccgggacgcactgaccatgtcggaggacagacccatgctgcagttcctcctgcacaccagcttcctgtctcccctgttcatcctgtggctctggacaaagcccattgcacgggacttcctgcaccagccgccgtttggggagacgcgtttctccctgctgtccgattctgccttcgactctgggcgcctctggttgctggtggtgctgtgcctgctgcggctggcggtgacccggccccacctgcaggcctacctgtgcctggccaaggcccgggtggagcagctgcgaagggaggctggccgcatcgaagcccgtgaaatccagcagagggtggtccgagtctactgctatgtgaccgtggtgagcttgcagtacctgacgccgctcatcctcaccctcaactgcacacttctgctcaagacgctgggaggctattcctggggcctgggcccagctcctctactatcccccgacccatcctcagccagcgctgcccccatcggctctggggaggacgaagtccagcagactgcagcgcggattgccggggctctgggtggcctgcttactcccctcttcctccgtggcgtcctggcctacctcgtctggtggacggctgcctgccagctgctcgccagccttttcggcctctacttccaccagcacttggcaggctcctagctgcctgcagaccctcctggggccctgaggtctgttcctggggcagcgggacactagcctgccccctctgtttgcgcccccgtgtccccagctgcaaggtggggccggactccccggcgttcccttcaccacagtgcctgacccgcggccccccttggacgccgagtttctgcctcagaactgtctctcctgggcccagcagcatgagggtcccgaggccattgtctccgaagcgtatgtgccaggtttgagtggcaagggtgatgctggctgctcttctgaacaaataaaggagcatgccgatttttacaaacagggtctgagtggtttgggactcgggcttgtgcagggtggtagctgtcttgcacgtccctgtggcacctgcccgggtgcagggtgggggctgcgcgggagggagagaggagcaggactgagaggggagcaaaggtctgggaggagaaaggagagcaagaaggaggccaggctcggcggctcacgcccgtaatcccaaatcccagcactttgggaagccaaggcgggcagatcacttgaggccagcagtttgagaccagcctggtcaacgcatggtgaaacccagtctttactaaaataacaaaacttaggcatggtggcgcatgcatgtagttccagctactgagaaggatgagccagaagagtcgcttgaacctgagaggtggaggctgcagtgagccgagatcgcatcacactccagcctgggtgacagagtgaaactctgtctc

SEQ ID NO: 1602 - DNA, 2407 bp, Homo sapiens
tacttgtttgaataaaagttttatttattgcacgagttgggtatggacctccttccggttcccggcgtgcgtctttgccgtggggaccccgccttgtgcccacctctgccaggtattttctcggcactcagtcgcctgctagataacctgggcttgcacacggtgctggccccagtgacagtcactcactctgcccgggctctgcggggggccgtctgcagctgaggcaggctcctggctccctccaggcccgcaagtgaggcaggctccgcaggcgccgtccagggagagccagagccccagctgtgtgccgactccgagtgctccagggttctaggtctcctggcagctcgcccgtggtcccccctcctctgcacccccgagtcctcagaccccatgctgcctccaactgagccttgtgtttccttgcagcgccgatgtggaagtggccagattctgagccgcctgactagagttagtaagttgcctggcgttctcgtgcagtcactggcctctccagtggttctccacgggccctctggcctcagtcacgcagcctgggtggggagggcccggctgcatggcggggccaggggtccactgagcctgcctctcactctgggtgctgggccttctctactgggtcccctccttgggttcatggtatctttctcccctcccggaagcttgtgggctctggctggctgtgcctggggctcctctcactgctgggtgtggctctggccctgaccttctgtgtggtcctctcctgccctgctgggcgcttcaattatagtcaaagggtgaccccggcaagcagctgcagcccgggcctttcccgcctgactcgcagcgccagcttgggctccttcgggtgtgtgtgcctttggggctgacagccttgtggggactggaggtcagggtcctggggagaaccctggggagctccataggcactggagccaggtgttgggcccactggggaccgggctgtgctgttagtctgaccttgcctcttctgtcccccaagccccacaacgtggacccaagacagtggctccatccctagtgtggatctgcagacctggagggctgctgggtccaggtttgagctgacgctcactccggggaccacagggccattatgggtccaattccagtgggactctggagtccgggtctgagtccatttcctcacgggttgagtgggccactcccctggtgcctggtgtatatttgggatgtgccagggtgtccaggagcaggccctctgccctcatagggggcccttgcccacaccttccaatcgcctacacctgtgtctgggcgggtcctgcttcccaccacccttccatccccaagttgctaggagggcggctctgcaaagccagtgcctgcatccttcacaaaggacgttggtccctgtgtctccctggtggtcacagcaggcatcctggcccacgggcagccaggccacaggcagatcatggatctgtcttctttcactgcctttctgttgttgattttcggcaacaaattctggaagattaggtagaaaaatgctcctgaactttggggactggatggagatgctctgggttggccctggccaccaccttgccttccgcctccatcttcctcccttccgagacgctgtttctgggaggcctccagacccccccactcccccaggtccctctgagctgagggggctgaactgcccttacctggtgaggcttggaaggggtgaaggctcaaagatgaggctggcacagcctctgtcagggactacgtcccttggagggcagagaccctgggtagcagtgccggtggggcagtggtgctcagccccagcaccactccacagtgccaggggccagtttcccggccacgcagtctgcctggtctgacaactcagctgggattgggggtgtcgaaagccacttgcagttggccaagagactccccaatcccattgccaccctgtcatgccccagctttgggccctgggaagggggccttggaatgagagtggaggggcgagcgtccctggccgctgtccatactcgtcagcggaggcccaagcgcccacgctggacccgattccagaagggcccaccttctgaagacacgaagaaacagctgacgcgagaagacagaaaacaggtgctgtccgcccggctctgggtctggagtcacccaactggtcgaaatgcatttgtgacggctccgtttcttctcggaatccttctgcttcacattcaagtcattggtgaagctgccgcttggccgagcgccgtggcccacacctgtaatcccagcacttagggaggctgaggcgagaggatctcttgggcccaggggttcgagatcagcctgggcagcctagggagacccccatcttgac

SEQ ID NO: 1603 - DNA, 1676 bp, Homo sapiens
aaaacttggttccagctgcgtgtggtgaaagcaactagaggcagagctatcaagggctgtgacagatgagcagtggtctgtctgcaatgagcatgtgctcaagctaacatggataccatcttggtcttcagcctaatcattgcatcctatgatgccaacaagaaagacctcagagatagcagttgccgactggaacagctgcctgggatcttcccaaaagacgtgagaagcatcagagaattgcaaatgcaagaaactcacacagaaaccaaaaggacaacattcattcaaaaccggactatagctaccctgcagtgccttggctctgacagcaaagtaaaagtcaaccttgtatatttggagagaaggccaaaggtcaagcatattttgaagaacctgagaatcattgctgctccccgcagaaacagctctgcctcctcaagctgtcacctaatccccacatccaagtttcagactggatctcttctaaaaggcaaagtatcaatgcctaggagccaggaagctgtgccaatgccagtggttgtggagatggcaaaagaagggaggccagccacctgggacagctgaatccaagcctgactctcagccccagaaggttggacaagatgctgccaattcatcaaacccaaagaaagctgcagagatcactgttatccaccagacatacttctgaaaagttctgctctatctcaaagactgaatgatactacacagtcctctccctattaatatgggcacattcttgccaatttcacacttgtatcttcagcagggacattacaatcaaacaccaattcctggttaatgaagggagagtgtgggcttagcagagttaccctcatgcccctatctgagccacaaccttctgtaattcacttcatacatccatctaaatggatacctttccatcccctcaaacgagaacaaaaagtattccctgcaagcactatgaatggaccttactactctctttgacagaagactcaaacacagcctctaagaaacaaggcagctgttagtgtgacatagcttccagctcctctgttatcttcacagctgacttcacactcactggccctcaatagcttagagtgggactcctgatctccctggttgacgtttataaggttttgtaatttagcttctggtactacatgtatctatccacacactgctgaagggaacttgaccctacgcattccaaaagccttcctcataagttatccccaaggggttcagggactacagaccattagtacccaagtgaagtcttctgacgatccagaattcctaaggtggctctgatattatatcatactttaatagagagttgcataccttttggacaaagattccagagcaaaataattatgataatgctgtttctcacaggagaatagctataagtcaaatctaacctgcttaaataagagtttggtgagaaagtgaaaccacctgatcttgaatcaatgttgaggtgaaaaaggaaatgtcaggagggataagacagggtgaggccctgcttcttttcctaagagtctgaaaccattccatttcattttggtgaaatgtgtctgtttctaagaaattctgttttcttagttctctggttaaaaaaaaaaatacataaactgtatccttctttctttcacttc

SEQ ID NO: 1604 - DNA, 2153 bp, Homo sapiens
agtgttaggtgggggctttgctagggggccgctgccggcgagctgcttggtgagctgtgcccgtgaacccctgcagatacctgaagcggttcaaggtgatgaagcccaaggttctccgcagctggtgccggcagatcctgaagggcctgctgttcctgcacacaaggacgccacccatcatccaccgagacctgaaatgtgacaatattttcatcaccggaccaactgggtctgtgaagattggcgacttgggcctggccactctgaaaagagcgtcatttgccaaaagtgtgataggtaaacctgcttctcctccccaggcccttggagcccatgagaagctgggcagcagtgagtgctggcgagcatccagttttgttcagacctggtgcaggagacccagtgggaggagcgtctgggcacgggagcctcgggccagggtgtctgggctaccccaccaagccttttgtagctcagctggagggcctgcccactcgttggattcccaggccacttgggctgggatagctgacttggctgcctccctcccctgctgcccctgccttgtccgactctggccccagatggtctttgtgtttccctccgtggctgtggcttgggtgccagctctgattgtctagcaggggaggtgggctgggtgccgatgctcgtggtgtgtgtgggcactgtgggcactcgggagagggaagctgccctgaccacagaggaacttgggaggtttgtggccagtgacgctggagctcccagtgtcacccgggctgtgaggcccaaggaagtgagaacttggagtatctggggaatccacatacctgcggggcggggcacagagcaggcgttgtgcacaggataggagcagggcgccaaggaattaattcagcttcttgggcatttcaggcctcagtacagacgccctcctgtgagaagccttcccagccttcttttggggcgagatgccgtcgcccctaggggcagctggcccggagcttctttgcagagaccaggggtctgcgttgtgccatgtacctggccccaggtgtgctcctggcacagtgggtgtgaagtgtccactggtcctgggtgggggcctccacggactttgaaaagaatgcctgggtggctgtggagcagctgtttctggggccaggatgatgggaaagctgcaacatgtgcagggcaagcagcgtgggtcggggctcaggaagcccagatggcacccaatcggatcagattgggagaggctcccccatgttaatgaagacccagcatgcccccaatgtgagggcaggacagtgagcagtcgatcttggggctttgtgaattcttagttctgctgcatgtttggggacagaacttggcaggtgtggggaaaatgagactccagagctgctttggtttgggaagtctgttcagaatgtgacatctggggcaaggtggctgcctgggggtggccctgtgtacacaaagcctctggcattctgggggagctgagtggtggagcgtaggggctgacccagggttcagtttccccatctgtgaaatgggtatataggtgagggtctccactccctcctggaggggctgagagcaggggcccaggaccgtgaagagcccatgcccagggctttgagctctgcgcactttctgggcagattttgcaaatttggcttcagaagtggtaggaacccaggtctcaaaccccgggcgcagtcgggtggcaggagggaggcttgtgatctcctactcaggagtgaacactcctggaggaagaagcacagcccactgtgaagcggcagccccggcagagcccctcgtcttcctctggctgggcggctctttgccctcttggaaacgaagtttcgagttgctggatcaggttgagatgaaggccaggtgtttccagcaggcacagtggggagaccttgtgacccgcatggttgcccagctctgtgggctgtccctcgtcaacccagcttttgctcagctggagtccaggaagctttggttagagaggccacaaccaggagtgtcctcagctgctcagtctcctagagaatgaggctgaagcaggagaattgcttaagctcaggggttcgaggctagtctaggcaatgtagtgagatccctgtctctac

SEQ ID NO: 1605 - DNA, 2035 bp, Homo sapiens
acattcccgcggtccttcagactgcccggagagcgcgctctgcctgccgcctgcctgcctgccactgagggtgtgcgagctggatgagaacaacacccccatgtgcgtgtgccaggaccccaccagctgcccagcccctcagcaagaagccctgcctgatgagacagaggtggtggaagaaactgtggcagaggtgactgaggtatctgtgggagctaatcctgtccaggtggaagtaggagaatttgatgatggtgcagaggaaaccgaagaggaggtggtggcggaaaatccctgccagaaccaccactgcaaacacggcaaggtgtgcagcaatgacaacaagaccttcgactcttcctgccacttctttgccacaaagtgcaccctggagggcaccaagaagggccacaagctccacctggactacatcgggccttgcaaatacatccccccttgcctggactctgagctgaccgaattccccctgcgcatgcgggactggctcaagaacgtcctggtcaccctgtatgagagggatgaggacaacaaccttctgactgagaagcagaagctgcgggtgaagaagatccatgagaatgagaagcgcctggaggcaggagaccaccccgtggagctgctggcccgggacttcgagaagaactataacatgtacatcttccctgtacactggcagttcggccagctggaccagcaccccattgacgggtacctctcccacaccgagctggctccactgcgtgctcccctcatccccatggagcattgcaccacccgctttttcgagacctgtgacctggacaatgacaagtacatcgccctggatgagtgggccggctgcttcggcatcaagcagaaggatatcgacaaggatcttgtgatctaaatccactccttccacagtaccggattctctctttaaccctccccttcgtgtttcccccaatgtttaaaatgtttggatggtttgttgttctgcctggagacaaggtgctaacatagatttaagtgaatacattaacggtgctaaaaatgaaaattctaacccaagacatgacattcttagctgtaacttaactattaaggccttttccacacgcattaatagtcccatttttctcttgccatttgtagctttgcccattgtcttattggcacatgggtggacacggatctgctgggctctgccttaaacacacattgcagcttcaacttttctctttagtgttctgtttgaaactaatacttaccgagtcagactttgtgttcatttcatttcagggtcttggctgcctgtgggcttccccaggtggcctggaggtgggcaaagggaagtaacagacacacgatgttgtcaaggatggttttgggactagaggctcagtggtgggagagatccctgcagaacccaccaaccagaacgtggtttgcctgaggctgtaactgagagaaagattctggggctgtgttatgaaaatatagacattctcacataagcccagttcatcaccatttcctcctttacctttcagtgcagtttcttttcacattaggctgttggttcaaacttttgggagcacggactgtcagttctctgggaagtggtcagcgcatcctgcagggcttctcctcctctgtcttttggagaaccagggctcttctcaggggctctagggactgccaggctgtttcagccaggaaggccaaaatcaagagtgagatgtagaaagttgtaaaatagaaaaagtggagttggtgaatcggttgttctttcctcacatttggatgattgtcataaggtttttagcatgttcctccttttcttcaccctccccttttttcttctattaatcaagagaaacttcaaagttaatgggatggtcggatctcacaggctgagaactcgttcacctccaagcatttcatgaaaaagctgcttcttattaatcatacaaactctcaccatgatgtgaagagtttcacaaatccttcaaaataaaaagtaatgacttag

SEQ ID NO: 1606 - DNA, 2375 bp, Homo sapiens
ctcatgaggagccactcagattcctgtcacttctcaaagcatctccgtcgtgaacatggccctgccaccattcttcggccagggtcgcccaggcccaccgcccccgcagccgccgcctcctgctcctttcggctgtccgccaccgccgctgccctccccggctttcccgccgcctctcccccagcggcccggcccttttccgggggcctccgcccccttccttcagcctccgctggctctgcagccccgagcctccgcggaggcctcccgcggcggaggcggcgctggcgccttctacccggtgccaccaccgccgctgcctcctccgccgccccagtgtcggcccttcccggggaccgacgccggcgagcggccgcggccaccgcctcccggcccggggccgccctggagcccgcggtggcctgaggcgccgccgccgccggccgacgtgctcggggatgcggccctccaacgcctgcgcgaccggcagtggctggaggcggtgttcgggaccccgcggcgggcaggctgtccggtgccccagcgcacgcatgccgggcccagccttggcgaagtgcgcgcgcgattgctccgggctctgcgcctggtgcggcggctgcgcggcctgagccaggccctgcgcgaggccgaagccgacggcgcggcctgggtcctgctgtactcccagaccgcgccgctgcgcgcggaactggccgagcggctacagccgttgacccaggctgcctatgtgggcgaggcgcggaggaggctggagagggtccggcgccgccggctgcggcttcgcgagagggcccgggaacgcgaggccgagcgggaggcagaggccgcgcgggcagtggaacgcgagcaggagattgaccgctggagggtgaagtgtgtgcaggaggtggaggagaagaagcgggagcaggaactcaaagcagccgctgatggcgtactatctgaagtgaggaaaaaacaagcagataccaaaagaatggtggacattctacgggctttggagaaattgaggaaactgaggaaagaggctgcagcgaggaaaggggtctgtcctccagcctcagcagatgagacttttacgcatcatcttcagcgactgagaaaactcattaaaaagcgctctgaactgtatgaagctgaagagagagccctcagagtcatgctagaaggagaacaagaggaagagaggaaaagagaattagaaaagaaacaaagaaaagaaaaagagaaaattttacttcagaaacgtgaaattgagtccaagttgtttggggatccagatgagttcccacttgctcacctcttggagcctttccgacagtattatctccaagccgagcactccctgccagcgctcatccagatcaggcatgattgggatcagtacctggtgccatccgatcatcccaaaggcaacttcgttccccaaggatgggtccttcccccgctccccagcaacgacatctgggcaactgctgttaagctgcattagtaaagatgctccaggagtgtggtccagccagcgctctttccagctgtaaatattagcgatggtgccatcttttgctgtagactaaactgcaacttctaaattccatgtggcattcccctaccctgaagttatgctttccttctgtgctctgtgctggccagaggtgcctcttgaatcagattaatgtggtttttcaggaaaggacttaggtgaactgaggtttttaccacaggcagtgaatgaccttggttcaccaaatttgcctctgttttgaggggcttggtccagagtgacttgttaatttactctaacttccttgtgtgttgatgggtaagtacactcaaacactgaatacaggtgtgtgatgggtagatttcacagcccttctactaatagtgagtgtgaaggcaagcttgatgcaaaacctcctgacctttcctacctgaagagccctttgacttctaggaagaagggtcaaaaatgttatcttcagttgtgttaatcccagttttagtgcagcttaggaggctgctagttaggaagatggcagtggctgtaggctgggttgccagaaaagatggtggcctagtcttattattcagatggagaacttagaaaacctgaagagtacccaaattggattgtattttaatggacaatggctgtattttttccatgttagaaggatcctaatgaaagcacctgttatttttaagtttctaagggtctagttgttcagaatccccaaggatatttccctaacctcactcagtcacattgtaggagccagtgtagctatggaattatcttaggaactcaagcttctaaaactatccatgtagtcaaatctaggggaaaaagc

SEQ ID NO: 1607 - DNA, 2143 bp, Homo sapiens
acaaaaattagctgggcatggtggcaggcacctgtagtccagctacttgggaggctgaggcaggaaattgcttgaaccctgaaggtggaggttgcagtgaggcgagatcatgccactgcactccagtctggcgacagagcaagactccatctcaaaaaaaaaggaaaaaaaaatttatgggggacaggtatggtggctgatgcctataagcctataatcccagtacttgggaggccaaggcaggaggatcacgtgaggccaggagatcagcctgagaaatatagtcagactcctgtctctcaaaaaaatttaaaaaattagctgggctgtcacttgagctcaggagttgaggctacagtgagccatgattgcaccactgcacaccagtctgggtgacagagtaagaccctttaaaaaaaaaaaaaaaaggccagacatggtgacttgtgcctgttatcctagctctttgggaggccaaggtgggaggatcacttgagcccaggagttcaagaccagcctgggcaatgtaatgagaccccatgttcttatctgtgtccttagaatcctacaaatacaaatgagattgtccctggcaggttgttgctagaagtttcgctgaaggcttgatcagagtagtaagggcccctgactgctggaagcaaaagtggttctttagcgtgttacagctgttcagctgtatcaggccctttattcttctgttttcttctagcaggagccatgttaaaggctcactcaacccttctccccatgatccttcttaaaatatccactttaaaagggaattgttatggaagaggtacaattgttagaataatcttctggtacagtagaaagctgggaggcttctgggctcttttctggcctttacaaactttgagccttaagcattttacttctctgaagctcaatttgctcttgatcagaagagcagagtaactgtggttctccgacagccgtgagagtcccgtgagaatgtgactacaagtgtgcttgataaagtggagagctgtgccccaggacacatgattttcttatgtactgctgggctgccagcctcaccactcatgtctgagtagtaaggtgctatcatcttctaagtggtgtggtttctttctctccatagtgctaaaataaaaaatatcatttccacggaggatgccaaggcccgtctgctggcagagcagcagaacaagaagaaagacagcgagacctccttcgtgcctaccaacatggctgtgaattatgtgcagcacaacagattttatcatgaggagctcaacgcgcccatacggagaaacaaagaagagcccaaggcccggcccttgagagtaggtgacacggagaagccagagcctgagcgtgagtgcaacaaaggcctcggggctgcctggagtgctcagcaatgtgggaacccatggaggcaggatgcagcgggggacagggtggagcctggcattggagccggggcatatgggttccagtccatgctctggaccatgactatgtgccttcccctttctaagcctcagtttcctcattggaatcctaatagaacctacctgttaggattactctgagaattcatactctctcatattctcacgcacagtagagactcaagaagttagaaaatttcagtaaggacaaataaaagctactcataaggttagctgggtgcagtgcctcacacttgtagtctcagctgctggggaagctgggacaggaggattgcttgagactaagagttcaaggctgcagtgagctatgattggaccactgcactctagcctgcgtgacagagtgagaccacatcttttttttaaagaaaagaaaaaggtattggccatgctcggtggcccatgcctgtaatcccagcactttgggaggcagaggcaggcagatcacctaaggtcaggagttcaagacgagcctggccaacatggtgaaccccgtctctactaaaaatacaaaaattagccaggtgaggtggcaggtgcctgtaatcccagctactcaggaggctgaggcaggagaatcacttgaactcgggagttggaggttgcagtgagctgagatcatgccattacactctagcctgggcaacagggtgagactccatctc

SEQ ID NO: 1608 - DNA, 2000 bp, Homo sapiens
atcttcttcctgccctcgccgtggcgggcgacggtttctcgcgccgtggctggctcggccggccggggcaccgcgccgggctccatgcagccgggctgcgcggtcccgcagagcgggcgcctccggggctcgagtcggggacccggcaggagcgggccggggatggcggcggcgggcggcgggtcggccgtggagccccggagaggcggccgccaccaccgctgcccgcagtctgcgaggtgtccggcggtccgctcagggcctcttttgcagactcggtgcccggagtgcgccggcgccgcccgccaggtcttggcactgctggcgcggccgcggcggcgggggcccggctccagatcaccgacccccacgagcgccggccctgcctgcccgctattttggttccatctcttctgcatatttatgcttgcctgttacattccctggcctctgagtgtcctttggcagtttccaaagcatttgggcaagaaggagcttgggcagcttcacaacaggtggggacgcgcaggggaggggccgcggccggaccggcagagtttcaagggctggcgcgccggcggactttccacactgtctttcgggactggggttaggagacagcccttggccaccactgtgtccttactttgtcgctttacttggggctggacctcccctttccagctctggcgtgtgaccccgcaacgagcgtggtgtcgagaccaccaccagctggggcggtgggagcgaaggtgccccaggctcggggaaggtggaaaccttttccccgctccccaagtgattgttgcgcgctccggtgaggggacagtggtacctcgatttcccgtgtgccagcttcgggactcagctgtgcttttgtgtctctttgattagcaaaagcaaaacgaattcctccccgaacactaagcttcctggaaacttccctagacctaaacttgagaaccgcatataaatgggccttgagggttctgtcgtcagtagcgggttacgtgattgcaaacgagcaagtttaaaacggagtgggctttgggctgcagagccgcctggcattctgacagctgagcaggaggcagaggtgagagtccaagatggactaaaaatgtcccagcagctgggagcccaacctcggcccaacctcgttgaaaggaggaacattcggtgcagccgtcggaaccttattatttatgaaaggggacagctcacaggattacatttttctaagccaatcctgtgaccatcctccatgaaattctctattttggttgcatgtggtcaaaactgagcctcactgaaacaattgaaaacaaatactcccgacaaatcttaagaatcgttttgaaaatcaaaaggtggggaaaatgttgtggcttctgagctttcttcagcccatattctattattctctgatgttttatggtgtaaaatcatacccattccattatgtattgattgtcaagaaggaagtaggcttttattgctatttttatgtcagtttccatttactgtctcaccacatttattgggttattgcctttgcctttgactcaacaggagctggaagggtaggaatcccaaattctgttgcctaaggcagccagttgtcagaatggactttcctcattttctattatgaggcctgaggaaagacattcagttccaaaggctgtgcctatccttttaaatagaagagagagggcccggcacggtggctcacgcctgtaatcccagcactttgggaggccgaagggggcgaatcacgaggtcaggagttccagaccagcctggccaacatagtgaaaccccgtgtctactaaagatacaaatattagccgggcgtaatggcgggcgcctgtattcccagctactcgggaggctgaggcaggagaatggcttgaatccgggaggcggaggttgcagtgaaccgaaccgagatcgcgtcgctggactccagcccgggcgacagagtgagactccgtccc

SEQ ID NO: 1609 - DNA, 2392 bp, Homo sapiens
cttctgctccggccctgtcctcaaattggggggctgatgtccccatacacctggctctgggttcccctaaccccagagtgcaggactaggacccgagtggacctcaggtctggccaggtcgccattgccatggagacagcaacagtccccagccgcgggttccctaagtgactggttactctttaacgtatccacccaccttgggtgattagaagaatcaataagataaccgggcggtggcagctggccgcactcaccgccttcctggtggacgggctcctggtggctgtgctgctgctgtgagcgggcccctgctcctccatgcccccagctctccggctgggtgggcttggccatggtcagcgtgaacgcgcccctcggggctccagtggagagttcttacggtaagtggggctgggggaagactggacagggcgggactgcggtcagctttgggaggccatgggacacctccccgtgtgtttcttacgggcccaaagctcctcctggagctcctctggaagggcaggaagccccacggaggcaatgtgaccgcttccctaagctctcaagccggggcatggcctgcttggtgcgagaagtgctgggaggggccgagaagccctggggcagaggcttggctcattttgtctgtccagaggccttcctgggaatgcatctcaggggtctttccaaaaccccacagagggtggggcttggaagcaccgtcctgtttcgatgcggggcaaattgaggtccaccaggagaggcttgctgggcctaggtcacgttgctggtgcattatcaagctgggcgtgggaccgggcagctcggtcgctccgcacctccgttggctctggataatggggaggaggtagaaagcgccgcgcagggtggagcgttggaaaatgagaatatcttgtgcggacgtgtgaaactcagatgcagggctagaaagcatgtgttactgagagtgaaaggctcaggctcactccttagggtgacccccacattggaagcaacccaatgtccctcagcagagggaagacgggtaaataaagcgtgagacgtctttacagtggaatgctatcccattgttcaaggaaacaacgcacatctgtgtgtgacagggaagaacctctcagttaaattaagtgaaaacggtacactgaagaactgtgtagttgctgatagcgaaacggatatagatgtatatatgtacacacgcgtatacgtgtacattccacgcatagaaaattcgtggaatgacacaataaaattggtgacaggtttgtttctgaggagggaaattcaagagaatgttttatcttttggggacacattttggattttttaaaagttgggtgccttttataaacctgtttaaatcacacacccgcacagaacttggtctctggaatccagcagacctcggggtctagttgtgactctgtcacacggctcaacattcacgtgcctcttgctttctttctgaagtggagacaggactaggatgtgtcttaagatcatggtggatgccgtggggaacaaggatgtaaagcccttgataccacgtgcattgcaaagacacaatcaacatttatgtcatcaattgctgaggacagagggccagggaatgacagaatcagggcctgatctcctgactctagtcaggaagaatcttctttgctttgacccccatcaaacaggaatatgtgatgcactggaaatggcagaggctgaagaaaccaacagcctgggaacccatcccacacaccagctgtgtgaccttgggcaagacatttcccctctctgaacctatttcctcatctgtaaaatgaagataacaacaggacctatctcccagagagcggggagattagaggagatagcatagaggagattaagggtgaggccacccttaatccacaattttaagacctggagtatagatgccaatggatgacttggttgaacctgtggctaggggaagacattgtctctcaaaggggccagacagcttctggggaaggacagcccaggtcataaggctaagctaggggtgaacagaaggccccacagtgtctcttaaaggatgatacaataatataacctgacagcctttcactgtctcccacgtctctgcaccttgtaggatgtcctcatgtctcttcatctctgctcctgtgtcatactcattatatagcaaacattcagcaattattagaatggttgcttctatcgacaggtaggtgggtgaatggatggatgaatgggttagtgaatgttctactattatctctcagacagctgtttcattttccaaacggctgtctgagataaataatattgtaatctccaaggacagaagaaaaaactaaggttcaagatt

SEQ ID NO: 1610 - DNA, 1987 bp, Homo sapiens
tttactcctctgtcttgtaactgagagcacctcagagccaggtattaagtcttgccaggtactaagtctttcttctgttttttttgtccaacatgcgactgggctgaaagggcctcagtgaatttgtggagagttgagtggttttaggtacagctggaaacagcaggttgggaaaaactagattgtgccggtcccgtgaatgttagctgagaagtttgtatttcatttcttgggaagcaagtgtttatcaaaggttgtttatttatttgggatggagcctcacgctgttgcccaggctgcagtgcagtggcgcgatctcggctcactgcaacctccacctccgggttcacgcagttctcctgcctcagcctcccaagtagctgggattacaggtgtgcaccaccacacctggctaatttttgtatttttagcagagacagggatttgtcatgttggccgggctggtctagaactcctaacctcaagtgatctgcccgagtcagcctctcaaagtgctgggattataggcgtgagccactgcacctggccaatcaggcttttgtgacactgccagaactgtgtttgaggaagattagactgaccttgtatgctaagaattcccaggaaaaaaaaaatggagattgtttaggaatctattcagggagattgtttaggaatctattttatggatgacaaaggtctgaattacggtggtggccatagaaatggagtgggtagggccagtgtgggagaagtctcatgggaagaatgggtaacagtctgtgctcatctgggtttgaggagtgaaagaaagaggtgtggaaaatacataaagagggaagtcgggttatacaaaggagaggagaaaaataaaggaggttataccaaaggagaggagaaaaaataaagagttccgttttagatgggcttaattgggagttatgctgagttgtccatatagacctttcagtggtatgggccgtgttcatgcctgtaatcccaacactttgagcagccaaggcggacgatcacttgagctcaggaattcaggaccagcctgggtaacatggcaaaaccccatctctacaaaaagtacgaaaattctctgggcgtgatggtgtgtgcttgtagtcccagctacccaagaggctgacatgaaacaatcgcttgagctcaggcgatcgggggaggtcaaggctgtagtgagccatgattgtgccactgcattctgacatgggtgacagagcaagatatgtctcatttaaggggggaaaaaaggaactgtgggattgaaactcaggccagggcggaagtcacctctgtagagggggagagttgagaccatgagcaataaactggaatcacagattgtcaggctccctcccacatctggaattcagtttcctccacatccctcccaagtcctcatctccacagaagaggaactcgctacctcccaagccttctacttgggccatcccaaacaacttgactgctagaaaagcctcacatttggcccagtgcagtggctcatgcctgtaattccacccctctggaaggccaaggtgggaggatcgcttgagcccaggagttcaataccagcctgggcaacacaggagaccctgtctacaaataataaaaattagccaagcatggtggtgtgtgccagtggtcccggttgctcaggaagctaaggcaggagaattgagcctgggagtttgaggctgcagtgagctgtgtttgcaccactgcaccccagtctgggtgacagaatgagaccttatctcaaaggaaaaaaacataaaaagcctcacactcagctcctatctgcctctctctaaggaaataccaaggtaattaacaacagtcttattggctgctgtatgaagcactgtgtggtaggcattgattttacttggtgttttgcaagtgaaacttatattaaacaagcagggtttccacagtcaagaagtagaattcaatcatg

SEQ ID NO: 1611 - DNA, 3016 bp, Homo sapiens
gtgcttgagaaggttcaatggcgtggcagggactagcggccgagttcctgcaggtgccggcggtgacgcgggcttacaccgcagcctgtgtcctcaccaccgccgcggtgctccaggtgaggccgccccgcgccgcgcacctgtgggcccgacccacccaccccgcacctgaccgcccgtcccccgtaggtctggaggctcgtcaccaacttcctcttcttcgggcccctgggattcagcttcttcttcaacatgctcttcgtgttccgctactgccgcatgctggaagagggctccttccgcggccgcacggccgacttcgtcttcatgtttctcttcgggggcgtccttatgaccctgctgggactcctgggcagcctgttcttcctggggcaggctctgctggtctaggactctgggctgtggagggtgaccccacagtccgtggctgtctcacagggattgcggtgggccatatctactacttcctggaggacgtcttccccaaccagcctggaggcaagaggctcctgcagacccctggcttcctgtgagtgttgagagccctccctccctctccccaccctcagaaggatccccaccgatggggacctgtgctggcctgtgctcaacacgggcccctccccacagaaagctgctcctggatgcccctgcagaagaccccaattacctgcccctccctgaggaacagccaggaccccatctgccacccccgcagcagtgacccccacccagggccaggcctaagaggcttctggcagcttccatcctacccatgacccctacttggggcagaaaaaacccatcctaaaggctgggcccatgcaagggcccacctgaataaacagaatgagctgcagtctcttggcccacagcactggcttccccatctcacctggccacatccttctatgcctgccccgtcctcactcagtgtggcctctcagcccaactgcaggtggtaggataggggtgcccacagagggcaaagaaactgcccatggttgcctggcagagctttgagctcacaggttgccaggcagagcttttgagctcacaggtgacaggctcagggttctcatcctggccccaccagggccttgggcaagtcctgcccaccataggcctctgctacctgccagtcagcggggaagttcaccagatttcggctgctggggccaggacaggcctctcctaggttgtgccaaaccagcctacagatgttcctgccagtggtgccttcaggctgatgccaatctagcctctcctgtctctcatcagccaccctgacaggtgggcgtatgcctcatttttcatctggtgatgccaaagccccatggattcaggtgcagaagagggccaggactaggtcttctgccctttctatgacctcagagcctaagttttcaccttagcagagttctgagactgggtgaggcagggacttctggaaggttctgttcctgccctttttagctgaggacgtgtgtgagccttatctgacccctgtggctcatttttctcttctgacctggcagctttccttgttgttctaagcctgtccatgttgtggtttatttctggatgctcagtggcacggggcctcctccaaagacaggttgtcattttcatggtaacaacactgttctctgttgagtctgccctccgtgttgtagccagaccttgtggagatggctttgcggcggtgtgagctggcggtcaggagtgagggcccagccttcccggcacctcccagccaggtggccctcaccctttcattgccgaggttcctacctcatggacagaacaaacacctcagcaatgaaacctgttcatgtctaagagcagctgggctgggaatcttcccctttgttcaaggccttccagtaaggcccagctgtccccttgctgtgcatggggctctggggagttccactctttgatggagggcagaggccctgagtgcaaactccctgggaagagtcccatgctaacatgtgctcaaaggagccctcctctcacatctcagcgaccaagaaccccaatccctaatcagagctctgcctctgccccacatggggccctaccccacttccagggagcacagcagcctctgaccctagccctgccctggcagcatgggacctgccaacagctgagggtggcagcagtctgtgctgggatctgtgcccggatctgtgcccattctcttcagtaaggctggagctgcgagccagtttgctgccctcccagatcctgtgtccattctgaagaatggggacacctccctattacagatgagaacagaggggacatgaactccttggaggcagggctgggaagggaccctgggctgtgtctcctccctgtaccgtgtcaactccaagagctggcaccaggccgggagggctattcccatattcctcacagctggcttgtaaggcaggagctggcccaggccacagcacctgctggggtgggaaagggccccagctgacctggctatgggtgccactggagctagaacagccctcctgcacccaggctggcgacagcccagcagtgcccacacaggactgggccctccgcaggggacttcagagcagcaaggccccagctggcagtagcctgaccatctggacacagcagagccagggcggcccagggacggcaggagagctcgcggcaccttcctgaggccaagcaaggggagcagggttagggctgttcctgaaaggcagagagcctctgccctgagcctcacagctactcttctcagctctctgggtctggaaggagaacaggctggggggagctgagaggagctgaggtgctacccggagccccattcacccccacctgcccacttgggaatctgaggcagaggagggtgaggcctgtgtgccaaccttgttcacataccaccttcgtccccccaggccccggccccactcctggctctcattatttttatgttaaaactttgaagaaattg

SEQ ID NO: 1612 - DNA, 2251 bp, Homo sapiens
agcaagcctcacccatcggggaagaagctttctataattcggtctcccagggggttcacggcgagcgcccctatctgctggagatccatgcggctgcaaagccaaatttcaaagagggtaaggcagagatgccagacggagggtcaaagagggacatggagtcagagagacagaggccagaagttatgaggccggctccccctcacctcaggtagcccttcttattcctgtccagtgcccggaaccggtggtgcaggcggagcaggctggcttgggagactgcgggaaggagagtggggtgggggtgtgtgactctgcagggccagctccagaaacccgccccaacaggccaggaagatgggccagaacagcgggggctggctggaaggggcgatcatcccggggaatcaggggttgagctggccggggcggagggagagtgacacgaccccgcgaagatccaggttcaagacccgggcggctcgcaacctcccgaaaaccaaagaaccaaagccatcccttccaaccgccgtcagctctgccttcagcttcgagccgggctggaggacacctgggtgcctggattcctctggactccgaccccgtgaacccggatcctccccagacttggaggctgggacccctaggttaacccgcccctaacccagcgatcccaggcacaggggccttggtcttccagctccggggagccccggaccccagacttgtaagttcgtccatccttcaacccaaccccttccctagccccagacgcctgggttcgccccgtcccctccgcagccgccgacgcgggcgcactcacagccggtctctcgccgaatactgtccccgtcgggaatgaccgcggcgtgggagctgcgcgaccccatggccgagctggaggcggaagggccggagcagccacccggacccacgcgttctctcctcccgccggagaggcgtggccgccccagtggccccagggggacgaaggccacaagcctggcgcgcggccaagctccagaaccccggcgtgcctctcctcccacccgcgacccgggcgaatggaaaacaatgtgcagggtggcgggtcagagggaggctgcgaacaacgggctgtttcagctccgagattttgcgatccgcacgggagaggctggtcgagtcccaggccccgcgtttccacgcctcccccggggccggttcccacggtgcgccctgacacctgagccacctcctccttcgcgggccccgggcgctcccaaccccagggcgctccccggcgtcgacgctgaggaagcctgggagacctgacctcctctgtagagaccacgccctgctggaaggcgggtggcctatggggagggaatcctggggggaggggggaagaggcatcgaagaactcccaaagacggggaagtggggaggggcggcgagatgaagggtgtgcgttaggttaagtggaaagagcactggtttgggagtccttgttggaatcccagccgtgcccgtgactctgggaaagtcagtaaatcttggtttcatcccttttgttcggttcacattgccttattgttgtttaattgagccaatgcttaaaattcaggagatttaacccaaaatccacattcttggcttttcctgagaaatcagaagttctatcaccaccaggcccagagctgtcttctggccacagtccctccaagcccaattcactcccttaggtacctactgatcccgtagagctccagactgggaatgacttagtcctctgaacagccctccagagccatgggactccttggcccaagagagggttacagacatcactgggactaggcttaaagcaagaatgacaacaagggctcttgtttaccacgctttgctaagcactttacgtgcatccgttcacacattccttgtaggccctgctgggctgctttcttctaattttacgtggtggaggctgccgggggcaagttgtgaactaattatgtaaagcgtgcattctcagtgcggtctctatctcaccccaacggggcaaaaaataaaacatattttttatgtacaaagcacagcatacatacagcacataaatagatatacagtatagctgtgatattgaaatttcagggcagacgtggaggctcatgcctgtaatcccagcactttgggaggtagaggcaggaggattgcttgagcccaggagctcaagaccagcctaggcaacatagtgagaccccatctctac

SEQ ID NO: 1613 - DNA, 2112 bp, Homo sapiens
agttcccgacatgccctgccacgggtgcgcctgcgtaccggagctactgcgccggggagcgggttggtttaaaatgctgtgttagttccacggaaacccgctcgcctgctgcagtacggagcctcaggcggacagatggactgtaaggtacatatggaaactacagtgtccagaccggtcctttctccaacccacatcaacgctacagcttctgaaacattcacagtacttcagcaaaggatgagaatagttgaggaacagaccagttcactgagggatgacctaataatgttggattttggtgaaaaaagaggctatttggaagctccagactgtttagaagacctggacagccagaaagtcattagtcctatccaaaatgaagcaatttgtgcaggaaaaacagatattttatggaagaactgtgagtttctggtaaatcgaatgtgccgtcttgaaagcctcatgcagtccttgaagatgaacatctttcggctgcaaactgaaaaggatttgaatcctcagaaaacagcttttctgaaagatcgactgaatgcaatacaggaagagcattctaaggacctgaagctgttgcatctcgaagttatgaatttgcgccagcaactgagagctgtaaaagaggaagaagacaaggcacaagatgaggtgcaaaggttgactgccactctgaagattgcctcgcagacaaagaagaatgcagccattattgaagaggaactgaagaccacaaaacgtaaaatgaaccttaaaattcaagagctaaggggacaactggctcaggagaagtaccttagggaatctttagagaaatcagcatcagccatgctcctcaaaatacaagaaatgggatcaacagtggaggtagaacgaaaacaggtgcacattttgcagcaaaactgcattgctctacgtgattctatacagagcgctcaagaactactggcccaggaacaaaaaaaaaagaagagttggagattgctacttcacagctcaaatctgatctaagtatgaaaatagatgctagaaatcaccctcttgttagtttttggagatttcatggaaaaactcttaagatcccaaattcttaaagtggccagtgttattggtatttcccacagtgctgtatgtaaaacattgcagatttcccttctacctgcagtactgagatagagaaggattgttgttaataatatatttgaccctgttaattgtaaactattccttatttgtttttttccaggttgtttgtggacctgggaatatttggtttctagacatctggcttgaatattgggcaaaaaaagtaaaacaatagattgaatatttgataatagaatattagtaaggtagtaaggccatgaatcgttgatgacttatggattctgtcagttcatcatgtcagattctccattcttcatgttatcaatctattttggttaacctatatttgtagagatggatagttgtaaggtacctttaagagagcttagattaatctcctctttttatagatgagtcctcaaagatgacagagctaggaaaggaaggagcctagacttgatcccaaggtgttcggtcatatttcttctaacccatcagccttttatcatactactgttgctagtacttcattataaagcagtttccaggtagtctcaatgacagaggtcacagagttacagggcagtgcttcatgtgattaatacatcatggtttacactgaactttcacataaactatttcattcagtactcaaagctatccttccagagttacaaaaggaaaaaatggcaaagtaagacctagacctggatcttctaactccaagccgagtgtactctccagttcaccttctgtgctctatggctgctgtaatgggggcagagaataccaaaaaggaaatggaaattataaaaaatatagagcaagagtaatctattcaatgttttgacttactgcttttagcagaaagtattcccttttcttatagtagtgaattactgtgtgaagttctcaccgacaatgcccctggataattttctgtctttctgtaattgtgtgcctacaaaaatacatgtatattttatggtg

SEQ ID NO: 1614 - DNA, 2081 bp, Homo sapiens
aagcgcatcgagggagcccgctcaagctgaagcgctgcacgagctgtgtcttccttctctccgccgcgaatgcgggcaggatgcgagcaaaagacccggcaaagagggcgccgagggggcgcagccggggcgctgggcggacccagaggggacatggagaggaacgcggaaggtgccctctgcggtgggcattactatttccaccatcctcatgatggatctggaatccacgggggtcccctgcccaggatcgtgcagcctgtggaaggcagcaggcgccgggatgccgaatggattgaatgagcttctcggggattccctgagcttggtgaacgcagagcccaccctgacggtcaggcctaaccccaccgccaataacagagcagccttaggtggaagtgggctgcctgtgcctggcactgggagcggcagaggcggctgccgctgtggaagtagcgcccgcagtgccaagctcctgtgcctgggaggacgcgggcactgggcgacctgcagtcggggctgcccccaggcagggctccctggctttctcacagcgcggctcgcgggaaacgacgctgccctatggcacagtgaagtaaggcgatggctgctctcagccagaggcggggctgggggagggggccagagatgccccgggagcccctggaccctctggagggtcgggtgggggaggggagatctctgtcttgaccacgcacttgtaacccattcttggcacaccgggataccttgcctgcaggtagtgctctgctctcggggagagggcacaacctctaatcctcagaccgaggctctctgcctctcacaagaagcccccaacacactggttttcctcacagcctgccccaactgctcatcggaacctgcagcccccttccctgccccaactgtccctctgcggaccccattaccctactttctgtcgagcccaactgccctatcctttatacaggctgtcgggggcaatggtggtgagcatgggctatggagtcagattgcctgggttcaaatcctggctctgccatcttctgactgtgtgaccttgggccagtttctttatttctgtgcctcagttttctcgtctgtaaaattgacgggatggtggcatctgtctcatagagtggctgtgagggtagcgggcacactgccacaggcacgatgaacgtcagctcttgttgccaacctccccccacaacacacacagcttagtaactctaccctcacccaacacataacacctagcttgtccctcataatgagctctcagcctaaatcagtgccctcagcaaacctgtggtgcagggcacgtgttagggtagacaagatcctggggaagactcactgactccaccgaggcagcactggctgcagctgggattggcccagacatttaagagccgaggactaagcaatgcctgcattgcctgctatgtgcatatgtccagcaggacggcagtgtcaggccactggccagtggggaccagcctctgagctggtcatccgaacaccctaggaaagagtccaccccgtccttcatgttctatcactgcttggcctagctaagccaagcacctgggcccaagccccaccgtggagatggcggctggagcagtgtccgaggtcacagatggaggaatgtgacctccagcccaatctcgactctgctctttgccagttcagtcttgcccaagtcacttgggttctccaagcctatgatctcctctttaaaatggaagggagagctgggcatggcagttcatgcctgtaatcccagtactttgggaggctgagacgggaggatcacatgaggccaggaattcaagaccagcctgagtaacatgatgagacccccatctctacaaaaaaacaaaaaacactttggtttttgtttgtttgtttgtttttgtttttgtttttaattagcagggcatgatggtgtgtttctgtagtcccagctactcgggaggctgaggcgggaggatcagttgagcccaggagttcaagaccagcctggacaacacagcagaccccgtctttataaaataaattcagtaaaatgg

SEQ ID NO: 1615 - DNA, 1593 bp, Homo sapiens
atcacataacaaccacattcctcctctgaggaagcccctgggagcacagctcgtcaccatggactggacctggaggttcctctttgtggtggcggcagttacaggagtccagtctgaggtgcacctggagcagtctgggcctgaggtgaagatgtctggctcctcggtgaggctctcctgcaaggcttctggagacaccttcaacaactttggtgtcaactgggtgcgacaggcccccggacaagggcttgagtggatggggggaatcatccccatctttggctcaaccgattacttatggaagtatcagggcagagtcattatcaccgcggacgagtccacgaggacggtctacatggaggtgaccagtctgacagtggaagacacggccctttatttctgtgcgagaggtggccggcggccttataggaacggttttgatccctttgatgtttggggccaagggacaagggtctctgtctcatcagcatccccgaccagccccaaggtcttcccgctgagcctctgcagcacccagccagatgggaacgtggtcatcgcctgcctggtccagggcttcttcccccaggagccactcagtgtgacctggagcgaaagcggacagggcgtgaccgccagaaacttcccacccagccaggatgcctccggggacctgtacaccacgagcagccagctgaccctgccggccacacagtgcctagccggcaagtccgtgacatgccacgtgaagcactacacgaatcccagccaggatgtgactgtgccctgcccagttccctcaactccacctaccccatctccctcaactccacctaccccatctccctcatgctgccacccccgactgtcactgcaccgaccggccctcgaggacctgctcttaggttcagaagcgaacctcacgtgcacactgaccggcctgagagatgcctcaggtgtcaccttcacctggacgccctcaagtgggaagagcgctgttcaaggaccacctgagcgtgacctctgtggctgctacagcgtgtccagtgtcctgccgggctgtgccgagccatggaaccatgggaagaccttcacttgcactgctgcctaccccgagtccaagaccccgctaaccgccaccctctcaaaatccggaaacacattccggcccgaggtccacctgctgccgccgccgtcggaggagctggccctgaacgagctggtgacgctgacgtgcctggcacgcggcttcagccccaaggacgtgctggttcgctggctgcaggggtcacaggagctgccccgcgagaagtacctgacttgggcatcccggcaggagcccagccagggcaccaccaccttcgctgtgaccagcatactgcgcgtggcagccgaggactggaagaagggggacaccttctcctgcatggtgggccacgaggccctgccgctggccttcacacagaagaccatcgaccgcttggcgggtaaacccacccatgtcaatgtgtctgttgtcatggcggaggtggacggcacctgctactgagccgcccgcctgtccccacccctgaataaactccatgctccccc

SEQ ID NO: 1616 - DNA, 2561 bp, Homo sapiens
gttggggggaaatggggttttatttctttcggtacctgtggaaactaggttgactgagtgttgcctggtagaaatctttaaggacttgccttaataccaagatgaggagaactgttaagaatatttgctgctgtttctgctcctagaatgtttacatatgtgcagataccactaagatcctggaaccttccagatagctgggtccggctcatctctagccccagttcattctgcccaccaccagctccaaatgagcagctctcccactgtggctttaaatcaggggcacctctaagactccacttccccctctctccctccacggtagggtcagcagggagccagtggcctggtattgatggctttgtcattaagcttggaggattggaggacgggggcagctgttgatttaactccaggcactgcctccacaatcttctttcaaattaggccattttgcccatcttatttggatgccttcacactagcaaaagcctcatatctcccaaagtagtcagcattttttttatgagggacagatttttattttcagccctgcagcttcttagttcagcattagagactctacttggtttattttattttgtaaaagaaaaaaagcccacaacacctccaatatccaggctggtggcttccctactgagttacaagacgaccttgttggcagagcactgaaatactcgggcagacagagagtgctcaccggggaaggccacaagtgctacagtggccaggaacgcggccgtttcattaagcagcgcttagcagttagggtctagcggtgcccatgttaggccccaagtccatttgacagatgtttccattttctccaggcaatgtaaatactgccccgtgatttatgggcaagagggagggcaagtaattatttgctgcttgcctccaggacacacacctagtattcagtgttattagccgcaattgcttccagtcggctgcagattttattcagtttaatgtgaccgggacttttttataactctacctagtgggttttagggctggggtttgacagcacagacttggtgaaaacaccagagactaaacattatggaaagataaggtgacctgaatcttgctaacaccattggctgcttccatacgcgggtctttaataagcattctgatttcaagttggtttccgccccactaccaggtgttgtatatttttttcattgtatatttgtaagtagactttaatatataataccatttccccccttttccctctcctcctattttccctatttaaggaacattttggagctgattgagttctttgaagatgacacaaggttttacttggtctttgagaaattgcaaggaggtacttaccgttgagtatgtgtgtagacttctgattaagacccagggtggtgatcatccatcatgaatcccagagacttccaaaacgagtcaagctaataaaaaggatgaaggacttaaaaactgcccttgatttgggagaagggaggccggagggaaggatgataattagcattttgcagagcttagaatgtcacctgtgtgggtattttataaatgccttttcattataataggagtcatatatagatacatttagtcatcgatttatcaatcccgttttgacatgttcactgtttaactacattaattatggggtggaagctctcaaatacattgcgaagtctagaaaggctaaaacagaggagaggagggtcctattgtttgggacacagacccaggataaaggggaagcctgagaatgtgccatccttcagatggaaagatgccatcacccacacacataatcactggggtgtatacttaagttgcttttctgacataatgaggtggggtagagaaaccctttcccttcccatcactcccccaatcttaggacacacttgcagggatgtctggaactgcatggagggccacacggaggggcttggtggttgagggagcgtgctttagaaaccaacacagctaaagcttatgttatgtctagctgcatcacttactagccatgtgatcttgggcaagtcacttaaccttttctaaacaatattcccttctataaaatagagatattgatagcacctacctcactgggttgctgtgaagattaaatgagataattcatgtgaaatgcttaggacagtgtctggtaggcactaagggcccaataaatgttggctgctaatattattaaaacaatttggtatgctgggggatgtcttagaagtatgtagagtagaccaggtacagtggctcacgcctataatcccagcactttgggatgccaaggtgggcagatcacttgaggtcaggagttcaagaccagcctggccaacatggtgaaacccggctctactaaaaatacaaaaattagctgggtgtgctggcacatgcctgtaatcccagctactcaggaggctgaggcagaagaatcgcttgaacctgggaggcagaggttgcagtgagccgagatcgcaccactacactccagcctgggcaacagagtgagactctgtctc

SEQ ID NO: 1617 - DNA, 2303 bp, Homo sapiens
atggtaaacattttctgagtgcctgctacatgccaaacactttgctaggggtgatgacacaaatgtaaacaagacagaaacggtccctgccctcgagaacaaatattctagcagaggagatggaccaatcagcagcaactgtgataccacatgataaaagctacaggggaaggcaggagctatgggagcaaggagagggagctctcacccagagcgtcagtgagttggtgctctctctccagaagatgatgcttccaggacagcttgaaatgacattccaggcaatgcctgcctcaggctggataaaggttggactggataaggtctggtgaagtccactggccacactagcagagatggcaattcagctggtaccttgctgggtggcctgggctttttaccctgcaggcagcattgtggtgacgtagaccagcctgttacaacaggagaattctagaaggaagctgtgggagccatttcaaccccaacagacacagcctgtgcttcttgagctagggaccattcctccagggctcggtattcttccttcgggaaggtgggtctagttggtacgggaattagtgatccttctctggagagaagggatactcatggtggaggcgttccaggaaagacttgtttttgcctggctctcaggttgcttctgatcccctcaagccatctgaaaacaaagccggtctttcaacaatttgtctttcaaatatgtgtctcttaagatgtggtccagataacctgctcagtatccctggagggattgtagacctgtatgctcctgggtctgacccagacggggaggcttagaattcctgtgtttgtattgagtggtccaagtgatgcgtttgcacatttaagtcccatgcaccaggaaggagagctggaggcccagagaggggaagctgtgcaggagagaatcagaatgagctgggccctggattgagtaccctgacactcagcactggactcactacaagagggagaagccagggggaaagaaggctacccttgtactccttactgtacttccccaggagccagaagaatgtagggaccacatcttggacccggaggtctgagcccagcagtggtggagagtccccagctgggagaccctcagttggatgggaaactagggatggcaggagagtctgggggactctctggcaggagaaccaggaggtaagagtctctggagacagttgctctagggccacctcgatggggtctctgtctgggcccctccccacagtttgagtcagagatggctctcagcatggcaggaggcttgctcctctccccgtgggtggactgcagttcccacaaccctgtcaggcagctgcagagctccaggtttctctgcccacaagggcaggggctgcccctcgcccaggatgactctgccttccagagccttggcctccctgggggtgggagtgtgggggatgctaaggttaaatcaggtcacagtaagttgtgggggcagcaggtggagcagcagagtggcactgggagctttctcttgggtgtgcggtgtggccttggttctgcagccatcaggtgggggcttgggactgacttctccttctgaaggatgctgggaaggtgagctggctttggcagtgcttagagctccggggggttccccctcctagaacatgcaagctctcacaccggtgcgtcatcatcacacccatcatcaagcccacagtggtatactgaacacctgccccacaaagacggtggaatgctctcagaggagccccatgaaccaccgatggttacaactatccaatgcctgatggcagacagccaggccaacctcggcttccactctctcttcctcaccctacaatcagccaaagtgacctgagtcgtgtagtgcgaagttgctttctgctttctcttgtttgtgcttttgctgtttcttctgccccatactttgttaactccatgagttaaatgctacccattttcccagacaagtgctgcttctgcaaggaaacccttcctgatcccccacctgtctgaaaagtacctctccagcttgcttcttcagggtgctgagcgttccttcccagcctgtcatcaccttcctccatacgctatggtgtgttcctgtcttctctagtcttgtcctcttttttctgttagattgtagctccttgctgacaggaaccacgcctgctccagcttcatacctcccactgctacagcacagaacctgcttctcagacttacagcaaatgtttgtttgctgaatgaattaattaaagataaagcattct

SEQ ID NO: 1618 - DNA, 3302 bp, Homo sapiens
ggaaaaggcgggtcgttccccccggacagccctacgccggcaaaggtctcgagatgcaggcggccctagaggtcaccgctcgctactgtggccgggagctggagcagtatggccagtgtgtggcggccaagccggaatcctggcagcgggactgtcactaccttaagatgagcattgcccagtgcacatcctcccacccaatcatccgccagatccgccaggcctgtgctcagccttttgaggccttcgaggagtgtcttcgacagaacgaggcagctgtgggcaactgtgcagagcatatgcgccgcttcctgcagtgcgctgagcaggtgcagccgccacgctcacctgcaactgtggaggtaagaggggctcacctcagttcatctcttttctccataacatccccttcatccttctggttgttcagggtaaagactttggagtcatcctcagccccaccccaccaccacacaggcctttgccatgcatccagaatccagaacatcatcacttcttgccccatatagcccctgctttaatccaccaccaccctcaccctccacctccaggatacctgccccagccttctccctggtctcccttcctccctcttttcttgcctccataaagcggcctgggtgagcatgtaaggactgaaatctggtctcatcacacctatgcttaaagctctccagtggctttgtgtcacattgagaacaaaagtccaggtccttgctgggttctctgtgttcttccctaggctgacttcatctgcctcctgcctcaccctctctcttctttctcactactcctcatctgcaactgcagaggggctgggctggggtggccaaaaaaaggtcactcttttaaatgtatctaatatgtaaaccagatatacagtatatctgtgatatgtaagtttcatggttgggcaattagaacaaaagtctaaaatgactccttgaggagaggcagtaacggaaaaaggttgaaaaatgctcttttagatgtttactaccctcctcactggactgtgagctccaaaggtgaaagtcacatctttccccagcccctgtgagtaccctctcctggggccctctctctgcccctgcagccctggcttctctcttgggccacctggccatccttctcctgggccccatgctccatcttgactttccagtcattcttggtgatcatcctagactgatctcagaggaaatctgaccatgttctgcttctacttacaaacctttccatggttctcaattccaccagcccaagtcttaatgccagcacagcccacagggccctgtgggatgcagtccctgcgacccgtggtcccacctctcctctctttcccccttaagctctatgttccagccccagtgaacatgcagttactcaagtgcacgtctccgctgcttttgtccagctgtttccctctgctgggactgcccttcctaatccatctcctggctaattcctattccagcttagacggcacgtctctcagaaaacctccctgatgtcccacccacttcccgcccctgtcttcaagttcccaaggtccctgagcccctccatcaaggctcacatcctatgcctgtgtcaagggagctcttggctgaagattggggtgatgcccttcttaccaggccctataggcattaattgtttctgtaaggcaaggataagtgaatagttcagacccctagggcagaaactacgacccctgagagccggaaggaacttaattctcctcaggaaacgttacctaacgatcacatactgttctcagtcagctgctggggacatttctgtctttcaagttttttgggcatctgaacagtaaagaccccatcctcctatcttagagccatttgctgcttccctccctggaccagcaaccagcctctctctggtctccttgtggccacccctgccctgacagtcttctcttccctggcagccaaagaagcttttaaaaatgggaattagggccgggtgcggtggcacatgcctgtaatcccagcacttggggaggccgaggtgggtggatcacctgaggtcaggagtttgagaccagcctggccaacatggtgaaaccccatctctactaaaaatacaaatattagccaggtgtggtggcaggtacctgtaatcccagctacttgggaggctgaggcaggagaattgcttgaacccaggaggcagaggttgcagtgagccaagattgcaccattgcactctagcctgggcgatagagcgagactctgtcttccaaaaaaaaaaaaaaaaagggaattaggtcacatctcctcatcatcccctccttcctggggatggcatcccagttacagtttttccttcctagctaggggcagtgagatttgttgtctggtctacacaatagcgaacacaaacattctcatctcctgcagcatggcatacagactttacagaatgtcctgtgtttttgtggctgacaatcaaagtggtacatgtccctcccattccgcacacacctctgctctttaccctgattaaattttcttcatcgaatttcttggatgttgacatatttattgtccgtctctccctgcttgagtcagagagttttgcctgctgggtacacggcaggtgctcagtaaatatagcagaatggcgcgttccctgcctcccatgacacttcaccacagctgactttttcacatggctcagggccaaggtcattgcccaacacccttctccctccagactgtgggctctgcagggtctccctctgtggtgtctacataggctccccaggctgggcacagaggaggtggtattagatgttgatgtactttctccacaggcacagccacttcctgcctcctgaggactcctctgacggcaggaaaactggacatgaatgactgcccccccgcccctcccctgcagagtggccagatggagtcctgagccctggacatgggcccggctttcctggatatcaggacttccaataaataaagactctgtatactgggctttgattcctgccatccgtacctgagagggtcctaggagagctggctgggcagagtcatctgttccccagcttcaccgggtgtgccaaggaagtgcctgggaagaacaggactctgcagctgtgccccagggttgagactaccctgcctcccttgtgaactctgccacacagccatttcctgacttctgctgcatgtgcctggggtaaagaccctcaatcccttccactctagcctgggcgatagagcgagactctgtcttcc

SEQ ID NO: 1619 - DNA, 2395 bp, Homo sapiens
agtccgcacgcggggaccgggagccaactgtactgacatgtttccaggataaaaccaaatttgcaggtggggcacagaaaagaatcaggcaagttgttctttccagcagccccggccatctgcccgaaacggggcaggaagggtaagaaggagcgcgcgggagccaggatgtgccggctcccaggcacagggcgcaacgcgcaaggaccctggggctcaccctgtgcccggcccgcccgcgccgagccccggaggcgccggcgtgcgtccttaccattcagctgccggtacacgatgtcctccagcagcgacaggcgcttcaggaccgcatcctggatggggctggcgctgtgcgcgctgaggttggccacctcggcgcgcggccggatctcgtggaaggcgtctccgctgcgcactgcgatgggccggcacttggccaggaagagcacgaagccggctaccgcgatcaagttcaacaccaacagcactttgactcttctcagtgaagccatcaaacagcccggccggccctcgccccggacctgcgccccctcgggctccggcgaggcgcggggcagccaggggccgtgcaagcctcacacaccagacggccggcagggatccaagcccctgctcgtcccacctcaaggatgctcgggcggcggagacggctgggaggtcggattggtggtggggagaacgggatcgctcacatggaagtcctcgctctgcagaagtgctccccgagacgcctgctcagtccacggcgcacggccccttccaggcgtctccgcgaaaggccagggatttgagggtttctcttctgcaccagcaagtggttcgcctctggacctctagccgccggcgccgcggactccgaggccggcaggcggggctgcccgggaggcacagagggagcggcgcacaggtgccgggctcagggatcgccgcccgcccacggcggagcgcgccgcgcctggggccgcacagcctcccaccttggcccgcaggcggccgtcgcggcgcgccacccgcgctcttcagcggaagacccgctcccccgggcaggcgcctttgttccgctcaccgacccgctccatcgcgccgggcagaggggaagcccgctcggggagcccgcatcctccaggctccgcagtcacgctcaagtctcaattactctcaaagtgggggcagcactagggggcgggcgccgggccgagcgctacgtcctctccgccccccgcgcggagtccaccccaccccgccggcaaactcaccagcgctcacagcgccgccggctcccggacacgttccaagcccccaaaccgcgccgagagccttcggggccttcagggcacaccggcctgtctcggagctggcgcgtcgcgaggctggccggaaggagtcggacctcaaaagtcacagcagttctctaccccctcccaaaacgtcgcgggcagcgcggcggggaggtacgcgcgccgaatcaccctccgctcgccagatccggccgcgcggctcgtcccgcgcccccgggagccaaaacgccgagtctcccaattggcggacgcggtgacaccgccgctgcggcaccgagagccacacagccccggagctgaggagcccggaggggacgcgcaggtggcggcggagggcggggcgcggcccgaggggagcggcggcggcgccagctcctcctccgccgctcttcgccaccctgtccccgagaggctgtcggcggccgccgccgccgcccgcaggctgccgagcgcacagctccccggttcgccgactcgtgcgcgcgcgcacccgggcagggcgggggcttctggagagtggggaccgcgcgggatggaggcagtcaaggcatgctggctgcggccggcgctggagggaccctttagttctcagtactccctgagcgggcgggttcgttccatcccggttggcgatgaagacatccttttctgtgtgctcgcggctccgcgctgcgtggccaggaatggctagagggaaaatctggcctggaggctcggattctgagaccttcggagccaggccgggcgtgagcgggcttgggggggttctctgcgtgcaagaattctaacctccccagtcactgcttctaggcccacccgctgctctgttcaaattttattataagaagcatattcatttggctcctggttttccactacctcttcctcttcccaaaacccaggaactcgaaatactggaattcaacgcccccccaccccggttgatccatttaattccttgggtctaaaatagaaatcaggccgccaactaataaaaatcgggcagcaaagctaaatggagctgatcgttttcccctcatcattttgatctcattaaagtttttgtttttgttttt

SEQ ID NO: 1620 - DNA, 3142 bp, Homo sapiens
acagtcaccgaagaaatgaagttacaggaggggcacaccgtccttttgtctctgcctttgaggttggcgggaactgaaactgcagagcatgggggtccctcgtaccccttcacggacagtgctcttcgagcgggagaggacgggcctgacctaccgcgtgccctcgctgctccccgtgccccccgggcccaccctgctggcctttgtggagcagcggctcagccctgacgactcccacgcccaccgcctggtgctgaggaggggcacgctggccgggggctccgtgcgggtgagtgagtggccgggggctctgtgtgggtgtagtggccggatctgctggggctgcacaccccgggatggggcgggggtggcggcggcaggcagatgcccgaggtagagatgagcaaaccaggctcagcgatcctgggtgccctgcggggggctgtgcccaggtccctggacgtcctggtcagcggaacttcctcctctgggcagtggggtgccctgcacgtgctggggacagcagccctggcggagcaccggtccatgaacccctgccctgtgcacgatgctggcacgggcaccgtcttcctcttcttcatcgcggtgctgggccacacgcctgaggccgtgcagatcgccacgggaaggaacgccgcgcgcctctgctgtgtggccagccgtgacgccggcctctcgtggggcagcgcccgggacctcaccgaggaggccatcggtggtgccgtgcagggtaggcgggcagggtgccggtctgggtccctttgattggccacggtccacatggaagggagattccagcgggaaattgccattctgccccacccctgtctccagccacaagggaaccaaccatccctttccccaggactgttctgcgcctcccgtcccaggcaaatccctctccccaggaccgtcctgagcctcccgtcccagacaaatccctctccccaggactgttctgcgcctcccgtcccaggcaaatccctctccccaggaccgtcctgcacctcccgtcccagacaaatccctctccccaggaccgtcctgagcctcccgtcccagacaaatccctctccccaggaccgtcctgagcctcccgtcccagacaaatccctctccccaggaccgtcctgcacctcccgtcccaggcaaatgggtattgatcacccccagtcacccagtgggcaggagcaggccctctatggctgacccgactctctctcatcccccccgctaatctctttatctgcagaggagaaggctggacgctgaggtgtctctcagctcccaaaccaacagccaccccgccccaccccttcctcttattctttactcccttctcaccctgcccagggcctggccaggcctcacccacaactttccctccaccccatcctctgtggccacctgaccccggcccgtgggagctacagcagggagtgcagcagacacatggccaacccagggaccccactgcagggcctcatgccccccgcctgccctctgctctctctgtgtgggcagcgctcaccagcctccctgggtgccgtccacctgggctcggctgctaagagctgtgagaggcttgttcagcctgggaggactcagggcggctgggatgagtcgtgtggaagggcggtcagagtgcgatggtcctaacccgaggcaccagcccctccttccccgtccccctgtgccttcctccagccccccgacctcggggacccagcagcccctcccacctctgccctcctccctgcagactgggccacattcgctgtgggtcccggccacggcgtgcagctgccctcaggccgcctgctggtacccgcctacacctaccgcgtggaccgccgagagtgttttggcaagatctgccggaccagccctcactccttcgccttctacagcgatgaccacggccgcacctggcgctgtggaggcctcgtgcccaacctgcgctcaggcgagtgccagctggcggcggtggacggtgggcaggccggcagcttcctctactgcaatgcccggagcccactgggcagccgtgtgcaggcgctcagcactgacgagggcacctccttcctgcccgcagagcgcgtggcttccctgcccgagactgcctggggctgccagggcagcatcgtgggcttcccagcccccgcccccaacaggccacgggatgacagttggtcagtgggccccgggagtcccctccagcctccactcctcggtcctggagcccacgaacccccagaggaggctgctgtagacccccgtggaggccaggtgcctggtgggcccttcagccgtctgcagcctcggggggatggccccaggcagcctggccccaggcctggggtcagtggggatgtggggtcctggaccctggcactccccatgccctttgctgccccgccccagagccccacgtggctgctgtactcccacccagtggggcgcagggctcggctacacatgggtatccgcctgagccagtccccgctggacccgcgcagctggacagagccctgggtgatctacgagggccccagcggctactccgacctggcgtccatcgggccggctcctgaggggggcctggtttttgcctgcctgtacgagagcggggccaggacctcctatgatgagatttccttttgtacattctccctgcgtgaggtcctggagaacgtgcccgccagccccaagccgcccaaccttggggacaagcctcgggggtgctgctggccctcctgacaggccttctggccgtgcccatgccccttgggtgcctggggcagaggggtggaatacgttggggtgccccacgatagctgtggggggggctcttagtgcaagatcctgtggattagaaacaagttgctcctcagagctctcaagcagggactgctctttaggaaggggagcagcggctgggagtgagcagggcagggtgggggcagggtgggggcacgaagtgggccctgggtgacccccacagctcccttccgaggctgcagggccaggcgcgggaccgcaggtagcccagggtgttgtgggtggcagcacttgtttactggctgctttctggctcgaaataaaggaatcgtgcttgtgt

SEQ ID NO: 1621 - DNA, 2795 bp, Homo sapiens
agaagttttcccccttggtcggtggcggagctgctgagcgcgatagtagcagctccggcggcagcaacattgactacgaggaatggcggcggctgccgcaggacctgcagcatcccagaggaagtcgtgcagtttctagacaagaagcatccaaaccactatcaagtctacaatctatgcatcttataaaatctgctttaggagacagaactgggcttgaagccttgtctttcaaagacaaaatccatgcaagaccaagtgttggagcaggcgatggatatgatctaaaagtcaaaatagtgatggagaaaaaggttgtcttttcctgtacttacttaagaaattgttaggtatttcatgacactgaaacagagcaataattgatgtattcaacagtccacctctgtatgatgatgtgaaagtgcaatttttctctttggctaaggaagcaagaaagtggaggggcgggcagagccagatccagtggtttcactcatgcaagacagaagtcactgtctatcctgtggctggaggggctactttgctcagaagacacaggtcttccccagaatctcacgtggctgcttactgtttccctgtcttctctccccattttgtcctttgctaaggaaactgaactgaattccaggtcttctctaatagagtgtctctccttcaacagggaacaaaactacagttgcctgtagtttttgcttctgttcagtctccatcatggcatgccatactctcctggtttgtgccctgcttgtttctttactgccttcctgcctgccctttctgtgctggaggctcatcccattcatgctcagccctcctcgctgtctacactgtcttcttgggcaatcgtatctagtcccaagcctttttaaaaaacaagctctacccatcatggtggaattcctgtctataaaagggcacaccttcagacctccaggcacctccagagaacagtgctgtgcacaagaaaccgaattcagttgtgtgggacctgcagctgcaatcaggtttcaaactcctactgaaataactaagactgccctttgcaatcttgaagcttatataataattttaagtggtataaaataaatcaacattcaaagcagggatagctaaacatcccagtggtttccaaattctgtttagtctctatataataaatacccaaggcaagaccaacaaagaggcaaagtctgatgttttgggaagatttggacagagaaaggtgggttcccttgcatcttcgcagacatttccgacccttcctaaaactcctcaagttcatctggctcagacaacctcttccaatactctgctttttgctaatgaaagaaaagctaaatcttggatcataagcagcatctacagtttcagtgcagcatgtctgctgacgagaggtagcactgccagctgcatctgaacagcattctcctggagaaaactgaaacagaagggcggttcattctcagtggtggatgatgagcaggtctcctctgtggcgtgcatatgtggtttctaagttttatatgatgacaatgtataacttcataaataaaaggaaagcagttatttttaaaaaaggaaatgttcttccacataaggcaccagtaaaattgtgaccatacaacagtagattttttttaatttttatttttttgtagagatgaggatcttgctgtgttgcccaggctggttttgaactctcagcctcaagccattttcctgcctttgcctcccaaagtgctgggattacaggcatgagccaccatgtcttgccagttttgtggggtttttttaaacaaataaaaaaagtgtgtgtccttgactcacctcagctttgcctgcttgtccaatccagccactttccgcaccacctgctggcagaagccgtagcacatgaagaggactgagttctcagcgatgttggcgattagtgctggactggtacccttgtagaagccacggaagcccacctgggagtaagtcttcaggcagcagtcggtgaggccccggtacaggtcagggaacgtctgcatcttcactttcattgtgtcaaagggctgcccggtcagtacacatgctgtacctcctgcaatcaggacagatgactgctctagtacgaggctacagttccattatccatggaaggaaggcacaggcagcctaccccagaacttacccctgcttcggttcatttcaacctcttttcctccaaaaccttccagccatgtccagtaaacaatttagagcaggtccttgatgtgcctggcatctaagtcccaccctgaaggagctcatgccaggcaggggagagagacagatatgtgttcaacagcggcaaacagtgcagtgaatatgtaggagcctgggcaatagggtcagagggactatggctttgctgtgagatcctggacaagccatgtaacttctgagcctcagctcctcatccatgccacctcacagggttagcgtgaggattaaataaaaatggaggagacaggcttggcacagcaccggctacgtaatcagtaaacagcagctactgtgtgcacaagaaacggaaaccacagaaagggaggggagacctgggaagacttcatcgctcactttgcctaatgcccagtgggactgaccagacccggcaccacggaaaggaaacaaggagtctggctaattaatccccaaagagctaaatatttcattctatagaaaaacctctttaatttgagctctaccgattaataacgtgtatgtaaatagagaatgaactgaaattt

SEQ ID NO: 1622 - DNA, 2209 bp, Homo sapiens
gcttttagcctctagagtttctttctctcacttggtctcctttaatagaatatagtatctcctgcagaaggagctgccagttcgttttaatacaccatcaaggagctgctgatggacttctatactaacatacataaaagcagaggtgacaggggctcttcaattacagcctcctcggataccgtttcccccttcaattattcaaccagaggaagagaggaccgcaaaggcgcagctgaagctgctcttagagcagaggcagccagatggagaagcgtaggggcaaggatgcgagaaaacttagccgagcttgacagagccgccagtggaggtgcagcggagtgtccggcgagtggtggcgcgaaggtccgctcggcctgggacgccccacccgagagaagaggagaaggcacaggacttgcggcgcggcggcggagccatgcgaaccaactccgccacccctgaggctgtttgcaaacactcactctcgggagcgtcgcgggccgggccattcgcgaaccagacgcaacgacgaagcgaccacctcgagagtggggcgggaaagctccgcaccctctatccccgccaccagtctccgcccagtaactgcccccggagaagcaaccacggagcccctcccggccagtcgcgctctcccggcagcgcagtgccctccggcccaggcagttcccagagcgccggcaaggcctcccgggttagagccgggctcccacaggcgcgaactccgagggcgcgaggtcccctagatccttaggcggcgaggcgttccgggacgcacgcggcctccccggagaaggctggaggtcaagcagcccaagtctctgccactccagagaagttaactaaagctctggagtccaagagtcgcgcggacacttaattctgactcttcttcctaatcgcgggaagacaaaccctaagcaacaaatccgagatagtttttttttaagcaaatattccttagaaagggacttatggcaacgagagaggaagggtgacaaactgcctgtggtccgcaccaggtatgtaagaaagaaccaagaggcccaattgtctgataccaagtagatagaaagaaattaacttccctatgcaattcaattcaggttcacccggccggactttaagagggtaagtcaagccctcccaaggggttttgaaaaagccgaactaccaggtttctaaaacgaagtcttcacccaaatggacgcatagatttttatttttatcgcataacccagggctggaatataacctcccaaatcaaactaaaaataatcacatctacctgaaatacgttaaaaagattcagaatccagacatcttaggttcatacataaaccctcagtatcaagcaaatcagaaacaatgttctagctttttttttcacccaaaagtatggaaaggctacagtgggtacaactcgtttaggataatacatatactaaaagcacatgcatgcctttcattgaaatgcctagggaggagtgaagccatctgtgtaatcaataacaggatagttatagatttttgtggcagtgaagtcttttaaaagcaagagtcaattatgaaaataaaatcattttacaaatgaaactctgtacctgtaccccctaagaatacattcacaattagatttacaacagtaagattttaagaaaactttaggtttacatttacttgccttgtttttcattaagtttgaagcaattttagtagcttattttaaaagtatatcctactaagttctacgacatgtaagtttgcaccatttctcacaacttagatattttctctctcgtaactagttaattcttgtaacgataaaataatggtattaaatacatgtgaatcttaattatgaaataattatcaaacaaggtgcttggactagtttttgccctgccctgtttttaaacagcatatcgaaattactaaaaagagatttataaaccctcaccttatatccactccaaccctcactggtgcacatatacagcaactgctctgattcttggcaacaatgggaggggaggggaagagaaaggaggatgactttaaaggaggaaaaaacctggaaaaattaggtcctttcccagattcccctttcgcttcccatttgccttcaagccaaagtaattttgttacagtttgcaccttctactacacaatgttgatagaatcattt

SEQ ID NO: 1623 - DNA, 2059 bp, Homo sapiens
tatttatggtaatatgttaattagttttagttacccatcccataatggatacatatttcagtatatgaatggaatgttatgttgtatatcagaagcatatctaatttttgtttgtcaatgacaagaagaaaatagtcctcatcattgtgactggctcaggctaaacacatacactatttttatttctgcagttactcttctatttctgtgctacgtcttaaaattatccattgcaaatggcatgtagctttgaaaatataaacttgccacctgatccaaaacttttcagttctgtcatagttttgtgtttttttttttttttgagatggagtctcattctgttgcccaggctggagtgcagtggcatgatttcagctcactgcaacctccacctcctgggttcaagcgattctcctgcctcagcctcccgggtagctgggactacgggcgcatgctgccacgcccggctagttttttgtattttagtagagacggggtttcaccgttgttgcccaggctggtctcgaactcctgagctcaggcaatccgcctgcctcagcctcccaaagtgctgggattacaggcgtgagccacggtgccagcctccgtcatagtttctaaaacacccacaccacaacagtaatcttgactcaacttcagctcctcatcctgtgtctaagccaagtttagccgaagaaaacatctgccgagaaagtaaaaacaaaaacatctgccaaaggcaagaacccggtgggaagccccctgagcccagtggcctgcagagtctgttctagtgacaaagcaggcaactggaagagatcagggctgcgagacagcgtgggtgggtttttatctgctgcttctgtaaattcattgcatgatacgtctgtttttcagaggtcccaaagcaaagaaacaaagccccacagagttcacccagagggaaggccttcactggatcaggctataagagaaggactctcccctgagaaagataaatacttattttggggccgtgtttagagaaaaaggaagaacgatggctttcccatagaaacatttacttattttgtgatttgaaaatggacttttatgttttaggaattatgtggatgggatgttttcttgggtgatcgatttgaaattgcagaggggagcaggtgccatgtgctggcaatggccggccttccttccttccttccttccttccttccttccttccttccttccttcctccattcctcctaccccccgtttcttccttctttctctctctttctttccttttctctttttctttctttttctttcttttctttctttctttctctctctctctttctctctctctctctttcattttgtttgttttaatgagtgagagtaaagagaaagaaaagaactgtttttattttttgtctacctttattgtaaggagagagtgaggataccatgccacacatgcagggtcctgagcagagggctgcaccctgcttagttctaaagacacctagactttatcctgaaagccactgagaggcccatattttgaaacactcagcctctcagaagaggatagaatgggttgccagtgtaatagggagagaaatcgaacatagctgactccatgttgcttctgactcctcaagctaactgcttttaggcacttctgcacacgggccaagttaatcatggaaagaacttagattacagtttaactggaaagcaaggatgataagcgttcctttccaaaactaacctctgaggagataagaagggcatgcacacaagtaacaatgttatattgaagacttgtaggagcgctgtgacctgagcaaggacaaagttttgcaatctccttgggcccctgctgatgcccaagtgtctgtggtcaccagccacccccctcacctcagtctcctccttgttccccttcagtgtaccccttcaatgtacaaagaagcttgagattcatgcctttaaagatggttcgttaggacatgggtccagtatcttcctgacttgctggctctccaaataaagatgcttttcttgctct

SEQ ID NO: 1624 - DNA, 2324 bp, Homo sapiens
acagacactgatctcagtttcccccgagagtgtgagtgtaggcctctacaggcagctgcctctggggagttggggagcctaggggttaactctagacccccctcaaccctctggaccaaagtctgtccaggaaaacaggatgccggagcccaggagtcgtcagcctagcagttgcctggcctccagatgcctcccagggtcaccttccagccctgtggatggcagtggaatcaggacactcccttgaacagtgaatacgattttgccctggtcaacattggacgattagaggctgtgagcggcttgtcccgagtccagctcctccgtccagggtccctgcataaatttatccctgaggagattctgattcatggccgagacttccggctgctcagagttggttttgaggctggaggcctagagcctcaggcttttcaggtgaccatggccattgtccaagccagagctcagagcaatcaagcccaacagtattcggggataaccctgagcaaggctggccagggttctggctccagaaaaccaccaattcctctcatggagacagcggaagactgggagactgagcggaagaagcaggcagccagaggctggagggtcagcacggtcaacgagaggttcgacgtagccaccagcctcccccgttacttctgggtccctaaccgaattctggacagtgaggtcaggagagcatttggccactttcatcagggccgtggaccgcgcttgtcctggcatcgccctgggggcagtgatcttctccgctgtggaggcttctatacagccagtgaccctaacaaggaggatatcagagcagtggagttgatgctccaggctgggcattcagatgttgtcctggtagacactatggatgagctgcccagccttgcagatgtccaacttgcccacctgaggctgagggccctctgcctgcctgattcatctgtagctgaggataaatggctttcagccctggaaggaacacgatggctggactatgtcagggcttgtcttcgaaaggccagtgacatttcagtattagtgacatccagggttcgttctgtaatacttcaagagcgcggtgatcgtgatctcaatggcctcctctcttcactcgtccagctgctttcagcccccgaagcccgaacactgtttggcttccaatcactagtacagcgagagtgggtggcagctggacatcccttcctgactcggcttgggggaactggggccagtgaagaggctccggtgtttctcctcttccttgattgtgtctggcagctcctccagcagtttccagctgattttgaattctctgagtttttccttcttgctcttcatgacagtgtcagggttcctgacacccttaccttcctgagaaataccccctgggagcgcggaaagcagagcggacagttaaactcctatacacaagtctacaccccaggatactcccagcctccagctgggaactcttttaacctgcagctgtctgtctgggactgggatttacgttatagcaatgcacagatactacaattccagaatcctggctatgacccagaacactgtccagattcctggctccctagaccacagccaagcttcatggttcctggaccccccagttctgtgtggctcttctctagaggagcattgacccccctgaatcagctctgtccttggcgggacagtccttccctgctggcagtctcttctcgttggctccctcgacctgctatctcctctgaaagcctggctgaccaggaatggggtctcccctcacattggggagcttgccctttacctccagggctgctgctgcctgggtatctgggaccccagatcaggctctggagacgctgctacctgaggggaaggcctgaggtccagatgggcctctcagctcccacaatctctggcctccaggatgagctatcccatcttcaggagttattacggaaatggacaccaagaatatctcctgaggatcactccaagaaaagagatccacataccattctcaatcccactgaaattgctggcattctcaaaggccaatcccatcccttctggataaccagatgttaaatcatgagatcagagatgctgttcatcagtcccaacaagatggcctagaaatcgcattctcacctcgccttgctgctgctttaattccaagttctatttcttcccttatagttttctatgggaatgaggcggatacaggaaacaccctatctcctctgtatttttgtagtggaatttctatttaaggggctcattaaagcatagtatttatacac

SEQ ID NO: 1625 - DNA, 1692 bp, Homo sapiens
gcggagtccggacgtcgggagcaggatggcggcggagcaggaccccgaggcgcgcgcggcggcgcggccgctgctcaccgacctctaccaggccaccatggcgttgggctattggcgcgcgggccgggcgcgggacgccgccgagttcgagctcttcttccgccgctgcccgttcggcggcgccttcgccttggccgccggcttgcgcgactgtgtgcgcttcctgcgcgccttccgcctgcgggacgccgacgtgcagttcctggcctcggtgctgcccccagacacggatcctgcgttcttcgagcaccttcgggccctcgactgctccgaggtgacggtgcgagccctgcccgagggctccctcgccttccccggagtgccgctcctgcaggtgtccgggccgctcctggtggtgcagctgctggagacaccgctgctctgcctggtcagctacgccagcctggtggccaccaacgcagcgcggcttcgcttgatcgcagggccagagaagcggctgctagagatgggcctgaggcgggctcagggccccgatgggggcctgacagcctccacctacagctacctgggcggcttcgacagcagcagcaacgtgctagcgggccagctgcgaggtgtgccggtggccgggaccctggcccactccttcgtcacttccttttcaggcagcgaggtgccccctgacccgatgttggcgccagcagctggtgagggccctggggtggacctggcggccaaagcccaggtgtggctggagcaggtgtgtgcccacctggggctgggggtgcaggagccgcatccaggcgagcgggcagcctttgtggcctatgccttggcttttccccgggccttccagggcctcctggacacctacagcgtgtggaggagtggtctccccaacttcctagcagtcgccttggccctgggagagctgggctaccgggcagtgggcgtgaggctggacagtggtgacctgctacagcaggctcaggagatccgcaaggtcttccgagctgctgcagcccagttccaggtgccctggctggagtcagtcctcatcgtagtcagcaacaacattgacgaggaggcgctggcccgactggtccaggagggcagtgaggtgaatgtcattggcattggcaccagtgtggtcacctgcccccaacagccttccctgggtggcgtctataagctggtggccgtggggggccagccacgaatgaagctgaccgaggaccccgagaagcagacgttgcctgggagcaaggctgctttccggctcctgggctctgacgggtctccactcatggacatgctgcagttagcagaagagccagtgccacaggctgggcaggagctgagggtgtggcctccaggggcccaggagccctgcaccgtgaggccagcccaggtggagccactactgcggctctgcctccagcagggacagctgtgtgagccgctcccatccctggcagagtctagagccttggcccagctgtccctgagccgactcagccctgagcacaggcggctgcggagccctgcacagtaccaggtggtgctgtccgagaggctgcaggccctggtgaacagtctgtgtgcggggcagtccccctgagactcggagcggggctgactggaaacaacacgaatcactcacttttcccc

SEQ ID NO: 1626 - DNA, 3019 bp, Homo sapiens
gcaaccagtactacccgagagccttgggcctcgggggagatgtcaggtgggtgcatggggcctgggtcccggtccctgctgtgctcctcactgtttgactgaccttgatgggatcctgaacgtctcagaggctgctcccctgtgacatggaccctggcgacctgtacaccagcgtcaccagggttgttctgcaggtcaaaagagacaatgtgggtgaagcagtcccctggcgtcaggtaccttttgtcggaactgctgggagctctatggcccaggcccaccccagcttacttgctgaccttggcctcgcctttcctgactttcagtctccctataaaattggagatcccacagagatctcagacccccctgcagcccctggtcagcccaggggaacagaccccatgtttctttccagcaacactgcccactcagcgaggaagcagccgcgacgcccacacttcctgttggagcctgcgcagagccagaggtccctggggtgcagcaccgtgggcaggcagggggagatggtcaggggtccccagaggcagcgggcacctccatgtggggcctgtgttttggcagccctggggtgggtggccccctttccttcttgttctttggtcccagaggagggtcctgtggcctgaccaggctcttgccttccctgtgctcaggcctcagaagccacaggaacatggcctaggcatggctcagccagcagccccctccctgacgcggcccttcctggcagaggccccgacagcactggtcccacacagccccctgcctggggccctgtcaagcgcccctggcccgaagcagcccccgacggcaagcacaggcccggagctgctgctgctgcctctttcctccttcatgccctgcggggcggctgcaccagccagggtacgtcctccaccaccaggcctgggcactggggctctcactctggtctgacttctggtgctttctcatgccacagctgtactagtttctggaaaaccttggcacagggaggccactcatccatttgacaagcataggtagccactgcacaccaggtccaagggccacagcagtgaacagccagccaagggccctgccatcctgaagcttatattctagtcagagacaagcaaagaaaaacccctgcctgcaggccagtaaagtggctgcagatcacgtagggtcctgcaggccacagtgagaagtagcctgggatttgagaagagtaggaagtcggggaagggttttggcagggagcaccatgtcaggtttctgtgcaggctgtggtcaccatgaccacgtggtccaggcaagtagtactggtggcctgggctcagcggttgccacagaggggacaggtactctcttggaggcagatgaggcaggatatgctgctctgagggagttgctgaatgaggggaaagaaggaatccaggctgatgtgggctgctggcttgaataacttgggaaacagagttctttgactggaagaaggaactgggggtggggactggtttggggtgaagtgtcaagagtgttttgaaccaggctcttgatgtcaaacttgagagaaagcaaacgttgagtctgaccttcaaggaagaggtcagggccagagattgagaagaatcttcagcacaggccgaaggtaaccccagagccactgcggcctctaggaggagagtacaggggaaggagagaggggaggaggctccaagcagggagcctgggtggggatggccagggggtgtgagagctcagtaatggaagtgacagctgctctaaggccaccaaagcagctggttcctgaaaggggatgaggggacaggaaggaaccagttcctgtggtgagttaggccatgtggggccacttaccctggctggaatggtttgaatgtgggtttgaaagggttttgacccctgtccggtgatggaaggggcaagtccactctcaccaggagaggagggcatggaaaaggctgtagagcagtggcctctcactgaccacttctcactgatgtcaaagctcagcaaggtcatgagcttagagcaggtgggggtggagggttgggtaaggcaaggctaggaacagctgctcaggcagtggaggcgtgaggcggactgtggtgacacggggtgctccctggttgcttgcgggactttcccctacagtaccaggccctgtgtgcaggggcaggctagacactgagctggcacggccagtgcctgggaagcccagctcctgcagctgggagcctggtcttcccccacccctacagggcaggcagtgacaaggacttggtgtccccctccctggcttcctcctagcttccttgctcagcatctacccttctttcctttgcaggtgtcagcacagcgggctactcctagggataagcccccggtcccctcatccctggccagtgtccctgacccccatctactccttcctggggacttctcagccaccagggctgggcctggactttcaactgcaggcagcctggaccttgaggctgaacttgagaagatccagcagcaactactgcactaccagaccaccaagcagaacctctggtcctgtcggcggcaagcgagcagcctgcgcaggtggctggagctgaacagagaggagccggggcctgaggaccaggaagtagagcagcaggtgcagaaagagctggaacaggtgaggccccaggccatccccaggtgtccctggggacgccccgggctgtgctccctctcagccctgcctgtccctccatggccccaggtggaaatgcagatccagctgctggcagaggagctccaggctcagcgccagcccattggcgcctgcgttgcccgcatccaggccctgcggcaggccctgtgctagcgtgttcgcaccaggaacgcaggtgctgggctgtcggggaggcctcaggccacctccaggaacagaacacagttttaagtttgattttttttatttcaaaatgctttgcaattaaatgaattactgttc

SEQ ID NO: 1627 - DNA, 2270 bp, Homo sapiens
atagatgccagcaaggctgtggagaagtaggaacgcttttacactgttggtgggaatgtaaattagtttggccattgtggaagacagtatggcaattcctcaaagacctagaaccagaaatatcatttgacccagcaatcccattactgggcatatacccaaaggaatataaatcattctgttataaagatacatgcacgcatatgttcactgcagcactattcaccatagcaaagacatggaatcaacccagtccatcagtgatagactggataaagaaaatgtggtgcatatacaccatggaatactatgcagccataaaaagcaaggagatcatgtcttttgcagggacatggatggagctataagccattatcctcagcaaactaacaccggaacagaaaaccaaacacatgttgtctcttataagtgggagctgaacaatgagaacacatggacacagggaggggaacatcacacactggggcctgttgatcggggggcatcaggataaatagctaatgcctgcagggcttaatacgtaggcgctgggttgagaggtgcagcaaaccaccatggcacacttttattatgtagtaaacctaacgtcctgcacgtggatcccggaactttttttaaaaaagagaaaaaagaggtgctagtgtctgaatttaatagatgaagaatcaggacacaaaagggttaagtggcttgctcaagatcacatggatgatatctcagaccataactgggtggtcataagatcattaagtagaaatcatcctgttacaggtgaggaaatggagtcccagttctggatgacacaatgagccagggcccgggctagagctgtgagtcctgtgcctcctagtgcagtgctctttccacttcccccactgcctccccttgacgatgcatgttgtcctggacagaaggagagctgtttgaggaccaggccaaccaacaccctgctcttggcagccggagccatgtgattcctaaatacccttctaggaagagctgcagcatcatccctggtcaagccctgaccaaaactgcacaccacacacaaggagtacacctggtaggtttgggggcagaagacacgcaagggctggaggtgcctctggctacagaatttgtcctttgatgccacaaggatgccatgagcagctctagactggattgcaaaagacacacagtgtcccatgactttggctgagtatccaagcctgagattggccatctctgcctgcgattgccagctcagtgtgatcagtgagaagggagggcctgatccaaggagcctcgggaaaggctgaactgaggacaaggaccctagacctctcacaggtttcccgcttcggcacacacgcgttcttctggctgtttccacagactcagagcctcttccccttggccccagcgggtacccatgataatagttgacatctattgatcatctcttatgccaggtaccatgccaagcgcttacccagaccatctcattcactcctcacaagaaccctttaaggtaggcagttactcccgccttttagatgaagaaactaacgctgcagtcacttgccctcatgatcaacgagtaaggagtgtggccaggcctcgagcccagtccgcctggctccagagcctgccccgcacaggctaccctcaccttctacagcccaccggccttaggaccctcagttatggcaccctgctttgtaggtgagggagctgaaacccagaagagatttaccctgggcccaaggcccacaaaagtagaccccctgactcctgattcagttccctccaccatgccatgcctgtgagctgaagcctgggccagccctgcttctgctctgaattcatgggaaacctacccagtccttacgttttcttctcctaactgagactcctgggttggaccgagttgtaattttatgaaaccctgagcagagagactgagatcagtgaagagggactgaacctcattttgccctcaggcatattgagccctaatgccatctaaaaatagattcccttacagtgtgcattcagtgaggagcttgacactcagggccctctcctgtgggccccacttggccagttaatggggaggtgagaagacttcactatcccctagaacacgcttacacttttaaagcttactacatactttgtctctgggtcaaaggttttttcaaagatgacagatacctcttgccattagcaatctgtactctgggcagctctccattttctctgat

SEQ ID NO: 1628 - DNA, 2331 bp, Homo sapiens
atgtaaggagtgctaccgcttacaggccacacactgttccttcatcatcattgtccccaatgactggtatgaaaaattgagttgagacctgcccaaggtcagacagctagtaagtggcaggacacagatacgaactcaggtaggaaattcagaaggatctaaagtaaaggggacacttggaggctgaaaaatacccaaacgtaagaagactgaggagccctggggtgagcagcagagttgtgttgcagaacgtgatgaggattagggctcagcaggtgtcagccatggctgggcctcctccaggctgtctcctaggatatctgggccattgtaggtcacagtttctttcctgcctccctcccttcttccattcctctttcctcttccttctccctttatgttttcctttcttctcccagattttctctttcttttgcgtgtatgtgatctccccatcttcactttctttctttgtaatagaatggtccatctattcagccagctgttgatcctagcctttgagctttgagcaaatcttttttttttttttttgagacggagtcttgctctgtcactgcgcaaggctagagtgcagtggcgcaatctcagctcactgcaacctctgcctccctgggttcaagtgattctcttgcctcagcctcctgagtaactgggattacaggcatgtgccaccacacctggctaatttttgtatttttagtagagacggggtttcaccatgttggccaggctggtctcgaactcctgacctcaggtgatctgcctgccttggcctcccaaagttctgggattataggcatgagccactgcactcagcccctttgagcaaattttagcacatacagagaggctgtgtagacagacctaaacatggtccctgttttttaggagtttatcctccactttcagttttgttatgggaagcagcttcccctactcacagaaattgtttatgcaacctatagcatcacctctgctcctgaaccaaacatggagtccacaccctaactctgagggtgcctgtaagagtccttagaacatagcagtaatatagacacccaactggataagcctcttcctctccctcaccccaaacccccctatccctcttgaggggttgttttggggaccactcctggtacctgtctgacctcaggatgcaggccctggagtcctctgttccctgtgttcaccaggtgtacagcagatagtgaggtcaagacctgcctctgggaaaggagaacaaagaaggaaaagatctatttaaggaagcagttcagcagttgtcttctgtgtacagaaaagtcagggagaggctggtctgtgggtacaggcagcacctgggaaccaggatgaaattcagaaatttccacactgttctctggtaccaacatctgtggccactgaagcccgtcagagggaccaaacctgtattttcctgaagcaggagtgggtctttggggcaagtttttgttgccccaaagaaggtggatgggggcatccaccttcttcccaccttggccagttatcccagcaagaagctaaaaccaaggctggcatgggcctggctgtcagcctcgcctttctgggggcatttctttcctccattgctgctggcctgccctgcatcagggcccccaccttcctcagggctttcggtgcatctggggttgatggttctctgtctctctctctccagggccaggtctggattaatggctttaaccttggccgctattggccagcccggggccctcagttgaccttgtttgtgccccagcacatcctgatgacctcggccccaaacaccatcaccgtgctggaactggagtgggcaccctgcagcagtgatgatccagaactatgtgctgtgacgttcgtggacaggccagttattggctcatctgtgacctacgatcatccctccaaacctgttgaaaaaagactcatgcccccacccccgcaaaaaaacaaagattcatggctggaccatgtatgatgatgaaagcctgtgtctttgagggattctaccctgaacatacctcacagatcctccctgtcatgccacatttcactgattggaatgtggaaatggaaaaggaatttaggatgtgcattttcacctgaggtttccctgcatccctgcagtgccaaagccccaccttcagggaccacctggaatgtgtgaggggctgacagcacagtaacgtgcatacatatctgcagggctggaatggaagctttaaaggtggtagtgatttttattttggaagaatcatgttacctttttgttaaataaaatttgtactc

SEQ ID NO: 1629 - DNA, 2019 bp, Homo sapiens
cctttagtggctgcagtggcgacgagcggaacggagtgcgggttcccggggagggggcgtgcaggatcgggttgtggggggtgcgctgtagggctaaggagaagatgagctttggggggccctgaggaggaggggagtcaggattaaccgaggacagggtcgcagcgggggcatggggaggacgggcccgagagcgccgctcctccccaaaactaggatttggagcctcacgttctcccgcaaaacgagccctgtgggtgccaggccaggggcggctcccaggtgtggagggggcaaggtacgggcgtctgccgtcgctaagtgcccccttccacttaaggcacaccttcgcctccgattccgaaccgcccggggacagagatggtgggagagcctggagaaagagacagcgtgtgcggagggggtgctccctcagatggggggtcaggaagtctccctcaagtgtctgggacagagggacagcaggggccaaggcggagatgagatccgtgagtgaggggagccgggaagaagtaaggctgcagccgcggccccgcaaggattgggactttcgtctaaacgcggtggaagcccatggaaggaagcggactctgccaccctccctcaggatgcctgagggccccgagctgcacctggccagccagtttgtgaatgaggcctgcagggcgctggtgttcggcggctgcgtggagaagtcctctgtcagccgcaaccctgaggtgccctttgagagcagtgcctaccgcatctcagcttcagcccgcggcaaggagctgcgcctgatactgagccctctgcctggggcccagccccaacaggagccactggccctggtcttccgcttcggcatgtccggctcttttcagctggtgccccgcgaggagctgccacgccatgcccacctgcgcttttacacggccccgcctggcccccggctcgccctatgtttcgtggacatccgccggttcggccgctgggaccttgggggaaagtggcagccgggccgcgggccctgtgtcttgcaggagtaccagcagttcagggagaatgtgctacgaaacctagcggataaggcctttgaccggcccatctgcgaggccctcctggaccagaggttcttcaatggcattggcaactatctgcgggcagagatcctgtaccggctgaagatccccccctttgagaaggcccgctcggtcctggaggccctgcagcagcacaggccgagcccggagctgaccctgagccagaagataaggaccaagctgcagaatccagacctgctggagctatgtcactcagtgcccaaggaagtggtccagttggggggcaggggctacgggtcagagagcggggaggaggactttgctgcctttcgagcctggctgcgctgctatggcatgccaggcatgagctccctgcaggaccggcatggccgtaccatctggttccagggggatcctggaccgttggcacccaaagggcgcaagtcccgcaaaaagaaatccaaggccacacagctgagtcctgaggacagagtggaggacgctttgcctccaagcaaggccccttccaggacacgaagggcaaagagagaccttcctaagaggactgcaacccagcggcctgaggggaccagcctccagcaggacccagaagctcccacagtgcccaagaaggggaggaggaaggggcgacaggcagcctctggccactgcagaccccggaaggtcaaggctgacatcccatccttggaaccagaggggacctcagcctcttagcaggaggctctccttgcttgcactcaccctttcttattgtcttgccctgcatctgggggtctgaatttttgggagcaggcaatatctgaaggtgcaaacaggccctacggctgttccctgcacaactctcatggttttaattgtaccccatcttccacatctttaaagctcatgtgaaaaatgctgcatttttaataaactgatacatttgaacttc

SEQ ID NO: 1630 - DNA, 1631 bp, Homo sapiens
agctctgagagaggagcccagccctgggattttcaggtgttttcatttggtgatcaggactgaacagagagaactcaccatggagtttgggctgagctggctttttcttgtggcgattctaaaaggtgtccagtgtgaggtggaattggtggagtctgggggaggcttggcacagccgggggggtccctgagactctcctgtgaagcctctggattcagattgatcaactatgccgttaactgggtccgccaggctccagggaaggggctggagtggatttcagctataagcgggagtggtggcaacacacactacgcagactccgttaggggccgattcaccatctccagagacctttccaagaacatggtgtttgtgcagatgggcagcctgcgagccgaggacacggccgtctatttttgtgctaagggaaatcagccaagggtggatatcgtggcttctattgagaactggggccagggaaccctggtcacagtctcctcagcctccaccaagggcccatcggtcttccccctggcaccctcctccaagagcacctctgggggcacagcggccctgggctgcctggtcaaggactacttccccgaaccggtgacggtgtcgtggaactcaggcgccctgaccagcggcgtgcacaccttcccggctgtcctacagtcctcaggactctactccctcagcagcgtggtgaccgtgccctccagcagcttgggcacccagacctacatctgcaacgtgaatcacaagcccagcaacaccaaggtggacaagaaagttgagcccaaatcttgtgacaaaactcacacatgcccaccgtgcccagcacctgaactcctggggggaccgtcagtcttcctcttccccccaaaacccaaggacaccctcatgatctcccggacccctgaggtcacatgcgtggtggtggacgtgagccacgaagaccctgaggtcaagttcaactggtacgtggacggcgtggaggtgcataatgccaagacaaagccgcgggaggagcagtacaacagcacgtaccgtgtggtcagcgtcctcaccgtcctgcaccaggactggctgaatggcaaggagtacaagtgcaaggtctccaacaaagccctcccagcccccatcgagaaaaccatctccaaagccaaagggcagccccgagaaccacaggtgtacaccctgcccccatcccgggatgagctgaccaagaaccaggtcagcctgacctgcctggtcaaaggcttctatcccagcgacatcgccgtggagtgggagagcaatgggcagccggagaacaactacaagaccacgcctcccgtgctggactccgacggctccttcttcctctacagcaagctcaccgtggacaagagcaggtggcagcaggggaacgtcttctcatgctccgtgatgcatgaggctctgcacaaccactacacgcagaagagcctctccctgtctccgggtaaatgagtgcgacggccggcaagcccccgctccccgggctctcgcggtcgcacgaggatgcttggcacgtaccccgtgtacatacttcccgggcgcccagcatggaaataaagcacccagcgctgccctgggcccctgc

SEQ ID NO: 1631 - DNA, 2444 bp, Homo sapiens
agcgcccggctggaggcgcggcggcagggctgggcggcggcggcggcggcggtcatggaacgccaagaggagtctctgtccgcgcggccggccctggagaccgaggggctgcgcttcctgcacaccacgggtgagtcgttgcggggcagccgggcgcgcgccgccacttttgcgacgcgcagccatgatgggtgggtcgtccgccgctgcaccgggcgccggagcctgggaggcctgggaacggtcgggcgttggcgcttacgcggaccttgggcagcaggcccggaccttgcgcggaggcttctcgggagccgcacttccctgggcggctcggctgtcccttgtttgcgcaagtcttttttgcgaaccaagcccttcctgtggtagttactggggtcactcggccgttggcgtttgcctctgggacccgtcccacacagccccatacacactcctgactccccgcgctgtcacccctttctatgtggctctgaaaggcctttgccttcctgattcagattagttgctcttcattcttcaaaacccagttgctgtgccctccacactctaactgcccccgactccccagatggttgggaagtctcacttctcagtgatccctgaattgtcgcacttcttgagttcgtgttttaacgatctacttaggaggctttttcctcagcctagaccatgaaggctttgagggcaggagttacactttgtgtttgttgagtcttatggaaaggtcaactagtagtgtcatttttagttttttgaaaactgtttttcttttcagtgggctccctgctggccacctatggctggtacatcgtcttcagctgcatccttctctacgtggtctttcagaagctttccgcctggctaagagccttgaggcagaggcagctggaccgagctgcggctgctgtggaacctgatgttgttgttaaacgacaagaagctttagcagctgctcgactgaaaatgcaagaagaactaaatgcgcaagttgaaaagcataaggaaaaactgaaacaagtatgaactggtttcagtttgaatgtgtgcatagaaattgtctgaggtttagtggctaacgatgcctgtgtctgtgttgtctataagcttctaggaccaggtcctatcccattagattcaataagcatttcagttcctaccatgtaagtattggtgatatcaagaagaatacacgattgttagggaacactagatgtgtgaatatattaccatgaaaggtccagagcacaaaaggagggacaggctggagcagggagcatgtgagtgtgtgtgtgcatgtgcctgtgtcttccccattaccaaaaatgtcctgacaggagtgagtttcagaagaatggagtcagtaatctttttcatgaaacattttgctttctttaatagtgtacaaaaaccaaagctgctctatgtgagttaaactcacactaccagatcacaacagttttattaactaaagaaaacgagggtgaagtttgttctgaaagacatttaaattaagaattatcagagttagctttgtctttgagagaaatggcagcttctgaattctttctgtaaaatgtgattgtttctcagcttgaagaagaaaaaaggagacagaagattgaaatgtgggacagcatgcaagaaggaaaaagttacaaaggaaatgcaaagaagccccaggaggaagacagtcctgggccttccacttcatctgtcctgaaacggaaatcggacagaaagcctttgcggggaggaggttataacccgttgtctggtgaaggaggcggagcttgctcctggagacctggacgcagaggcccgtcatctggcggatgaggctaagaatcttgttagtgtcacttttgacattagcaagatgaacccttaaccctcgattcaattgccttacgcacgcttttcacagtgactagccaaggggaggtggggttgatttctgttcctaactacacctgcatatgtcagggctccagtcagcaaaaggtatagatgttgcctctaggcatgaggtcattggtcacattctacttggagacagtgattgcattcattgatttcatggttaattgctagttggtaggtaaaggcctctagatgattagcaatcttgataaaagaggcctagtaatgttcttttgaggttagaaatccttgctgctaggacagtctctgtgacaggttgcgttgaatgatgtcttccttatcaatggtgagcccaccagtgaggattactgatgtggacagttgatggggtttgtttctgtatatttatttttatgtacagaactttgtaaaaacgaaactatttaaaaaacaagaataacatttttagcatctttattcaaggagatttatggacttcaatttgtctatcaaacattaaatagctttttattacaacctct

SEQ ID NO: 1632 - DNA, 1974 bp, Homo sapiens
tatgcccggacagggccacaagagggctccttggtctagcggtgacgccagcgtctgggaagacgcccgttacccggcggatcgtggcccagtggtagcaaaaggtgtcaaggaacaacactcactacttagcagaccgggaagggggcggggggggggtctccctttccccgggggagtttagaaaagactctgctcctccacctcttgtggagggcctgacatcagtcaggcttgcccgtagttatccggaggcctaactgtctccctgtgatgctgtgcttcagtggtcacactccttgtctgccttcatgttccatcctgtacacctggctctgccttctagatagcagtagtaaattagtgaaaatactaatagtccctgatatgcagaaataatggtataagctgtctttctctctgtctcctctccctctctgcctcggctgccaggcagggaagggccccctgtccagtggacacgtgacccacgtgaccttacctatcattggaggtgactcacattctttaccctgccccttctgtcttgtatccgataaataacagcgcagtcagacattcggggccactaccggtctccgcgcattggtggtagtggtcccccgggcccagctgccttttctcttatctctctgtcttgtgtctttatttctacactctctcatcgccacacacagggagagacccaccgaccctgtggggctggtccctacatctggcgctctgacgtggggctctccctcgctgtgtgaagttgcaccctgagtgcgggatcagcggaggagttcaacgagagattcctgaggattgcagtctataaacttggtggaaaagaactacagcctgtgtgggtcccctcccgacaattaaaattgcaccataactccaaagatgaaacgctcccagaaagaaaaggcaaagacccatcggaaacaaaagagcaactttcaccgcctgatacatacacttcatgacatccacattgagacaaaatctcgccgtgtgacctacaacacctctcgttcaaccccacctacttggggtcgaatacagattttatctcatcaaacagaaaaattcttaacagaaaaaggaatcccaaaaatgactggtaatataattctggctgcctttatggtagtcagtgcagcggtaagtataccaccggtcggggcaactcaaaattatacttattgggcatatgttccttttccccttctaattcggtctgtctcctggagggactctccagtagaagtttacactaataatagtgcattcatgccgatccctaatgatgatcggtttccagctcaaccggaagaagaaggtatgcactttaatctgtcaattggctataaatatccaccattatgtattgggaagtcgcctggttgtttagcttattcttaacagaattggatgtggactgtaccgtcctttacaaatgattcttatcaagtatataatgtgttcagtactaactcttttcaacttctcactgtcaaacgtaccccacatgaggcatggagagttcctctcactaccaaaactaataaaacaaaaggactgccggactgtccaaagaaacctacaaatgggccttttatagtgacttcaattttatgggataattgtaatgctcccaaggctgttgtactccaaactctagccatgggtattgttattgattgggctccaaaaggacattattggcaagattgctccagcaaaaataccttatgctcggagtttatttattccttagattatatagagcatgggtggcagtcttacacgatgagacaacgggtgtctccttacccatttaaatggatggacacaggtattgctcctcctagaccaaaaattattcatcccttttttaccccagaacatcctgaactatggaaattagctgcagctttgtcgggaataaagatatggaacact

SEQ ID NO: 1633 - DNA, 2368 bp, Homo sapiens
ttcatttccttttctccaaattttcttgtctggaagggagcagccctgagacacctttctgctttgaaaccgtcctcggatgccctctggtggggccgtggaggggaaacctgggccacatgctgctctctccagcctgccgtcctccagcaggtctccaggtgcctgtgtgcacccacagtggtcgggctcccgggagcttagccacccttctccccagtgtcatgcttcatttctttctaagcctttttaaagagcagatttttaggagagtagaaataccttattttttcacaaggaatagcagagatgaaagacaccaaagtgtagactcggccctcgggtgggtgcaggtagaggggaggaggaaaggggagggcagacaccttgtcgccggcagccctgaagctgagctcctagaggaacggaccagatcatactcagtggtatccttggggcccatgtcaggccttctaaggaatgaagaaatgatttaggaagctctacacctcccgtaggaatttgggaaagtgcctgaatcccaggtggccctaagtgtagagatggtggctgtgcaggctgcccctcctgtaccatctccccagtgcctggcatggtgccctgtgggtgctgaggtgggtgcctctcaccatgaaggcgggatggagtgttctgggcctgctggtgacccacttaccccatggcctggagttcaattgcaagcctgagggctagagagggcccagcatgggacaccccctggggagtgtggggtgacgtggcttccttgtgagagttaaatcactgtcctaccacttctcaaagccaccaaacatcattcactgttcagaaaacatttctctgagatagaaatctaagatgagctgtcctggcagcaggaaagagagcgtcaggctgggaagcaggtgccacctgcttggaccccagaattcacccggctcaggcctctgctgcaggaaggatccctcgcctcccacataactctcgtctctgccaccttctctctgggccggtgcaagtcgctgggttgccaggcctggcttcagacagggtcgggtggaccaggtggggtttgcgccatcagatcatcttaggtgtcttacccattacaaagaagtgggaaagagatagcacctgtcgatgatagagctgcctgcagccctcagaccagccctgtccctcacctggggtgcagtcctgctacttagagcagtactgcctttgattccgttcacagctttccccctttcttcctttgtccttcttccctctggttttctcttccccttcttctcttcttccccttctccctctctctcatcattaaaaaaaattagatatttagttcattgtttcatgatgcttcattccaaaaaatgatttgcaacaagttcctaagtatgtgtggtccggaaagatgtctgatctccatgttgcagtttcccatatggaagaccagccacactgtcaagtgggaaggcgtatggcgagaactgggctgcctctcaaggacggcgtcatttgctgttcgaaaagaaagcggacattcactgaaatcatctctttcgcacgccatggtcatcgattctcggaattcttccatcttaccaaggagaggtgctttgctgaaagttaaccaggaactggcaggctacactggcggggatgtgagcttcatcaaagaagattttgaacttcagttgaacaagcaactcatatttgattcagttttttcagcgtctttctggggcggaatgttggtacccattggtgataagccgtcaagcattgctgataggttttacctcgggggacccacaagcgtccgcggattcagcatgcacagcatcgggccacagagcgaaggagactacctaggtggagaagcgtactgggccggcggcctgcacctctacaccccattacctttccggccaggccagggtggctttggagaacttttccgaacacacttctttctcaacgcaggaaacctctgcaacctcaactatggggagggccccaaagctcatattcgtaagctggctgagtgcatccgctggtcgtacggggccgggattgtcctcaggcttggcaacatcgctcggttggaacttaattactgcgtccccatgggagtacagacaggtgacaggatatgtgatggcgtccagtttggagctgggataaggttcctgtagccgacacccctacaggagaagctctgggactggggcagcagcaaggcgcccatgccacacaccgtctctcgaggaaacgcggttcagcgattctttgactgcggaccctgtgggaaaccccgtcaataaatgttaaagacacactc

SEQ ID NO: 1634 - DNA, 2175 bp, Homo sapiens
agataagcaaaccagcactttagagtataacatccagtgatggtcaaactgttcactttcattctgaaactgctggcgtgggcacgagtggacagctgcagtacacactcccatgtctgctgtgagctgagtcttggcctgtggccagctgtgtacgaagatggcaggcttatgggaggatgtccactcccactgaccctggcattgcctgagtcccttgcctacctgggctgggccaagacccaactgcaatcaattgtctggggtccactcgctgctgtggtctctgcctttgtgctcacctcaagactcttgccccctccacctttggaggtcctctttggggatcagaggcccatctctgccaggggcctgaagacctacatcctggagggtacctcccttgggagatcaatcccctgtcctcctgctctttgctccatgagaaggatccacctacgacctccagtcctcaaaccaaccagcccaaggaacatctcaccgattttaaatcgggctgatgtgtgcagaacagactgaaggcatcaggggcagcaagaggagaccaggaggcagctgtgacattgcactcaagagaaatggtggcagtttggactcagtgaaagctatgctgacattcactcaggtatcctgctgtccatcggcccgcagctagtctatccacccaaacgcccgtcagacctccggcccaccctcccagacggaggacgatgctccgccctctctggccccgcccccagtcaccgccttttccggaagctgctgcagcgaatcctggcaccctagcaacagcgcctttcaggctgtccagtccgcgtgcgcagctcctaggacgagccaatagtgaggggcaccgggagcgaggtgcagggggcggggctcggcctggccgcagccattttggtgcgagagaaacaataggacggaaacgccgaggaacccggctgaggcggcagcagagcatcctggccagaacaagccaaggagccaagacgagagggacacacggacaaacaacagacagaagacgtactggccgctggactccgctgcctcccccatctccccgccatctgcgcccggaggatgagcccagccttcagggccatggatgtggagccccgcgccaaaggcgtccttctggagccctttgtccaccaggtcggggggcactcatgcgtgctccgcttcaatgagacaaccctgtgcaagcccctggtcccaagggaacatcagttctacgagaccctccctgctgagatgcgcaaattcactccccagtacaaaggtaagtcccagctgctggaggggttgccacactggcgaggaggtgtgagagatcgtggccatggaaggccctggcagccatccctggagccctcactccctcccactctgtgctttccctccctctcctccttctcctcctcctggccctcagcccagcatctcacaccctcagttttcaatccctggtaagattgctcaattctgttttgttgtgtggatttgagtttgattttggtagaagtgtagttgtgttttatgttcaggtgtctcttgatcacagtaacccatagtcccccattggggggacggtgggggaagactttgggaggattttacccagaatacttgccgcctgctttttgtcctccaggaaaccagaagcccgggtaattaggacaaagccaaaggccccttgttagctggccatccctgccccattttttcccctggtcctttcccctgtggccacagggaagtgtggcctgaataccccaccccggctcctctgcacccagagctgggggccacctcagaagtgtcatctctctctgagcacgcattcccctgcagcagtcgaggactgagcagattgagtgatgctggggcagagaggcctgggaggaaaggtgttcagccagtcgtttgtaaggcgctcgtcggcacctgctgaaacgcccccacctgacagccccatcctcaaagactgtcttaattactcatggcaggttctagagacttaaggggaaaagctgctttcaaggccaccacatgtctgtgctccccaaccagctctatctgccttgtgttcattttgttattttgtgacgtgagactgcaaagaccaataaaaacatattttataag

SEQ ID NO: 1635 - DNA, 1612 bp, Homo sapiens
agctctgggagaggagcccagcactgggattccgaggtgtttccattcagtgatctgcactgaacacagaggactcgccatggaatttgggctgagctgggtattccttgttgctattttaaaaggtgtgcagtgtgaggtggacctggtgcagtttgggggaggcgtggtccagccgggggggtccctgaaactctcctgtgcagcctctggaatcaccgtcagtagcgtctacatgagttgggtccgccaggctccagggaaggggctggagtgggtctcggtcatttatgccaatggtgacacatactacgcagcctccgtgaagggcagattcaccatctccagagacaattcggagaatgcgctgtatcttcaaatgaacagcctgagagtcgaagacgcggctgtgtattactgtgtgaggaattattatgatagtagtggtttttccacagccattgactactggggccagggatccctggtcatcgtcacctcagcatccccgaccagccccaaggtcttcccgctgagcctctgcagcacccagccagatgggaacgtggtcatcgcctgcctggtccagggcttcttcccccaggagccactcagtgtgacctggagcgaaagcggacagggcgtgaccgccagaaacttcccacccagccaggatgcctccggggacctgtacaccacgagcagccagctgaccctgccggccacacagtgcctagccggcaagtccgtgacatgccacgtgaagcactacacgaatcccagccaggatgtgactgtgccctgcccagttccctcaactccacctaccccatctccctcaactccacctaccccatctccctcatgctgccacccccgactgtcactgcaccgaccggccctcgaggacctgctcttaggttcagaagcgaacctcacgtgcacactgaccggcctgagagatgcctcaggtgtcaccttcacctggacgccctcaagtgggaagagcgctgttcaaggaccacctgaccgtgacctctgtggctgctacagcgtgtccagtgtcctgccgggctgtgccgagccatggaaccatgggaagaccttcacttgcactgctgcctaccccgagtccaagaccccgctaaccgccaccctctcaaaatccggaaacacattccggcccgaggtccacctgctgccgccgccgtcggaggagctggccctgaacgagctggtgacgctgacgtgcctggcacgtggcttcagccccaaggatgtgctggttcgctggctgcaggggtcacaggagctgccccgcgagaagtacctgacttgggcatcccggcaggagcccagccagggcaccaccaccttcgctgtgaccagcatactgcgcgtggcagccgaggactggaagaagggggacaccttctcctgcatggtgggccacgaggccctgccgctggccttcacacagaagaccatcgaccgcttggcgggtaaacccacccatgtcaatgtgtctgttgtcatggcggaggtggacggcacctgctactgagccgcccgcctgtccccacccctgaataaactccatgctcccccaagc

SEQ ID NO: 1636 - DNA, 1931 bp, Homo sapiens
agtagtcgctggcacaagctgcgcccggagacgtgggggcgttctcttgttttccgagtgcgcggactcatcgggtcacagtttatgcttttatgacgcgggaacacaacagatttgagaagcctcggattaaggaataatttatgaagctccgttgactaccgtggagagatcataatttggggttcaagattccagtctgtgtttttccagaggtgccctgaggagcagggaagcatggctattgtggatgtaaaagccatgttcaagatatgctgtctagatatgagaccaaggagttaactcttaagaatggcacttttgaaaaggaatcattaaaatggaaaataatagaaagtgtcagaagttcttgccttgaggaatcttttttgggaaatgattggaaatgcaaaggactctttgagagacaacaggaaactacagaggaatatttcaggcatgtaactgtgccatttgaaaaaatatccgaattcatccagcctacatattttcttctaaatcaaataattcatactggaaagaaactctatgaacaaaaaaaaaaatgagaaaatgttactcaacagggaagaattcatatcagtgacaagcttgacgaaatgtgtgggaacacctctgtattttgcacaaatcatatgaaacatcagacaaattttaatgcaaagaaatgcaatgtatttaaagaatgtggcagagactgcttgtaactttcaactaactcaatatcaaataagtcatgctaatcagaaaccctatgaatgtcagatatgtggaaagccctttagaaagcgtgcccaccttacccaacataatcgaattcacactggtgggaaaccatatgaatgcaaagaatgtgggaaagtgtttatctgttgttcaacattgattcaacataagagaactcacactagtgagaaaccctatgaatgtctggaatgtagaaagacgtttaggcggagtgcacatcttattcgacatcaaagaattcatactggtgagaaaccttataaatgtaagcaatgttggaaggcctttgcttctgtttctgatttaatagacatcggaaaattcacactgatgagagactttacgaatgtacagaatgtgggaaggcatttaacaatcgctcaactcttattcagcatcagagaattcacactggtgagaagtcctttgaatgtaaggaatgtggcaaagcattcaataattgctcaacacttactcaacaccagagaactcatactaatgagaaatcttatgaatgtcaggaatgtaaaaaggcttttaggcaaagtgcacatcttactcaacatcaaagaattcatactggtgagaaaccatatgagtgtaagtaatgtgggaaggctttcacttgtgtttctgattttaatagacatcagagaattcacactggtgaaaaaccctatgaatgtaaagaatgtggtagagcttttaacaattgttcagctcttattcaacaccagagaattcacactggtgagaaggcttatgaatataagcagtgtgggaaggtttttgtctcctgtccaacacttgttcaacatcagagaacacatactaatgaaaaaccttatgaatgtcagtaatgcaagaaggccttcaagcataatgcacatcttattcgacatcaaagaattcatactggtgagaaaccttataaatgtaagcaatgttggaaggcctttgcttctgtttctgatttaatagacatcagagaattcacaaaggagagaaaccctatcagtgtaaagaatgtgggaaggtttttaataattatccaactcttactcaacatcaaagaattcataccagtgtgaaaccctatgaatgtaaggaatgtgtaaagacctttacttggctttcaaacttgaataaacatcagacaattc

SEQ ID NO: 1637 - DNA, 1798 bp, Homo sapiens
ttccaatttctgctgatcgggatttcagggagaagaagctgctttccctcctctctaccctgtttcctgcatgacttcagctattggctggtcctgggaaagaaagtgggaaaagctttttcctctgtattcttttgggctggatagtttttgagaactcgaatctgtcttgggctgtgagacaagccactgggttcttcaaaggataaactacctacatagaggacatacctttggttaaaggagctgccgtcaggtgggaatgagatctcgaaaccaaggtggtgaaagtgcatctgatgggcatatctcctgtcccaagccctccatcatcggcaatgctggtgaaaaaagtctctcagaagatgcaaaaaagaagaagaaatcaaataggaaggaggatgatgtcatggcctcaggaactgtcaaacgacacctaaaaacatctggagaatgtgaacgaaaaactaagaaatccctggagttatccaaagaagacctcatccaactactcagtataatggaaggggagttgcaggccagagaagatgtgatccacatgctgaagacagagaaaaccaagcctgaggttctggaggctcattacgggtctgcggagccagagaaagtgctgcgggtcctgcaccgagatgccattcttgcccaggagaaatccataggagaagatgtctatgagaaaccgatttcagagctggacagacttgaggaaaaacagaaagaaacctaccggcgcatgctagagcagctgttgctggccgagaagtgtcataggcgcaccgtatacgagttagagaacgagaagcataaacacactgactacatgaacaagagcgacgacttcaccaacctgctggagcaggagcgggagaggttaaaaaagctccttgaacaagaaaaggcttatcaagcccgcaaagaaaaggaaaatgctaaacgactcaataaactaagagatgagcttgttaaactcaaatcctttgcactcatgctggtggatgaaagacaaatgcacattgaacaacttggcctgcaaagccagaaagtacaggatcttactcagaagctgagggaagaagaagagaagctcaaagccattacttccaaatccaaagaagacagacagaaattgctcaagttagaagtggactttgaacacaaggcttcgaggttttctcaagagcatgaagagatgaacgctaaactggctaatcaagagtctcacaataggcaacttagactcaagctggttggcttaacccaaagaatcgaggagctagaagagaccaacaaaaatctgcagaaggcagaggaagaacttcaagaattaagagataaaattgccaaaggagaatgtggaaactctagcctcatggcagaagtggaaaatcttcgaaagcgtgtgcttgaaatggaaggtaaagatgaggagatcactaaaactgaatcccagtgtagggaattgaggaagaagctgcaagaggaagaacaccatagtaaggagttcagacttgaagttgagaagctacagaagagaatgtctgaactagagaaattggaagaagcatttagcaagagtaaatctgagtgcacccagctacatttaaatctggagaaagaaaagaacttaaccaaagacctgctaaatgaattggaggtggtcaagagtcgagttaaagaattggaatgttctgaaagtagattggaaaaggctgaattaagcctaaaagatgatcttaccaagttgaagtcatttaccgtgatgctggttgatgaaagg

SEQ ID NO: 1638 - DNA, 1962 bp, Homo sapiens
tcgtgatgcatgtcatggccgcctccatggcccggggaggcgtgagtgccagggttctactgcaggctgccaggggcacctggtggaacagacctgggggcacttccgggtcgggggagggggtggcgctggggacaaccagaaagtttcaagcgacaggctcgcgcccggctggagaggaggacgcgggcggcccggagcggcccggggacgtggtgaacgtggtgttcgtagaccgctcaggccagcggatcccagtgagtggcagagtcggggacaatgttcttcacctggcccagcgccacggggtggacctggaaggggcctgtgaagcctccctggcctgctccacctgccatgtgtatgtgagtgaagaccacctggatctcctgcctcctcccgaggagaggagaactcgcggctgggctgccagattgtgctgacaccggagctggaaggagcggaattcaccctgcccaagatcaccaggaacttctacgtggatggccaggtccccaagccccactgacatgaacacctggaccattccacattgccatggccccagggcccagattgagggaatagccaggtgccagccctgcccagagtgcggacaggcccgggagagacgtggaagcccctgtgaaggacaacacccctgcttgggagagagtcccatgtccaggcccctgagaatcagggtttgagtaggagtggactcatattggagctgcaataaatcgataacacaggccccagcatgttgagtgtccttgggggacagatctggggtctacaggtggctcacacctgtaatcctagcactttgggaagccaagatgggaggatcacttgaggccaggagcttaagaccatcctgggcaacatggcgagacctcgtctctataaaaacagtaaaaattagcgtggagtggtggtaagtgcctgtagtcccagctactcgggagactgaggtgggaggatcacttgagcccaggggatttaggctgcagtggagcggtgatcaggccattccactccagcctgggtgacagagtgaggccctgtctcaaaaaaaaaaaaaaacaaaaacaaaaacaaaccacacctgcatctgctgtgctgggcccccggttctcttttccctctgggatctaagatgccgctggggatccaaggcagaggcctgggagcccccatttccgagggggagggctagcgtggaaggccccgccccggcagctgcggagggatttggtggggtccaggccgcccttgccacgcaggggtgcgcggatgacctgaaaaaagccagaaagaggaaaggtgccgccgaggctggtcgctctcagctggggctcatcgcatcctctaccaagagcgctcccaccacacaggtcccgcccctcccagcaaagcttctggcgccgccctgtctgaacctggagcggctgggaggatccccctcccaggagaagccgaggaccccaggatgctgcagaatcagtgagaggtccctctggcctgcatgccaggagtcggtcaccgccctgtgcttcctccaagagacagtggagaggctggggattccaaggacacacagaccaggatcagccaaaagggccgccgtctgcagcccccggggactccctcggccccaccccagagaaggccccggaaacagctgaacccctgccggggcaccgagagagtggaccctgggttcgagggggtgactctgaagtttcagataaagccggactccagcctgcagatcatccccacgtacagcctgccctgcagtagccgttctcaggaatcccctgcagatgctgttgggggccctgcagcccacccaggaggcaccgaggcccactcagcaggcagcgaggccctggagccccggcgctgtgcttcctgtcggacccagaggaccccgctctggtgaggccctgtctc

SEQ ID NO: 1639 - DNA, 1833 bp, Homo sapiens
gggctcgggtgcgggcgcggctggggctgcggcttcaggtaaattgccagcttgcggggacacggatgggggacccctgggtgggtggattcggggacgcaccgggacccggcgctgcgctgcgtttccagccccactgagggctctgcccgctgcgacggggcgggcgtcgtgtcctctggccgggacccctcccacattggaagtcccaggtgggtagcgagcagagtggggggctctggaggcgtgggcttgcccccctctcgcccttcgggagctcactgcggggctcgttcgctccctaatgccacaaccggccctgggaccctttcccgggacggcctggggaccccagccagcccctcgcgctgggctgggtgtgggagcgtgtcacggaaatggtgttttggggagggacgcacggcccccggacccgcagacaatgggtagcggatggaaccgcccggcggcgcttcctgtaggaaactgctctgtctctgtgcggctaggacgacctgggggtggacgggtgatgatgactttaacacccaccttcctgccgccaccggtcccccacccacccacctcaagagtctgagagtcccagcagacatcaggggctgccagtactcagggcctcctggaaggcgccctctccccaggactgggatcctcactggcctgccgtggcccccaccactccggtttggtgatcacagctctgcgtcccaaaatagtccctggggcgggagagggggcgtgtggcgtcggctctgacggcctaatgagggggtctcaggcacagaatccggatctagctgtgacagtcagggcagggagcggaggagagggaaggcagctaaacgccccacttagtgaggccccagcccctgaagccgcagaggtggtgggcacctccgcccccaatcagagtctggcacaggtgtaggctgggagggacaagccccctgaggctccttggtggttcatgcctgttatcccagcactttgggaggtcaagtagggctgatctcttgaggtcaggagtttgagaccagactgaccaacatgatgaaacccgtctctactaaaaattcataaattagccagctgtggtggcaagtgcctgtagtcccagctactcaggatgctgagacaggagagtcgcttgaaccctgggctcagaggttgcagtgagccgagatcctgccactgcactccagcctggatgacagagactccgtctcaaaaataaaaataaaagaaagcattcaagtgtagtggccaaagcaaggactctggaagacctgcctgggtttaaaacctgcctctgcctgtttatgacaggacccaggcaggacactaaactgttctgtgtctcagtttctccatctgtacaataggggaagggacaatgatcataggaaatccaacctcagtggatttagctaggattttaaaaaataagtcaaggtcaggtgcagtagctcatgcttgtaatcccagcactctgggaggctgaactgggaagattgcttgagcccaggagttggaggccagcctgggcaatatagcaagacacctgtatctacaaaaaataaaattaggccgggcacggctcacgcctggtttgagaccagcctggccaacatggtgaaactccgtctctactaaaaatacaaaaattagccaggcatggtggtgcacacctgtagtcccagctgcttgggaggctgaggcaggagaatcacttgaacccgggaggcagagattgcagtgagctgagattgtgccactgcactccagcctgggcgacagagcatgactccatct

SEQ ID NO: 1640 - DNA, 2683 bp, Homo sapiens
ataacacccgcgaccccgcagctaagcgcagctcccgacgcaatggacccggcgctggcagcccagatgagcgaggctgtggccgagaagatgctccagtaccggcgggacacagcaggctggaagatttgccgggaaggcgtgagtgaggagctgggcgggaaggggtcgcggagacggcttcgtggagcccgggtccccggaagcccccaagcgcctcctctccccgttgttttctgctccccaatcccctggacccgattgagagggattccaatggggattgttttcttctttaaaaaaaagattgggcctgttatgctcacaatgacttcaggtggtaagtatctgttcctttcactcagtgacttgcccaaggtcacctggctgttgaatgctgtttaggactggatgtttctgtgacagtggtaaaagtgaataaattgcatttaaggggtaagcaggtgtttaaaaacaaaacaaaatgaaagaatgtggtcgcagctaaggaggtttttacatgttgtttaaatccagtaaagtctgatccagcatctgatgcatactaaggttttcttctgtgttcattacagcatgaacccctctctttgtcgttgccagagggtagcatgggagtagttttgcttgacccttctgacttttcattacagcatgaacccctctctttgtcgttgccagagggtaacatgggagtagttttgcttgacccttctgacttttcattacagcatgaacccctctctttgtcgttgccagagggtagcatgggagtagttttgcttgacccttctgacttttcattacagcatgaacccctctctttgtcgttgccagagggtagcatgggagtagttttgcttgacccttctgacttttcattaagtagccctgggttgctcaaggaaacagaatgcctggtggcttttaagataattttaaaaaccacccacggctcttggagtcagccagttaagatctttttcttcatcacattctgctgtggggacagctttgcccaagactagtcccagcttttccacgtatgggttgcacagccttggagagtcgtatctcttgaggcctcttacccctcttctgtagaacaggggattaagccaggtgaccagagcccttctagctctaaaattctgtggttctgtgcctttcgacagaatggagtttcagtttcctggaggccatctgtggagtttccggggaacctgtaagtgcatgcctcgttcaaagattaccagaggtgccgcacccttcctggtatctttatgggcctgcctcctaaaatattcaaatcaaccctataacctgtgatcacttgtcctccagaaaagccttactgtttttaatgaaatcatttccagcaaactgtattcttgtgaaagcttactgtccatttctgcaggcctgaagggaggcggggctagtgactttcagccccttctctgcaagtctgtcctaaagagtagtgacagacatggcatggtccaccttctagtccttagatacaatctcaagataacaagtttgattgatgcgttggggtcaaattccttttcgtgctccaggtaccgaggagaaggcattgtatatgggacactagaggaggtgtgggactgtgtgaagccagctgttggaggcctacgagtgaagtgggatgagaatgtgaccggttttgaaattatccaaagcatcactgacaccctgtgtgtaagcagaacctccactccctccgctgccatgaagctcatttctcccagagattttgtggacttggtgctagtcaagagatatgaggatgggaccatcagttccaacgccacccatgtggagcatccgttatgccccccgaagccaggttttgtgagaggatttaaccatccttgtggttgcttctgtgaacctcttccaggggaacccaccaagaccaacctggtcacattcttccataccgacctcagcggttacctcccacagaacgtggtggactccttcttcccccgcagcatgacccggttttatgccaaccttcagaaagcagtgaagcaattccatgagtaatgctatcgttacttcttggcaaagaactcccgtgactcatcgaggagctccagctgttgggacaccaaggagcctgggagcacgcagaggcctgtgttcactctttggaacaagctgatggactgcgcatctctgagaatgccaaccagaggcggcagcccacccttcctgcctcctgccccactcagggttggcgtgtgatgagccattcatgtgttccaaactccatctgcctgttacccaaacacgcctctcctggcagggtagacccaggcctctaaccatctgacagagactcggcctggacaccatgcgatgcactctggcaccaaggctttatgtgcccatcactctcagagaccacgtttccctgactgtcatagagaatcatcatcgccactgaaaaccaggccctgttgccttttaagcatgtaccgctccctcagtcctgtgctgcagccccccaaatatatttttctgatatagaccttgtatatggctttaatgccgcaaaatatttatttttccttaaaaaaggtgtcaacttggaaataatggtttaaaaacaggataagcattaaggaaaaac

SEQ ID NO: 1641 - DNA, 2338 bp, Homo sapiens
tgatgaattttgaacaacttcagttatgcaaccaccacaacatgatggattgttttagtaaatgttcttcttaccaggagttcatccttgtttaagtctggagtttgccgtgttaaggttgcaggtgcttgaaagtgtaataaaattgtaggttttttaatcttttttttaatctcttactggaaggatgaattatagtttaaatagtaataatgcattgtcgttgttacacttactctttaagtaagttaggtcattattttccgaaatgaatgtagtagaatttcagaatggcttctggaacatgtttcctgttaaaaggcctagaatatcctgcagtggtagagtttgctccattccagaagatagccaaaaagaagctgagaaaaaaagatgccaagactggaagcatcgaagatggtgagccctttccaagtgctacgttatgaagctgccaaattaagaacactgagcaaatgtaattctcccgtagttgggaaagattatatttattttcttcctactttttaatgtctagatccagaatataagaagtttttagaaacctactgtgtggaggaagagaagaccagtgccaaccctgagactctgctgggggagatggaggcgaagacaagagagctcattgctagaagaaccacacctcttttggaatatattaaaaatagaaaattagaaaagcagagaattcgagaagagaagcgagaagaacggaggaggagagagttagaaaagaaacgtttgcgggaagaggaaaaaagaagaagaagagaagaagaaagatgcaaaaaaaaagagacagataaacagaagaaaattgcagagaaagaagtaaggattaagcttcttaagaaaccagaaaagggagaggaaccaaccacagagaaaccaaaagaaagaggagaggagattgatactggaggtggcaagcaggaatcctgtgcccccggtgcagtcgtaaaagccaggcccatggaaggctcgctggaggagccccaggagacgtcacacagcggcagtgataaagagcacagggatgtggagagatctcaagaacaagaatctgaagcacaaagataccatgtggatgacggcaggaggcacagagctcaccacgagcctgaacggctttccagaaggagtgaggatgagcagagatgggggaaaggacctggccaagacagagggaagaaggggagccaggacagcggggctccgggggaggccatggagagactgggaagagcgcagaggtgtgacgacagtccagcacccagaaaagagcgactggcaaacaaggaccggccagccttgcagctgtatgatccaggagctcgcttccgagcgcgagagtgtggcggaaacaggaggatctgcaaggcagaaggttcggggactggtcctgagaagagggaagaggcagagtgagtcactgcacgcacctggcctccatggacgagcaagggcatcccagaaacgtgtaaatgaccccgagtgtgactgggaaggagaacttattccttaccaggaaactggaagctaaaaatacagagggtgacgtagaaacacgcagaaaccattctaaagaaagtagtgatcttgtattaaattgagcagaattctcacagattttaccattcctgttataaactagtatttgttgtttagccaaaacagaaaatgatttccactggacagtagaaaaatatgtgtaaaatagggaagaaagttagtattggatcagtgtgagtcctgaagcactttcagtgctgtgagaacgacatccactttgggtttcattcgtttgtaagcagaggagctgtcagtcactcgtgcttctcggtggcctctgagccatggtgtcgagtgaagagtagttcttgtttgttacaacctttgtgagtcagccatgcccgcaaagcgtgctgtgttttagtcctggtaggaatatttatcagagttcacactatataaaacccaacagcttcaactattgccttttcaacagttttgccactgaccggatagaaacggtttcagtctctggatggatgtgtttgtggtttgtaaccattacggtttaaaccatggtttaagaatttgcccaaataacagaaattttgttcgggaagggataaactagatatagcatacagagcctgtttttgagttttagatactttatttgtaaataacttaaaatagctttctgaaaccgtgcattctgtagtttcttcctttcagtgaaattgctaaatgtcaatgtatttttggcactgcgattttaaccatttattaaataaaaattttgttaaag

SEQ ID NO: 1642 - DNA, 1598 bp, Homo sapiens
ctgaaagcatcatccaacaaccacatcccttctctacagaagcctctgagaggaaggttctccaccatggactggacctggagggtcttctgcttgctggctgtagttccaggtggtcacccccaggtgcaactggtgcagtctggggctgaggtgaagaagcctggggccgcagtgaaggtttcctgcaaggcatctggagacatcttcaccacccactacttgcactgggttcgacaggcccctggacagggcccggaatggatggggataatgagtcctagtggtgataggataacctattcacagaagttccggggcagagtctccatgaccagggacacgtccacgggcacagtgtacatggagctgaccagtctgagacttgacgacacggccgtctattactgcgcgggtgaggcggattcagctgtgagaacgtgggctttctttgactactggggccagggaacctcggtcaccgtctcctcagcatccccgaccagccccaaggtcttcccgctgagcctctgcagcacccagccagatgggaacgtggtcatcgcctgcctggtccagggcttcttcccccaggagccactcagtgtgacctggagcgaaagcggacagggcgtgaccgccagaaacttcccacccagccaggatgcctccggggacctgtacaccacgagcagccagctgaccctgccggccacacagtgcctagccggcaagtccgtgacatgccacgtgaagcactacacgaatcccagccaggatgtgactgtgccctgcccagttccctcaactccacctaccccatctccctcaactccacctaccccatctccctcatgctgccacccccgactgtcactgcaccgaccggccctcgaggacctgctcttaggttcagaagcgaacctcacgtgcacactgaccggcctgagagatgcctcaggtgtcaccttcacctggacgccctcaagtgggaagagcgctgttcaaggaccacctgagcgtgacctctgtggctgctacagcgtgtccagtgtcctgccgggctgtgccgagccatggaaccatgggaagaccttcacttgcactgctgcctaccccgagtccaagaccccgctaaccgccaccctctcaaaatccggaaacacattccggcccgaggtccacctgctgccgccgccgtcggaggagctggccctgaacgagctggtgacgctgacgtgcctggcacgcggcttcagccccaaggacgtgctggttcgctggctgcaggggtcacaggagctgccccgcgagaagtacctgacttgggcatcccggcaggagcccagccagggcaccaccaccttcgctgtgaccagcatactgcgcgtggcagccgaggactggaagaagggggacaccttctcctgcatggtgggccacgaggccctgccgctggccttcacacagaagaccatcgaccgcttggcgggtaaacccacccatgtcaatgtgtctgttgtcatggcggaggtggacggcacctgctactgagccgcccgcctgtccccacccctgaataaactccatgctccccc

SEQ ID NO: 1643 - DNA, 2712 bp, Homo sapiens
tttctactttcagtttcgtgcagagcgcggaggagccgcgagcgctgagggagtctgcactatggaaacaacctgtcaatccagctcaaggcacacatagcccagacacccatgagaccctctccgtggggaccctagagcacctatcatgaacgaggagaccaaggctggctcctcatggaccccgttggcctccagctcggcaacaagaacctgtggagctgtcttgtgaggctgctcaccaaagacccagaatggctgaacgccaagatgaagttcttcctccccaacacggacctggattccaggaacgagaccttggaccctgaacagagagtcatcctgcaactcaacaagctgcatgtccagggttcggacacctggcagtctttcattcattgtgtgtgcatgcagctggaggtgcctctggacctggaggtgctgctgctgagtacttttggctatgatgatgggttcaccagccagctgggagctgaggggaaaagccaacctgaatctcagctccaccatggcctgaagcgcccacatcagagctgtgggtcctcaccccgccggaagcagtgcaagaagcagcagctagagttggccaagaagtacctgcagctcctgcggacctctgcccagcagcgctacaggagccaaatccctgggtcagggcagccccacgccttccaccaggtctatgtccctccaatcctgcgccgggccacagcatccttagacactctggagggggccattatgggggacgtcaaggtggaagatggtgctgacgtgagcatctcggacctcttcaacaccagggttaacaagggcccgagggtgaccgtgcttttggggaaggctggcatgggcaagaccacgctggcccaccggctctgccagaagtgggcagagggccatctgaactgtttccaggccctgttcctttttgaattccgccagctcaacttgatcacgaggttcctgacaccgtccgagctcctttttgatctgtacctgagccctgaatcggaccacgacactgtcttccagtacctggagaagaacgctgaccaagtcctgctgatctttgatgggctagatgaggccctccagcctatgggtcctgatggcccaggcccagtcctcacccttttctcccatctctgcaatgggaccctcctgcctggctgccgggtgatggctacctcccgtccagggaagctgcctgcctgcctgcctgcagaggcagccatggtccacatgttgggctttgatgggccacgggtggaagaatatgtgaatcacttcttcagcgcccagccatcgcgggagggggccctggtggagttacagacaaatggacgtctccgaagcctgtgtgcggtgcccgcactgtgccaagtcgcctgtctctgcctccaccatctgcttcctgaccacgccccaggccagtctgtggccctcctgcccaacatgactcagctctatatgcagatggtgctcgccctcagcccccctgggcacttgcccacctcgtccctactggacctgggggaggtggccctgaggggcctggagacagggaaggttatcttctatgcaaaagatattgctccacccttgatagcttttggggccactcacagcctgctgacttccttctgcgtctgcacaggccctgggcaccagcagacaggctatgctttcacccacctcagcctgcaggagtttcttgctgccctgcacctgatggccagccccaaggtgaacaaagacacacttacccagtatgttaccctccattcccgctgggtacagcggaccaaagctagactgggcctctcagaccacctccccaccttcctggcgggcctggcatcctgcacctgccgccccttccttagccacctggcgcagggcaatgaggactgtgtgggtgccaagcaggctgctgtagtgcaggtgttgaagaagttggccacccgcaagctcacagggccaaaggttgtagagctgtgtcactgtgtggatgagacacaggagcctgagctggccagtctcaccgcacaaagcctcccctatcaactgcccttccacaatttcccactgacctgcaccgacctggccaccctgaccaacatcctagagcacagggaggcccccatccacctggattttgatggctgtcccctggagccccactgccctgaggctctggtaggctgtgggcagatagagaatctcagctttaagagcaggaagtgtggggatgcctttgcagaagccctctccaggagcttgccgacaatggggaggctgcagatgctggggttagcaggaagtaaaatcactgcccgaggcatcagccacctggtgaaagctttgcctctctgtccacagctgaaagaagtcagttttcgggacaaccagctcagtgaccaggtggtgctgaacattgtggaggttctccctcacctaccacggctccggaagcttgacctgagcagcaacacagacctctaccaaaaaaaaaaaaaaaaaaaaaaaaaaaattggtcaggtatagtggcatgcatctgtggtcccaggtattagggaggctgaggtgggaggatcacttgagccggggaggtcagggttgcagtgagctgagattgcctcattgcattccagcctgggtgacagagagaccctgtctcaaaaaac

SEQ ID NO: 1644 - DNA, 1779 bp, Homo sapiens
catcaaaaaggccaacagagcccagcaggaaacttgggtccccaagcctaggccaggccctttaaaactgtgcctaagttgagtgaagccatcaaattaattctttttatttacctcttttgtttgtttctgcctattataccttctgctccatcctactcttttctcctcacttctttcacgacaggacatgtgtttgcaaaaactacttggaaggcaggaacctcaaaggaagtctctcttgcagtcgatttatgtgctttgttcccagagcctgtctgtacccacgaagaacaatgcaacctgccggtcatgggagtgggaaatgtcgaccttgctgcaggatgtggacacacaggaagctggactggatgtgggatctctagaggtgcagaaaaaggactccggagcgttgacttttacctccgtcctggaaatcgccctgactcctctagctgtcgagattcttaccagtttttctgccctcactggtcgtgtgtaaccctagccattttccctggaggatcaacccggtcctcaaccctctccataactcgcacttcccgtcctagaccgtgaactatgggaaattgtaaccctcttactataactgtccgtaaccctggttcagctcaatggtattatggcatgtcatggggattaagactttgtatctcaggatttgatgttggaactatgttcaccattcagaaaaaggtcctggtcccatggagccctcctaagccaatcggacctttaactgatttaggtgaccctatgttccaaagacacccagacagggtcgatttaactatcccgctgcccctccttgttcccagatctcagttacaacgacatctccaacccagcctgatgtccattctggatggggtgcatcacctccttaatctcacccagactaaattagcccaggattgttggttgtgcctaaaggccaaacccccacgttatgttggattaggagtagaagccatgattaaaattgactctctttcttgtcgtacatgcccccatgcccttacactaggagacgtgtcagggaacgcctcctgtcgaattagcaccaggtataacttatctgcttctccctttcaggctacctgtaatcagtctctacttacttccttaaacacctcagtctcctaccaggcacccaacaatacctggctggcctacacttcaggctcactcattgcatcaatgggactgaacctggacctctcctgtgcgtgttagttcatatactgccccaagtttacgtgtacagcgggtcagaagggtgacttctgacccttctgctcagagtgactctctcttagctgagatagctggacactctccattttagcttcttcacttgcagtccccttatccccctcccttaagggaataactagtgcaagctgactccaagcacatccaggaatgcacttactgataagatattgaggcaagctgtaccagcagctcctggggacgtgctcagtggatggtacccaagcccctgcatttatctctttgtgatagtttaagcccctgcacctggaactgtatttttctgtaactatctctgtaaccattaatttttttaactttttgcctgttctgcttctgtaaaaattgcttcaagtaggctccccctcccctatttagaccatggtttaaaaagaaatctatcccgttcttcgaggccaagagaattttgagctctagccatctctcggtcgccggcaataaaaggactcctgaattagcctc

SEQ ID NO: 1645 - DNA, 2157 bp, Homo sapiens
tattacaggtgtgagccaacatgttcggcctgttaagcacagagacacacacctggtattacaggggtgcgccaacatgctcggcctgttacacacacacacacacacacctggtactacaggtgtaagccaacatgcttggcctgttacacacacacacacacacacctggtattacaggtgtgagccaacatgctcggcctgttacacacacacacctggtactacaggtgtgagtcaacatgctcggcctgttacacacacacacctggtactacaggtgtgagccaacatgctcggcctgttacacacacacacacacctggtactacaggtgtgcgccaacatgctcggcctgttacacacacacacacacacctggtattacaggtgtgagccaacatgctcagcctgttacacacacacaaacatatatatttttaagacagagtttcactcttattgcccaggctggagtgcaatgcgtgatctcgtctcgctgcagcctgcaacctctgcctcctgcctcagcctcccgagtaattggaattattacaggcatgcaccactacagccggctagttttttatttttagtggggatggggtttcgccatgttggtcaggctggtctcagaaatcctgacctcgggtgatccgcccgttgtggcctcccaaaatgctgggattacagtcatgagccactgctcctggtcacgtaatttttaaatataattttagctgtatcttgtgttcagttttctaggctacctttttcactcaacattacatcaggatcatttttcctcatgttattctttgagatatttttaatgggcttgtagtgtcccatcatgtgatttaccagtttactttctgttttttagttgtttacagctcttccttcgttgtgatgctgtgaacctcttgtgcataaattatcatgtgcatctctaattatttcttagagtacagtcccaggagttgtgaatgtgggtgaagcccctgctcctgctgccaggcccacctctcagaaagtttcgtgtacacgtgtgcagggaagggctgacctagctaggtctctgaaacccgtgccagatactaaatctgcacaggctgcgacagtgagcagactgagggcgatctgtgccttattgtcttcctgttggaagagaacacataaatcacgtatctcaaatgtgaggcaaatagctaatggtgtttgtgtatacgaggaaggtggagtcaccggttcttcgtggccatcagaggaccgacacgcccataggtctcatgcattaagtctgcgttgagcaatccctaacacggtttttgcctacagatacatttgcacaactgtgaaaaccaggtacgtattcattgcatcattttttgtaaaaagctgagagaagtgcccagcaacacgtcgtgccgcgcgtgtgcatggaacaccatatagcctcaccattaataggcaagatgagcgagacccattatcagatgagaaaagcacagcacggaatactgtgtccaatgtgctcaccgtctcaattttaaacctaaaggagggagaacattttctcatgcgtgcatttcatctctgggagcacttaagacgctgaagcgttggttgccagtgggaatgggaactgggtatctgtgatacagggatgagaattttcacactgtacctttaaataccagaacatcatgaacacatctgaaaaacaatattcaaatttccctgatcatctttcttttttgttaacaattatttaaattctggcacaagcaagccacttttcatcatgcatttggtctatagatgttctacctccctcaatttcgtcttgtaatttaatgaataggggaactggggccgggcacggtggctcacgcctgtaatcccagcactttgggaggctgaggcgggtggatcacgaggtcaggagatcgagatcatcctggctaacatggtgaaaccccgtctctactaaaaatacaaaaaattagccgggcgtggtggcgggagcctgtagtccaagctatgcgggaggctgaggcaggagaatggcgtgaacccgggaggcggatgttgcagtaagccgagattgcaccactgcactccagcctgggtgacagagcaagactccgtctc

SEQ ID NO: 1646 - DNA, 2168 bp, Homo sapiens
attagtgaccctgcgagtcaccgccaagatgggccttcacactgggcgcggccggatgccgcctggtctcagggcctgtgttgcgactggacaaatttatgtctcctcgcctcttccaggccacacatctgaacgaggggcagaggctgcctctgaggaggggccctggagtgtctttagggacattgcccagggactcctggggtcaaagacagaggcttctggggtgggcctgggaggtggtgagtctgatgctctaggggagtctgatgctctaggagagacgccccaggaacaccaccgactcgaggctgaggactggaggccagcccagcctgcgagggcctcacggcctggtgacgcagtggtcaccccaaggggagaccaatggagggcatagagagggctctgggtctaggctgtagctctgtggcctgtggtgggccatgaggacaaggggacacagagtgacgggtgagactgcatgaggtgccgggatccaattctcccaggacagtctccagaaaggagacattctgtcaggacagagatgtgtctgtccctggagccccgtcacctctggggcccaatttctctctgttcacggatcggcctcctgccttcctcaaagggcattttagactcaggaactgaccggaggggagtgaatgaggggtgcagagaattccatgggttccgggtgaggtttggggtcatcacaggctgctggggtgggcctgggggctgctgagtctcatagtgtgtgggagcagccccaggaacagctgaggtgaagggttctgtggtcgggcttgtggagccaggaaacatctcagagcctcagaggaaccctgaggcttgtctaggtggagcccactccttgcctggagagccaagtgggctgggctggggcagagcccggtgcctgtgagggataggaagctccagttcaaggcaggcttgggtctccccacacactgcctgccaggacagtcctacgggatgagtgggggacccacagttcacggaggaggctctacgtcctggaagaataaggtgggtgatggtggggggtatagggatgtaaatgggggatccaggggtcaaggccagattctcaactcagactccagagatcagagaagaaggaacacagcctgccctgggtatatggagaagttgaggctgtagaggagagggactgggccaggacacctgtgaaaggtgacttgggagggctcctaggaaggcacagagctgtctgctctccacagggcatgagtggaaaggatggggaaagaagaggagagaaccccgggtggaccggatggccacactgtgaaccctcccagagactttagacagagagaggggctccacaacaccccggtattctgtctgccctctctcacccccttccctgtccacacaggtcagcccaaggccaaccccactgtcactctgttcccgccctcctctgaggagctccaagccaacaaggccacactagtgtgtctgatcagtgacttctacccgggagctgtgacagtggcctggaaggcagatggcagccccgtcgaggcgggagtggagaccaccaaaccctccaaacagagcaacaacaagtacgcggccagcagctacctgagcctgacgcccgagcagtggaagtcccacagaagctacagctgccaggtcacgcatgaagggagcaccgtggagaagacagtggcccctacagaatgttcataggttcccaactctaaccccacccacgggagcctggagctgcaggatcccaggggaggggtctctctccccatcccaagtcatccagcccttctccctgcactcatgaaaccccaataaatatcctcattgacaaccagaaatcttgttttatctcattttttttctcacataaattgctagcctccccggggttctcagtgtggggtacagggaattctgcacccagtgtgaaaatcacccaagggaggaggctcacagcctccctgagtcatctccccagagggtccttcctctcccagtcaccccttctccaactctccactgtacccctgagctaccagtctggcatcagttcagaccagtcccacaccctcctaaattttacttctcaataaatacctgatcatgtaaaacgc

SEQ ID NO: 1647 - DNA, 2181 bp, Homo sapiens
gtctcccctcgccgcatccactctccggccggccgcctgcccgccgcctcctccgtgcgcccgccagcctcgcccgcgccgtcaccatgagccaggcctactcgtccagccagcgcgtgtcctcctaccgccgcaccttcggcggggccccgggcttcccgctcggctccccgctgagctcgcccgtgttcccgcgggcgggtttcggctctaagggctcctccagctcggtgacgtcccgcgtgtaccaggtgtcgcgcacgccctcctcctacggcgcaggcgagctgctggacttctcactggccgacgcggtgaaccaggagtttctgaccacgcgcaccaacgagaaggtggagctgcaggagctcaatgaccgcttcgccaactacatcgagaaggtgcgcttcctggagcagcagaacgcggcgctcgccgccgaagtgaaccggctcaagggccgcgagccgacgcgagtggccgagctctacgaggaggagctgcgggagctgcggcgccaggtggaggtgctcactaaccagcgcgcgcgcgtcgacgtcgagcgcgacaacctgctcgacgacctgcagcggctcaaggccaagctgcaggaggagattcagttgaaggaagaagcagagaacaatttggctgccttccgagcggacgtggatgcagctactctagctcgcattgacctggagcgcagaattgaatctctcaacgaggagatcgcgttccttaagaaagtgcatgaagaggagatccgtgagttgcaggctcagcttcaggaacagcaggtccaggtggagatggacatgtctaagccagacctcactgccgccctcagggacatccgggctcagtatgagaccatcgcggctaagaacatttctgaagctgaggagtggtacaagtcgaaggtgtcagacctgacccaggcagccaacaagaacaacgacgccctgcgccaggccaagcaggagatgatggaataccgacaccagatccagtcctacacctgcgagattgacgccctgaagggcactaacgattccctgatgaggcagatgcgggaattggaggaccgatttgccagtgaggccagtggctaccaggacaacattgcgcgcctggaggaggaaatccggcacctcaaggatgagatggcccgccatctgcgcgagtaccaggacctgctcaacgtgaagatggccctggatgtggagattgccacctaccggaagctgctggagggagaggagagccggatcaatctccccatccagacctactctgccctcaacttccgagaaaccagccctgagcaaaggggttctgaggtccataccaagaagacggtgatgatcaagaccatcgagacacgggatggggaggtcgtcagtgaggccacacagcagcagcatgaagtgctctaaagacagagaccctctgccaccagagaccgtcctcacccctgtcctcactgctccctgaagccagccttcttccatcccaggacaccacacccagcctcagtcctcccctcacagcctctgacccctcctcactggccatccctcgtggtccccaacagcgacatagcccatccctgcctggtcacagggcatgccccggccacctctgcggaccccagctgtgagccttggctgttggcagtgagtgagcctggctcttgtgctggatggagcccaggcgggagcggtggccctgtccctcccacctctgtgacctcaggcactagcctttggctctggagacagccccagagcagggtgttgggatactgcagggccaggactgagccccgcagacctccccagcccctagcccaggagagagaaagccaggcaggtagccagggggactagcccctgtggagactggggggcttgaaattgtccccgtggtctcttactttcctttccccagcccagggtggacttagaaagcaggggctacaagagggaatccccgaaggtgctggaggtgggagcaggagattgagaaggagagaaagtgggtgagatgctggagaagagaggagaggagagaggcagagagcggtctcaggctggtgggaggggcgcccacctccccacgccctcccctcccctgctgcaggggctctggagagaaacaataaagagattcacacac

SEQ ID NO: 1648 - DNA, 1954 bp, Homo sapiens
aagctctgcttcagctgtgagcgcagaaggcaggactcgggacaatcttcaccatgacctgctcccctctcctcctcacccttctcattcactgcacagggtcctgggcccagtctgtgttgacgcagccgccctcagtgtccgcggccccaggacagagtgtcagtttctcttgttctggaggcagcattggtggaaattctgtatcctggtaccagcaagtcccaggaacagcccccaaactcctcatctatgaaaattcaaagcgaccctcaggggctcctgaccgaatctctggctccaagtttggcacgtcagccaccctggccatcagtggactccagactggggacgaggcccactattactgcggaacttgggatgccagcctgcatacttgggtattcggcgtagggaccaagttgaccgtcctgggtgagtctcttctcccctctccttcccctttgttgggacaatctctggttttttttttgtcctggttcgacttgtggtctccctttttcctacaactcaggcctgaccacggacctctgccctccctactcagacccttacttgcctctttaggtcattatttgcatttcacctctgatcgcaggggcaggggagtggatacagtgtcctagtgagcctcctctgtctgtctcgctgtctctctgtctgtctgtctgtctcgctttttgtctgtctgtctatttgacaggcgcagggtgggtctctaagccttgttctggtgtggcctcctcagtctggattcttgccggaacacctttggcctcgtcttacttgggttccatctcctggcgagctggaaaggaggggtctgagggaggcacctcctgggaggcacctcctgggaggctctagaaagacgcagtgccctcggggctgatgatcgggaatcacagacctgggacccagagtcaggatgcagagtcaggatgacgttgccctggaggggatgccctgggcgtctgggggctgccagggactgagccctgagccagcctgagattcagggaaccccgtcaagagggacaggggagaagcagattctggacaccagagtctaggggaagggtcacaaaaggggtggatgtgacggaagggcgggctcttgggtctcttcagaacatgtcccctgtgcccagggggatcagaggggcagagtccactgcgtgaaagccccactggtatgaccaggtagccgggacgtggggtggatgccagagaagactccacggaagaagagagagcccaggacagcaggcaggctctccgatcccccccggcccttgccccaaacacgggctccagaacacacatttggctggaacagcctgagggaccaaaaggccccagtatcccacagaactgaggagccaggccagaaaagtaaccccagagctcgctgtgcagggctccccaggtggacaccaggattctgaccccctgcccctcatccaccccgcaggtcagcccaaggctgccccctcggtcactctgttcccaccctcctctgaggagcttcaagccaataaggccacactggtgtgtctcataagtgacttctacccgggagccgtgacagtggcctggaaggcagatagcagccccgtcaaggcgggagtggagaccaccacaccctccaaacaaagcaacaacaagtacgcggccagcagctacctgagcctgacgcctgagcagtggaagtcccacaaaagctacagctgccaggtcacgcatgaagggagcaccgtggagaagacagtggcccctacagaatgttcataggttctcatccctcaccccccaccacgggagactagagctgcaggatcccaggaaaagggtctctcctcccactccaaggcatcaagcccttctccctgcactcaataaaccctcaataaatattctcattgtcaatcag

SEQ ID NO: 1649 - DNA, 2070 bp, Homo sapiens
agtagcgaccatttccattggcgttagggagtccttggagcgctgtgctgggaccgtggtggtgactggatccaggaggtcgagagtcgttcttctctttgcacagacgtgactctgcagctctttaacggcacccgctgctctcaacccagcttaccccacgtggtcccatggcggcggccgcgctaaggttccccgttcagggcacagtgacttttgaagacgtggctgtgaaatttacccaggaggaatggaatctccttagtgaggctcagagatgcctgtaccgtgatgtgacgctggagaacctggcacttatgtcctccctgggttgttggtgtggagtggaagatgaggcggcaccttctaagcagagtatttatatacaaagagagactcaggtcaggactcctatggcaggtgtgtctcccaagaaggcccacccctgtgagatgtgtggcccgatcttgggagacattttgcatgtggcagatcatcagggaacacatcacaagcagaaactgcacaggtgtgaggcctgggggaataaattgtatgacagtggaaactttcatcagcaccagaatgagcacattggagagaaaccctacagagggagtgttgaggaggcgttgtttgcgaagaggtgtaagttgcatgtgtcaggggagtcatctgtcttcagtgagagtgggaaagactttttgctcaggtcaggattactccagcaagaggccactcacactgggaagtcaaacagcaaaactgagtgtgtgtctctgtttcatgggggaaaaagccattacagctgtggaggatgcatgaaacattttagcaccaaagatatactcagtcagcacgagagactgctccctacagaagaaccttctgtgtggtgtgaatgtgggaaatcctctagcaaatatgacagcttcagtaatcatcaaggagttcacactagagaaaaaccttatacgtgtgggatatgtgggaaattatttaacagtaagtcccacctccttgtacaccagagaattcacactggagagaagccatatgagtgtgaggtttgtcagaaattttttaggcacaagtaccacctcattgcacaccagagagttcacactggggaaaggccatatgaatgcagtgattgtgggaagtcatttacccacagctctacattccgtgttcataagagagttcacactggtcagaagccttatgagtgcagtgaatgtgggaaatcttttgccgaaagctccagtctcactaaacacaggagagttcacactggagaaaagccttacgggtgcagtgaatgtgaaaaaaaatttaggcaaatctcttcacttcgtcatcatcagagagttcacaaaagaaagggcttatgagtgcagtgagtccagtctcattaaatattggagaatacacacctgagtaagatcctgtgattgcagcaaatgtggaaaatgtttacccaaaggtctgctctccttggatattggagagttcacactagagaagagtccttacaagtaaaataaatttgggcagttttgtagccacacctctgtattccttcaggattatagttaacactgaatgaaggccttactagtgtgacaaatacaggatatttatccagaagtctcactgcaagccctgcctcctgggttcatgccattctcctgcctcagcctccctagtagctgggactgcaggcaaccaccaccactcctaccttttttgtatttttggtagagatggggtttcaccctgttagccaggaagttctcaatctcctgacctcgtgatctgcccgccttggcctctcaaagtgttgggattgcaggcgtgagccactgctcctggcttgaattttcttataatcccatgaaaccatcatcagagtcacaataatgaatttatctaatctatcacctttgtattcacctggagcctttataaagtttttctctatgcagacaaccattgatttactctgctgtataatactttccattttctagaattttctgactgatgtaataaagtgtttcctcttat

SEQ ID NO: 1650 - DNA, 1810 bp, Homo sapiens
aattaggactcctcaggtcaccttctcacaatgaggctccttgctcagcttctggggctgctaatgctctgggtccctggctgggccttgaaagttgcatatctgcgtgaagtaggcatgtgaagtttacatcgctaaggatgtggaagattcgaaaagaaagaaagaccagtggtccggtgaagacggttttagacaaagaaagggaatggtagagggaccttgtagcactcaaagaactaaattatggaagtttattttgtctgagttaagtgacagaagactgatgatttcaaaattgtgggtcgtaattctacataaccttaatattgtctttcattttttcacgatacactggggagattgtgatgatccggcctccgctctcctcgactgtctcccttggacagccggcctccatctccttcaggtctggtcaagcctcgtgcacgctgatggagacacctccttgaattgccttcagcagaggccagggcagcctcctagactcctaatttaactgccttaagcagaggccaggcccgcctcctagactcctagtttgtaacctttctaagcgattgtctggggtcccagacatattcagtggtactggggcagggacagatttcacactcaaggtcagtagggtgggagctgagggtgtcggggtttcttcgtgcagtcaaactacacaatttcctattaactcccggccctgggaggtaagtgagtatcaaatgtttgtacttctgtctcaatcattcgtgagattttagtgccattgtttcatttgtccgagttttgtgatattttggctgagtaaacctggtgacctagaagtaaaaagcaggcctccagaaaatgcactctaaaacttgagcagaaaggcgcatctttgggtttgagaggagagtaggattcatgggggaaatggggaagaaatagctagatttttctctgaacaagtaggttatctcatatgattggcttcaagagaggtttttgttgaggggaaagggtgagatccctcactgtgcctcactttcggcggagggaccaaggtggagatcaaacataagtgctttttcgtaatgcttcttcttataaggtttgaaatttggagcatttttgtgtttgagatcttaggtcaggtcaattccaaagagtaccagattctttcaaagagtcccatgagtaacggatgggaactgagttcatcttaaggaacagcccagcgctagccagttaagtgaggcatctccattgcaagatcatctctgcatcggtcaggaactgtggctgcaccatctgtcttcatcttcccgccatctgatgagcagttgaaatctggaactgcctctgttgtgtgcctgctgaataacttctatcccagagaggccaaagtacagtggaaggtggataacgccctccaatcgggtaactcccaggagagtgtcacagagcaggacagcaaggacagcacctacagcctcagcagcaccctgacgctgagcaaagcagactacgagaaacacaaagtctacgcctgcgaagtcacccatcagggcctgagctcgcccgtcacaaagagcttcaacaggggagagtgttagagggagaagtgcccccacctgctcctcagttccagcctgaccccctcccatcctttggcctctgaccctttttccacaggggacctacccctattgcggtcctccagctcatctttcacctcacccccctcctcctccttggctttaattatgctaatgttggaggagaatgaataaataaagtgaatctttgc

SEQ ID NO: 1651 - DNA, 2919 bp, Homo sapiens
atgcgcgcgcccgggcggcgcgggatctgagtctggggatgtggtaccggctgctggcggcggccggcagtagagcggtggccaggccgctggccttgctgtggcgatgtggtggcccaggaggcggcaggacggccaagaccagcgcgagggccctgggcaaggcccgacagaagaagctaggaaagctcatctggcctcctgttccagtgcttccaggggatccacgttcagaagctgactctgcaggcaagaccgacgttattttcctggtggctgtgttcaaaaccacccaaagggtttgagaaatactttaagaggagtggaaggaacacaaactgagaaacatcaacagcaccaaaaaaagagactggtgaactagagaatgctgagtctggaggagacggaggcaggagaggagggaagcaggataacgttgcctggtggaggcggatgcagaaggggggacttcccctgggatgacgaggatttccgcagtctggcccttttgggggcaggcgttgccatgggatttttctacctctattttcgagatcctggaagagaaatcacgtggaagcactttgtacagtattacctggccagaggtctggtggaccggctggaagtcgtgaacaaacaatctgtgcgtgttattcctgcccctgggacctcttctgaaggagccatgctcactggtcctcctggtaccggcaagacccttcttgccaaagcaactgcaggggaggccactgtgcccttcatcactgtgaacgggtctgagttcctggaaatgtttattggcgttgggccagcaaggggttcaactctgccaccaacgtcgtggtgttggctggcaccaaccgccctgacgtcctggacccggccctcatgcggcctggccggtttcatcgccagatttacactggtcccccttacattaaaggcaggtcctccatctttaaggtccacctgcgcccactgaagctggacaagagcctcaataaggacaccctggcgaggaagctggcagtgctcaccccaggcttccctgacggggatgactcagcactacccctcaacagagatgactttgatgactctgcccctcagcagggcttactaagcactaccccttaacagggatgactccacactgcccctcaacagggatgactcagcagagatgactcagcactgtcccttagcagggatgacacagcaaggatgattcagcactgcccctcagcaaggatgactcagcactgccgctcaacagacatgactcagggatggcttagtactgcccctcagcagggatgactcagcaccgcctctcaacagggatgactcagcagggatgactcagcaccgcccctcaacaggcatgactctgcagagatgactcagcactgtcccttagcagggatgacacagcaaggatgactcagcactgcccctcagcaaggatgactcagcactgccgctcaacagggatgactcagggatggcttagtactgcccctcaacagggatgactcagcagggatgactcagcaccgcccctcaacaggcatgactctgcagagatgacttagtactgcccctcagcagggatgactcagtactgcccctcagcagggatgactcagcactgcccctcaacagggatgactcagcagggatgactcagcactgtcccttagcagtgatgacacagcaaggatgactcagcactgcccctcagcaaggatgactcagcactgccgctcaacagacatgactcagggatggcttagtactgcccctcagcagggatgactcagcaccgcccctcaacagggatgactcagcactgcccctcaacagggatgactcagcagggatgactcagcactgtcccttagcagcgatgacacagcaaggatgactcagcactgcccctcaccaaggatgactcagcactgccgctcaacagacatgactcagggatggcttagtactgcccctcagcagggatgactcagcagggatgactcagcaccacccctcaacagggatgactcagcagggatgactcagcactgcccctcaacagggatgactgcagggatgactcagcactgcccctcagcagggatgactcagcactgcccctcagcagggatgactcagcagggatgactcagcaccgcccctcaacaggcatgactctgcagagatgactcagcactgcccctcagcagggatggctcagcagggatgactcagcattgcccctcaacagggatgactcagcagactcagcagggatgactcagcactgcccctcaacagacatgactcagcagggatgactcagcaccacccctcagcaaggatgactcagcagggatgattcagcagagataactcggggatgactctgattgtccttcagcagggatgagtctgttttgctccgatggaagcatctgtagtgtccatcagcaggtgaatggccaaagtggtatatactgtagtcacattcagctataaaaaggaataaagtatcgatgcatgccacaacatgggtgaacctagaaaatactgatctaaatgcaagaagccaggcacaaaaggccacatagtatatgttcccatttatgtgaaatgtgcagaataataataaaaatgtatagaatagcaaatctgtagggacagacatgaggtgagtggttgccagaagtggaaatgggagttaactataaattgcacagggtaccttacagagatgatggaaatgtcctaaaactagattatggcaatagttgcactacgtgatcagtttattaaaaatcgttgatgtgtgtgtgtaaaatgggtggattttatggtttataaattataccttaataaaggttaacaaaaaatgtggct

SEQ ID NO: 1652 - DNA, 1925 bp, Homo sapiens
aattataaaagaagagctggtcctgaagctcacaaccgtaacagccaccagacaagcttcagtggccggcccttcacatccagacttgcctgagaggacccacctctgagtgtccagtggtcagttgccccaggatggggaccacagccagagcagccttggtcttgacctatttggctgttgcttctgctgcctctgagggaggcttcacggctacaggacagaggcagctgaggccagagcactttcaagaggttggctacgcagctcccccctccccacccctatcccgaagcctccccatggatcaccctgactcctctcagcatggccctccctttgagggacagagtggaaaggagggaagaggccctcgcccccactcccagccctggctaggagaaagggtgggctgctcacacattcccccttctatagtgcagccccctccctctcaggaggccacccctctccaacaggaaaagctgctacctgcccaactccctgctgaaaaggaagtgggtccccctctccctcaggaagctgtccccctccaaaaagagctgccctctctccagcaccccaatgaacagaaggaaggaacgccagctccatttggggaccagagccatccagaacctgagtcctggaatgcagcccagcactgccaacaggaccggtcccaagggggctggggccaccggctggatggcttcccccctgggcggccttctccagacaatctgaaccaaatctgccttcctaaccgtcagcatgtggtatatggtccctggaacctaccacagtccagctactcccacctcactcgccagggtgagaccctcaatttcctggagattggatattcccgctgctgccactgccgcagccacacaaaccgcctagagtgtgccaaacttgtgtgggaggaagcaatgagccgattctgtgaggccgagttctcggtcaagacccgaccccactggtgctgcacgcggcagggggaggctcggttctcctgcttccaggaggaagctccccagccacactaccagctccgggcctgccccagccatcagcctgatatttcctcgggtcttgagctgcctttccctcctggggtgcccacattggacaatatcaagaacatctgccacctgaggcgcttccgctctgtgccacgcaacctgccagctactgaccccctacaaagggagctgctggcactgatccagctggagagggagttccagcgctgctgccgccaggggaacaatcacacctgtacatggaaggcctgggaggatacccttgacaaatactgtgaccgggagtatgctgtgaagacccaccaccacttgtgttgccgccaccctcccagccctactcgggatgagtgctttgcccgtcgggctccttaccccaactatgaccgggacatcttgaccattgacatcggtcgagtcacccccaacctcatgggccacctctgtggaaaccaaagagttctcaccaagcataaacatattcctgggctgatccacaacatgactgcccgctgctgtgacctgccatttccagaacaggcctgctgtgcagaggaggagaaattaaccttcatcaatgatctgtgtggtccccgacgtaacatctggcgagaccctgccctctgctgttacctgagtcctggggatgaacaggtcaactgcttcaacatcaattatctgaggaacgtggctctagtgtctggagacactgagaacgccaagggccagggggagcagggctcaactggaggaacaaatatcagctccacctctgagcccaaggaagaatgagtcaccccagagccttagagggtcagatggggggaaccccaccctgccccacccatctgaacactcattacactaaacacctcttgg

SEQ ID NO: 1653 - DNA, 2327 bp, Homo sapiens
atgcgcggcgcgggggcgatcctgcggccggcggcgcgtggtgcccgggtgagcacccccgccctgcaccagcccccgtcccgaaccccagccgggcccctgccagcccccactccagccccggcccggccgagcatcccggagctcccggcccgtcccgccggtgtctggcttgcctcagctcacaggcttttcccgagcgccagtccctgccaggacctccgcagccagcaccttctcttgcgacctttttcttaccctctcattcctccctcgccccttcagccctgtcacctcctccttcctagatggcctcccgtgtccttccctttccactgattttatttttccgtttccaaaccaccgtcttgtgatgcctgccatgcttgcgtaccttgcaggacctgaacccgcggcgggacatctcctcctggctggcccagtggttccctagaaccccagccaggtccgtggtggccctgaagacccccatcaaggtggagctggtggcagggaaaacctacaggtggtgtgtgtgtggccgcagcaagaagcagcccttctgtgacggctcccacttcttccaacgcactggcctatctccactcaagttcaaggcccaagagacccgcatggtggcactctgtacctgcaaggccactcagaggcccccgtactgcgatggcacccacaggagtgagcgcgtgcagaaggcagaagtgggctccccactctgagggggctgctgctgtccagccacaggtggccttggctccaggcctctgacaggcacccccttctgtgggaaaggaaacaggtgctgagcccaagagactctggtacccactgctggctcatgaaggaagaattattccttataacctaaaagtctccagtctggggcaggcgggagtgggccctggttcaatgtttgctgatggggaagatggcaaaaacaagcctgcccaaccagactggtagtcctgcagtcactgctatgaggcccacgtgctgcctcctgctccagattttaacctctctgtgggctgggggcacctgaccagccacaggagagggcagttcagattcattctgtatggggtccccaagccaggctaaacccagagatgagaggcacccttcccttcttccctccaccccaaagaactacaggctccagaaagtatgcagcatttattacaaagccaagagatacagatgtcccagggcaaaggagggtacagtcacaggacctcagacacaggacaaggtgcaaacacagacaagcccatcagggggctcccaaccccacacacctacgctatgatggaatctcgagtctcgactcccgactcctctcagatctatgcacacttgaggaaatctcggtgggcagcgacctgccagggtctgtccctaaggaggtggtccgctgacctctcaaggggtgggggtggggtcagagcttacaggtttctgtcttcttgtgcttttagatgcagttgctctgtcctgaccaggtgaccgggcctcagctgggggtggaggggcaattggaaggctgtttgcctctggcaaagtctgggatctgtgcttgtgtgaggttaacccacccccacttccactctaggccccaggtgagactccaccaccagtcctgctagtgagggttccccggtgagggtaaggttggtgggggtgcagcgcttcacaatgctaaagccttagccctcctccaagagctgagacctctcagggcctgaatcttcttttccacaagataaatgatgcaaaggccacacacacaggaaaaaaaaaaaaagaggcagaactatctattctttgcacaaagtttccactgcaagaggaggaggtgatgcaggtgccacctccaccctgcacttgctcctcagaaccagggataaactgcatttgtaaaaggcactgttcttagcaatttctggacattcaacaacgtggggggcggccactggtcagaggcaggacagcagccaagatggggagagaaacggggagagaaagaaacaattctaactgactcctatatgcagccagttggaatcatgcctaaagctttgggtctgaaggggcccccaacacaccacctgccttgggaaacagcgaggatggtgcagagctttattgagactccagtggcccatccagttcatctccaggcacccccaaaaacagcaaattacacaagaccccccccaaaaaaaatgaacaccattttccacacatacacacacacataaagtttgtttcctgtggcatttaaattaatctggttggtccatagaaac

SEQ ID NO: 1654 - DNA, 2759 bp, Homo sapiens
aagagctcgttgattcctctgcaaggtggtgcagcatcctctgtcccttcattcatttcagatctactcaggtctccctgtaaacagatctctcggatcaataagcatgaatgacgaagactacagcaccatctatgacacaatccaaaatgagaggacgtatgaggttccagaccagccagaagaaaatgaaagtccccattatgatgatgtccatgagtacttaaggccagaaaatgatttatatgccactcagctgaatacccatgagtatgattttgtgtcagtctataccattaagggtgaagagaccagcttggcctctgtccagtcagaagacagaggctacctcctgcctgatgagatatactctgaactccaggaggctcatccaggtgagccccaggaggacaggggcatctcaatggaagggttatattcatcaacccaggaccagcaactctgcgcagcagaactccaggagaatgggagtgtgatgaaggaagatctgccttctccttcaagcttcaccattcagcacagtaaggccttctctaccaccaagtattcctgctattctgatgctgaaggtttggaagaaaaggagggagctcacatgaaccctgagatttacctctttgtgaaggctggaatcgatggagaaagcatcggcaactgtcctttctctcagcgcctcttcatgatcctctggctgaaaggagtcgtgttcaatgtcaccactgtggatctgaaaagaaagccagctgacctgcacaacctagcccccggcacgcacccgcccttcctgaccttcaacggggacgtgaagacagacgtcaataagatcgaggagttcctggaggagaccttgacccctgaaaagtaccccaaactggctgcaaaacaccgggaatccaacacagcgggcatcgacatcttttccaagttttctgcctacatcaaaaataccaagcagcagaacaatgctgctcttgaaagaggcctaaccaaggctctaaagaaattggatgactacctgaacacccctctaccagaggagattgacgccaacacttgtggggaagacaaggggtcccggcgcaagttcctggatggggatgagctgaccctggctgactgcaatctgttgcccaagctccatgtggtcaagattgtggccaagaaataccgcaactatgatatcccggctgagatgacaggcctgtggcggtacctcaagaacgcctatgcccgtgatgagttcaccaacacctgtgcagctgacagtgagatcgagttggcctacgctgatgtcgccaaacgcctcagccgatcctgagcacagccattttgccccatccccgctgcagaaggactcaaccactcccctaagactccagcttcatagactcctctgtatcactgccttgaggcgcactttttataatcaagcctcatcttgctggtatcatgggaactccagcctgctatctttcatgaaggtcagcaccatccctggcctcctcacataggaatctagcagaaatgatagacacagtccacctttcggccggccagcctgatctgggctcagcatgtttggggtcagtcagtgttggagagcccacatatgggattgccactagcttcttctgccaatatcaaaataccttctcagatgctttagaaacatgcaacaccaactccttttctaccctcctctccgtccatacctacaaggccaaggacaaacgccatcttcatccttcttagaaagagatctattaccccattaggggagacagagagagtgaatggaggagtaccgagctggctatggacttgggtgtctggcaaacacagcttcagtctcactacttctgacactctggttattgggcactaagggccagactggaaagtcacttgagacacattctcagtttgttgcagtgccaggaatgctgcgctgctgctgctgcgcacctggcccatgctgtccctggcttccatgccgtccaggccctgccagaaaaggaaattggcatgcaattctaaactgcagtgactgggatgggaggggaggggagcagtgttgatgccaaaatacccacggggtctaccagccatggggtttgcttgcttaggagtagttgtttcagaggtgattacaggcctgggtttgactgtgcttaccaatgagtggtttttgagctatgagaaagtggatgggagtgggaggaggagagatgggtgaagacaaaagagttctttatgagcctcgatgttccctggtaaacttttaaaaaggccttctctcatgatctaagtcttggactggtggcatcatgtaactgctaaccttacagtaaaaacccaagaatgggtcaaaaatgtcttcccagtttctccaagctgcttctggaatgcaggtctgtcggctgggtgctctccagcagctgctcctgcctgattcaactgtagcctgtaatgggtaaaagccacatttaggaggtggtctgatcatagaacaccttaggaagaaagtccatgagactttctgactaggaaaccatgtggtttgaacttgaagaaaaatgtagacccatctgggttaattttcctacaatctgactcaactgccaggtgaaaaaaaaaaggaaaaatttttaagctaatatttcactcttttgtcattctccttaagtttcatctcctaaaaagcttacccagcctgagcttggggacctgtgcagagg

SEQ ID NO: 1655 - DNA, 1801 bp, Homo sapiens
agccgaggcgccgagcaagatggcggcgcgagtgctgcgcgcccgcggagcggcctgggccggcggcctcctgcagcgggcggccccctgcagcctcctgcccaggctccggacatggacatcttccagcaacagatctcgagaagacagctggctaaaatccttatttgtccggaaagttgatccaagaaaagatgcccactccaatctcctagccaaaaaggaaacaagcaatctatacaaattacagttcaagaggtgttgccaaagattcacgaagataaacactacccttgtactttggtggggacttggaacacgtggtatggcgagcaggaccaagctggaatttttggaatttcgtaaggcaagaagtgacatgcttctctccaggaagaatcagctcctgttggagttcagtttctggaatgagcctgtgccaagatccggacctaatatatatgaactcaggtcttaccaactccgaccaggaaccatgattgaatggggcaattactgggctcgtgcaatccgcttcagacaggatggtaacgaagccgtcggaggattcttctctcagattgggcagctgtacatggtgcaccatctttgggcttacagggatcttcagaccagggaagacatacggaatgcagcatggcacaaacatggctgggaggaattggtatattacacagttccacttattcaggaaatggaatccagaatcatgatcccactgaagacctcgcccctccagtaaagctgtagagtttctatgtgcctacatacatttctgtgacaagtatttgtcgtaaattaattttaattgtgtatcaagtgaaaaagaaacactgaggttttaagctgctgtatatagcttgtgagaaacctcttttctttaaaatttacataatcacaagaaaggaaagaattacagttggactgattgtgacagtgccttgtcgtcctctttgaaacaccccgtgttgtccagtataccttataacacttagccacttctccccaccctccagaaggggtccacgttgaattctgaatcatcttgaaaataagattccaaccacaaaaaaaatttagccatttctttactaaaaaaacccaaaaaacaaatctgttttataatcacagatttttagacaaatttcttgtatcaggaagaaatacaaattttgtcatgtttctcaagcagtttttctgagtagtttctgaggaggaacaaattacaagtgtacccaataactgaaaatgttttaactcactctcatttgtaagcagtccacatagtagacaatgggttttccaagctgggcaaggtacatttaatcagtaaatcagtttcacatcatgtattgtgatgtttcaatgtgagacacaaaaacaatggcttgaaacttgtgtatcatatgtgattttgaaatgaacaccttgaatagcactaatttttatttgtggtatttttctataacaaaacaagtagctctaggaaaagaggttttattttgtaaacgatcatttgtgacctcagacactctctggctaatattttaataagctcacagcagataattctgagatcatgggtgaggggtggtgcatgttgagatttaaattggcataaagctgcatactttttgtctagctgtttgatttcattttttaatatagtatgccaattttgtgactgttaccatgtgaaagtcctgttgaaatgaacaattgtctgccccacaatcaagaatgtatgtgtaaagtgtgaataaatctcatatcaaatgtc

SEQ ID NO: 1656 - DNA, 2854 bp, Homo sapiens
acatgtgcatcagagagggcactggtggaagcaaacctcgtgcatcccacagagttacagccagcagcgctcaggctgtgtggctgccgcaagtgcccctgagccccctgagccccagtggctggcgacagccccgctccatgtcgccttcgtccaagatctgcgccgcggggcggccgccatctggagcacggctggccacggtcggccctaagctggtgggtgacactgcgtctgcgcacacttcgttgctcaaagccaactgtatgtgctgactgggtgtgccttctagtgtcctgtgttcctgctgagtgcctagcatgcatacttcctttgtgcgcccagtgttgtgtgcctgtcactgtgtgtccagtattgagttatgtgcatggtgttatgcaccaggcatggtgtgtctgactttgtttgcccagtgtcgcgtagccagcatctgtgtccagcctgtgttcttgccatgtgcctggccctgcatgcctagtgtggcacctggctgtgcatactccgcattgtatgccgggtttgtttgctcccgtctgtgagccttgcagtgtaatcctggagcgtatgccctgtgttgtttgccaactgtgtgtgcaggtactgtgtgtacctggcgctgtgtccctgcttgtttgtgcctagtgggcatgcccagtattgcatgcctggtgttgtgtacctggtcctgtgtgcccagtattgagatcccagagtgtctgcccggcctgggtgcctgcgttgtgtgtccggccctgtgtgctcaggtttgtgcatccagcttggtgggcccagagtgtgcctggcatacgggcttagtgctttctccctggcattttgtgcctggcatgtttgcccagcactgtgtgccctgcatggtgtcccagaggctgcgcctactatggtgtgtctggctttgtgtgtctggcattgcatgctcattgttgtatacttactgtgtgtgtccagcatggggcgcctgcattgttttcctggccctgtggttccagagttctgtttctgcactgcatgcctggtgttgtgtgggtggaattacatggctggtgtgtacatggctggtatgtgacccagcgttgtgagctcagtgtggtgctcctggagtgcctggcccggagtgcctgctggtgtgtgtgtggtatgtgtttggcatcatctgtctgaggttttgtgcatagtgttgtgttcccacagtgtgtgctggcattagtgcctggacttgtgtgtgcctggcattgcaccctggcttctgtgcccagcatggtgtgtcccagtgttttgtgccctacagtgaagctcagcattgcgtttggtgtgtgtgttcaacatgtgttacaagcatgggttcttgccgtgtgtgcattgtgtatgtgatgctgtgtccctagagtgtgtgtagcatctgtgcctggtgtgtgcccgatgttgtgttcctgcagcgtctggtgttgtccccagtgtgtgccagtgtgtattcccagtgggtgtgccagcttgtcggtcatggtatgcctgaccttgtatgcccagagttgtgtgtccagtgtgtccccagcttcagtgtctgtggctggagagtgtgtctttccttctgtgtctggtgttgtgacccagcatggtttgtgtggctgtgtatgcttggcaagcgtgcccactcctgtgtgcctggtgctgcgtgactggcacgtgtacctcgaattgtttggctgacagtgtgtgcccagaattttgtgcccactgtgtgggcctgtgttgtgtcctgtgctgtgtgctctgttgttagccctgtgtgtgtgctctgtgtgtcttgtgctgtgtgtcctatgctgtgtggcctgtgctgtgtcctgtgtggtgtgccgtgcactgtgtgccctgtagtgtgtgtcctgtgctgtgtcctgtgtggtgtgccatgtgctgtgtgtcttgtgctgtgtgtcctgtgctgtgcgccctgtgttgtgtacccagtacttctgtgtgtcctgggctgtgtgtccagcacatgtgtctgctgccccactgtgctgagtcccaacacccacctgtgcgcctggcactgcctcgttgttggggaggacaccctgtgtggccgtcctcgccacctgctcgagcagagctgaggatcccatcgtggcctctgccctcacttccaccgcagtttgccttccttcctggggacactcctgcctggcagctccccatgtttagcctgttccagggatcagcttccaccccaggcactctccatttatttggggagttcccacaggatgaggcccttaagggagtccctcctctctactggggatacccctgagcaggtggggactcctgtccttcattcagctcatccccagccctggctggagctttccctcctttgcggaggtgggctcaggcaggcctcgctggggagcccaccaggccctgtgcgtggggctctgcaggcccagccagtcctgactctgccgtgagccccgcaccaggatgggaagtgccctgagagctcatctcctaccacctccagggctggggctggcgcctcctccagcctggcatctggccgcggcggtctccccaagcagccaccagggggcagagccaccctctgtccacaccccgatcctccctcaccccttcaattgctggacaagggacccttgcctgaggacgccctcggatccctcctgtgagacaaggagctgcagataaccccaacctctacacagacagaaaggagcagatttcataaaaagcagggaatttttaaaatgtgagtaatttttaaaaatacaatctccgcgtaaaaccc

SEQ ID NO: 1657 - DNA, 2235 bp, Homo sapiens
caaagaaaagagatcactaagtgtaaaagatgcattttctcctcagcacaaagcagattccaggtgtatataattcaccattcagaaaaaaattccgtggcctgtcatgctggctcacgcctgtagtcccagcgctttgggaggccaaggcgggaagatcacttgagcccaggagttcgagaccggtctgggcagcatggcaagaccccctctctattaaaaaaaaaaaattagctgagtatggtggtacacacctgtggtcccagctacttgggagactgaggctggaggatcacttgagccactggcagcctgaacgacagaacaagactctgtctctaaaacacacacacacacacacacacacacacacacacagagagagagagagagagagagagaagcctggtccatgggagttgtggttacagaaggcaaagcttttaatataccaaagatctaaagttaagcagaagtactccataagccttaccaattggctagcttgtataagcacccagtcttttctgaagtgctgctacctctcaataggaagcaatatcggggtccttccaaggtatcactgaagtattaggacaatgccacaagcctttggagccaatgttacaggcaccagaaccaatcagtgagttaaagttaaagtgaggagctcaaaagagaggaatgagtgcgaaatgtaattgacaatatgtttttgccattttcttcctactgtaaaaatagaaagtccatcccattaatccagagttaattaatatccagagctggtttacaggatattgacatgttctggcatacattaggaatttacacagaatagtaatgactattcaaaaatggggtagttatttaggcagacgactttatcaactaattgtgaaggtagcatattatactatgaagatgaatctctacaatgcagtggctatcaggattgcattaatcatgcaagtatgggcctgattcttatggagaacatttccaaagtgaaaatcctcagaaatagatccgtgacaaggaacaagacaaggatgcccattctcaccacttctattcaatatagtattggaggtccttgctagagcaattgggtaagacaaatgaatggcatccaaattggaggggaagaggtaacattgtctctgcagatgacatgatcgtatattaaaagaaaccccaaagactccaccaaaaagctgttagagctaatagatttagttaagttgtggaatacaaaatcatcataccaaaagtagtaacatttctatacactaacaacaaactatcccccaaagaaatcgaaacaataatcccatttataatagcatcagcaaaaataatatacttaggaataaatttaatcaaggaggtgaaggacttgtgcatagaaaactataaaatattgatgaaataaattgaagaagacacaaataaatggaatgatattctgtgttcatgaattggaagaattaatatgtttaaattaattattacctgacgttacctacagagcaatgcaatctccatcaaaattctgatgacattttttacagaaatagaaaaaacaatcctgaaattcatatgaagccacaaaggatcatgaatagccagggcaatcttgggcaagaggaacaaagctggaggcatctcactacctaaattccaaatatactgtaaagctgtagcgatcaaaatggcatggtactggcacaacaatagacatatagaccaacggatcagaatagggaacccagaaatgagtccacacatttatggtcaattgatcttaaacagaggtggcatgtatgcacactggggataggacaatctcttcaataaatggttttgggaagactgcatatccacatgcagaagaatgaaatcggacctttatcttagaccacctcaaaatagattaaagacttaaactggccaggcatggtggctcacgcctgtaatcccggcactctgggaggccgaggcgggtggattacctgaggtcaggagtccgagaccggcctggccaacatggtgaaaccccgtctctattaaggatgcacaagattggccgggtgtggtggtggacacctgtggttccagctgctcggggggctgaggtgggagaatctcttggacccgggaggcggaggttgcagtgagctgagatcgggccattgcactccagcctgggcaacaagaacgaaactccatctc

SEQ ID NO: 1658 - DNA, 2432 bp, Homo sapiens
aatgagtgctctcgcggagagcgacggggcaggccaatatggcttcctgcacctggtgacgcttggcgaaactgaggtctcatggagaagccccggagtattgaggagaccccatcttcagaaccaatggaggaagaggaagatgacgacttggagctgtttggtggctatgatagtttccggagttataacagcagtgtgggcagtgagagcagctcctatctggaggagtcaagtgaagcagaaaatgaggatcgggaagcaggggaactgccgacctccccgctgcatttgctcagccctgggactcctcgctccttggatggcagtggttctgagccaggtggccatatcgggtgagtcatgtgctaagttctcttcccagctgtctgtgagatgtgtggtatcgtgggtacaagggaagccttcttctccaagaccaagaggttctgcagcgtctcctgctccaggagctactcctccaactccaagaaagccagtatcttggctagattacagggaaaaccaccgaccaaaaaagccaaagtcctgcacaaggctgcctggtctgccaaaattggagccttcctccactctcaagggacaggacagctggcagatgggacaccaacaggacaagacgctctggtcttgggcttcgactgggggaagttcctgaaggatcacagttacaaggctgctcccgtcagctgtttcaagcacgtcccactctatgaccagtgggaggatgtgatgaaagggatgaaggtggaggtgctcaacagtgatgctgtgctccccagccgggtgtactggatcgcctctgtcatccagacagcagggtatcgggtgctgcttcggtatgaaggctttgaaaatgacgccagccatgacttctggtgcaacctgggaacagtggatgtccaccccattggctggtgtgccatcaacagcaagatcctagtgcccccacggaccatccatgccaagttcaccgactggaagggctacctcatgaaacggctggtgggctccaggacgcttcccgtggatttccacatcaagatggtggagagcatgaagtacccctttaggcagggcatgcggctggaagtggtggacaagtcccaggtgtcacgcactcgcatggctgtggtggacacagtaatcgggggtcgcctacggctcctctacgaggatggtgacagtgacgacgacttctggtgccacatgtggagccccctgatccacccagtgggttggtcacgacgtgtgggccacggcatcaagatgtcagagaggcgaagtgacatggcccatcaccccaccttccggaagatctactgtgatgccgttccttacctcttcaagaaggtacgagcagtctacacagaaggcggttggtttgaggaagggatgaagctggaggccattgaccccctgaatctgggcaacatctgcgtggcaactgtctgtaaggttctcctggatggatacctgatgatctgtgtggacggggggccctccacagatggcttggactggttctgctaccatgcctcttcccacgccatcttcccggccaccttctgtcagaagaatgacattgagctcacaccgccaaaaggttatgaggcacagactttcaactgggagaactacttggagaagaccaagtcgaaagccgctccatcgagactctttaacatggattgcccaaaccatggcttcaaggtgggcatgaagctggaggccgtggacctgatggagccccggctcatctgtgtggccacggtgaaacgagtggtgcatcggctcctcagcatccactttgacggctgggacagcgagtacgaccagtgggtggactgcgagtccccagacatctaccccgtcggctggtgtgagctcaccggctaccagctccagcctcctgtggccgcaggtgtgggctctcgtggccctaagaggctctgactttctttcctcttcttttttccttcttcccccgcccctgtgcccatctccgttctttggcatgaggtggagatgtctcatggaccactttaagtagagagtgagccccgtcacccagcccctgctcctgacttctctgtctccctttccctctggcctgcagagctccttccttcatcttgcccactctgtcatatgttcgtgcccttgtgcacccaggtaaactacccaggtccctctgagcagccctggtaacaagggtgggaagaagggacagctgttctccggcccctcctccagccccgccctctcctcattgcccaggtttggcttcctgtcttggggtgtctcgtgtgggagggtggatggggtctcgggatgcgcctgtgccctgtgtcctcccagggaccctcttctcatctctttcacccttgtctttcaacaacagaaccggc

SEQ ID NO: 1659 - DNA, 2944 bp, Homo sapiens
actcctgtgggttcggcgaccatcgcgcggcggccatgggggcgcggctgggccggcgggccgggcccgaggctggctctgaggccggggcggcggccggctgcgggcccgcgccctacgaacgccgggtgcggtggctccgcgagatccagtccacgctccgcgagcggcggccggagcgcgcccggcagctgctgcgcctcctgcgccaggcgagagaaggagccgtccgcccctgggctggcggccagggagggtctgggggtctgggggtctgggaggcgcggggctatgggttgtgggcctgtatccgccgggaggcgaggcggagctggtctctggcgcgcgcaggcgggttccgagggcgcgacaggctgcagcacgcggggtcttgcgtgggcgagagggcgaccgcctggagtgagggctgggtgaggtcggcggaccgtgtggaggagggggctgctgagtgtgtccgggtctttggggtttgagaggggttgtgtgtgttgagggtggcccggtagcctggacctaagagcccaaattcaggccctggcaagatgggaggggcccgggaggagtggcaagtgaggtcaaatcatcttgtattgagagacaatggaagagggtaacttccccctcctccaggatccgggagacagtggaccctggagagaggacccagggctggtctagggatgcagcctcaccccaagacaccatggcagcccacagagagccatccatgcatcaccagttctccaacaggcggctcatgcccttagagtacacatccccagcatctgtgcatcacaacactcggtccggtggtggctctgctcctacacacaccaggacctgggccttgagaggaccctccttcctgatatcctctacagagatgtggccttcctcaacccggtcgaccccatctcccatgacctgcttgtgaacctggcccgggacctgcagtgccccaagaaggtctccatcctgtacagacacccttgcggacgggtgctcactgctttcccctacaacagctggggtcataagcaaggccctcctccttgctggggtggagtttgccacctgcagcctccaccccacagctgcccagaaccccatgctgacagcacctgcagatgtcctgccatgagcatcgacacagccccaggatgtgtggctgtgaccagccaccggacccagactcctagtcacagtgagtccccaaccaaaaccagggtatccgctctgggccctgccagctctgaatgcccaggtctctgcacagtcggcccctaggactctgcgcctagcccacggccatcacaggaacagccagggcttgcagctgctgtgtgtgctgcctgctcctggggctgctcacagagggactggataaaggatgcagtggagcatgctcagtgccagctttgtgggccgcgcacctcggattccaccctgagctgggcctctgccggagcccagttaggactgagagagagccaggtggtggtgctgtaaaacattacatcccccagccctgtcagcccagacccagaccccgcaggcgcagtctcgcttggagagtgagaggaagaagaacacgctgacctggcttgttcctactccctgggattggcgtcagtggagcacggctccctcgaggggcctggtctggcctcctccccctgtggcaagtccccgaagggtgctgagggtgggcaggcagccggctgatagcccgagacgctggccctgggcccgaggacagggaacaagggctcattgtctgggcttcctcccgccgggcactgcgggactggaccagcctgtccagctcccagagggcagcctcccctggctctgtgccaggccacagccgggttggggggtaggagggggaggccctggtgggcaactcggtgatgcatggtgcatgactgtgctcacacacacacttggctgcctgggtccctctccccaaggccctgaggtgggcaggaggggctcagattcaccatggtgacactgccctcccacaggactatgagctctggaagtcctcggacaagatctgccgacagctcatctaccacctcacccctcactcgaagcagcagcaagggtccagcctgcgccagaggaagacccagagctgcctcaagagcagcctccagaagactctgctggcaggggagactgtggacctctcaggcatcccgctgtcgacacaggacgtgcaacacatcacacgctacctgagcagccatggtgctgtgctggcggtgctggacctgagcttcacggggctgagtgatgagctgctgcacctcctgctgcccagcctgtgggcgctgccccgcctcacccagctcctgctcaacggcaaccgactgacgcgggccactgcccgcaagctcactgatgccatcaaggacaccaccaagttccctgctttggcttgggtggacctgggcaacaacgtggatgtggcttccctgccccagcccctgctggtcggcctgcgccggcggctgagccagcgcacctcactccccaccatctacgagggcctggaccttgagcctgagggcagtgcggccggggccaccacccctgcctccacctgggactccacagctgctgggctgggacccgagccccaggcctgctgtgccaggtgacccaccacccacctggctcattgctactgacttgtgatgctctcaagcacatgatagtgggcgatgaaggtcaaggaggactcacaggcccccagaaatccagtgtaaatgctcagcctgagattaaggggacagaagaatggactcataggtggccaggtggccagccctggctagaggctcagccttccctcagtgggaggggccccagcacccacagtgtggaccccgcaataaagagtgacacccgc

SEQ ID NO: 1660 - DNA, 1837 bp, Homo sapiens
agcccagagaaaaacaacagaggtttgcggcagaagtggccaatgtcgggcccagagtccatgctcaaggctggaagcccatcctggatgtgctgcactcggcagtcctagtgtaattctgcagggcccggcccctgccagggtctgagctctccagcctgtggcatctactcccctccaagcccaccccagtgtctcaattggagagacaggccctcatggtccccactctggcccagccccctctgcacacagctggccgagctctgggcctctccatgctgtggccctggtgatggcagagccttgggatgtctctgtccatgtggtcacaggacatgtgtgtggcagcagggccatggtggggtgggatgctgttccaaggcccagaaccattctgtaagaaaccagcacagcgctgcaagaaagggggtcctaggggacacaggccacacaggtgtgctttgaaaaatggcaattaaggtcaaagagcaggaagtccacaggacgggccaaggccaaggctcccgctggccatggggaagccacctccagggcagtcccagggactgaattggaagttgtcccaagtcacttcaggtccaactgggacagcagaggtaacccccctgcaccctcatggggcagcttctttgggtcctaaatgtggactcagaggtggaaacggtctgtgtccccaggtcctgcagacattcgctttgtctgggagaagaatgggcgagctctggagacctgtgtccctgtgcagacccatgcactgcccgatggcagggcccatgcactcagctggctgcaggacgccatcagggaaagcgctgagtatcgctgctctgtcctctcctcagcagggaacaagacttcgaaggtgcaggttgctgtgatgagacctgaagtgacccaccaggagaggtggaccagagagctctctgcctggagggctgtggctggggagcacgaccggatgatgcagagctggaggaaggcgtgggaaagctgtagcaaggacaccctgtagccaccaggaaggagtccctgacaccgacctcaaccccaacaagaccctgctgccactgaccacagccacccccggagaaggcctggtcccccacaactgtgaactgtcttgcccaagcctgctctgaacacagccattgggccaccacctgatgggcagaggcgggacagtggagaagcctggaacccaagtgggcctgtgacaggaactaagacttaaaaaattaggtgcttacctgggacagtaagttctgtctggcacaagcaggtaaccaggatggctaacaggctttgatagctgctcgtgaactaaaacagcagggtgtgtgcaggttcctcctctacggtcaggcagcaggctctgaaggctgatcctacaccgtcccagtgactccccttgacagagtgcccccaccccctaatagccaacagggttagcatggccagcacagatcgctgcttttattgatgcaaatcaagcctgctgcttctcctccctgcagacttagccaaggaactccaagatgcatgactgggacaagaaaaggtgagactccacatggaaatgccttgccctaaaccttgaatgactgtgagatgcgatctgggagtgcatctgtcaagtctttgtgttttcttcactaacctcagaatactgggctctattttatcaagcgctgcagtttatgcctctgtcccgtcaatgctcagcttctgcaacaggacaccaaacttgatgcagaaagccaaataggtcaattatgcaaatctcctggtgccatattaaatttcttgacaatgg

SEQ ID NO: 1661 - DNA, 2212 bp, Homo sapiens
agttggccttcagcccctgcctcggccagaggtttcatttttaactgaatatttacgaaagctgaaagcgtgcgaggggggtggggtggaaatagcggctgcttcttttccaaggatttatttaatggggatgtgttcaaggcaagaccgaattcagaaggatatcgacgtcgtgatccagaagtccagagctgaggactgcctgtttgcagggctcttcaaaggcctaaaagctaaaggcgaggatggattaattcaacaagtcctagtcgtgcgccctggtgagtgccagaccctgctccccgcgaggggacccatgagccaccctcaccacgatccctgccctggtggagcccccgtgcgggacacaggatccgaagatggcagcggaagttcctcagcggcctcaaaagtgactgggcagagtgggcacaggctccctcactgggtgaaggaggcgcaaagaacgggaagagccatcccgggagcccaccggcctttcagtttcccttgggcccccaggcggttcaggtatgtgtcggggccggggcgtttccggcagcttttgatgaaggcgaggggcaaggtcgtcctggttccagaatctcccaacctgcggatctccaatgagactaacacgattcaccactctaatctcttcagttttccaaagccttgcacagttgtactgtctggtgggctctgaggttgggacggttgggggagtgtttggtgagtgcacccttcctatagtgcccagaagaaggtacaatacctgtctctgtggcacaatcggttagcgcgttcggctgttaatctagaggttggtggttagagcccactgagggatgcctcctccagatttttttttttttttttctgagacagagtcttgctctgtcgccaggctggagtgcagtggcgcgatctcggctcactgcaacatccgcctccctggttcaagcgattcccctgcctcagtctcccgagtagctgagaatacaggcgagcgccaccccgcccggctaatgttttgtattttagtagagacagaggtttcaccttattggccaggatggtctcgatcagctgacctcgtgatccacccgccttggcctcccaaagtgctgggattacaggtgtaagcaaccgcgccctgcccggctgcctgcttcagcttttaaagcgttcatgcattatcaatcactagataaacggcggagattatatcttcccagagtcctaagccactagggttgtgtctctgtggcacaatcagttgtcgcatccaaaaggcctagctaacttttgtattttttgtagagaaagggtttcattatgttgcccatgctggtccccaaactcctgggctcgggcacctccgaggtctcccaaagtgctaggattacaggcatgagccactgcacagggccttatacaatgcttctaatttcagcacatttagcaaacttatcttctgcgggagaggtaccaaatcacattccagtttatttctcaactctaataatgtccctttcttcatttacttgctgacacaacaaattttctcccctcccgtactttttgttttgagactaggtgtcactctatcacccaagatggagtgcagtggcatgatctcatgtcactgcaaactcaccgcccctgcaaccatggcactagtgatcctccagaagagctggaactacagagaggacatcttgctgtgttttccaggctggacctgaatgaactcctgggctcaatcaatccttccacctcagcctaacatttacactgggagcagagatgcatttggacatataaactgttaacatgaggtaagcgccaaggtctagagaaggcagtggaagagatggcaaactccggcaccatgtctgcgtgtccagtgtgctctgctggagcagcacatttttgtacattgctgtatttgaaaaaaccctgcaagaatcatgaaactggacgaccatctttataacactcccagtgataaaacaagtaagaatggctggtttgtagtcatctgagcagcctctctagtttcgtagatatggtttctctctgatatcgaacgacttccaatgtcaagcggaatgctacatcacaaggataaccgtatgtgaaaagaaccagttttctttgtaatcctgaactttctagtttgcgcattaaaagacattatttgaagaag

SEQ ID NO: 1662 - DNA, 1987 bp, Homo sapiens
gaagctgagcagggcggcggcggcggtggaacctgcggggctggggcgcgcgccatgggccgcctgcactgcactgaggacccggtgccggaggccgtgggcggcgacatgcagcagctgaaccagctgggcgcgcaggctgcaggtgccaaccaaggcagtcttggaggcatcctgcttctgtgctggttgggatgccttttcataccaccaaggctgctgaaatagttctcagccctgacagaggtgcttttccacttcctaactgagccaaaagaggtggaaagatttctggctcagctctctgaatttgccaccaccaatcagatcagtcttggctccctcagaagcatcgtgaaaagcctccttctggttccaaatggtgctttgaagaagagtctcacagccaagcaggtccaggcggatttcataactctgggtcttagtgaggagaaagccacttacttttctgaaaagtggaagcagaatgctcccacccttgctcgatgggccataggtcagactctgatgattaaccagctcatagatatggagtggaaatttggagtgacatctgggagcagcgaattggagaaagtgggaagtatatttttacaactaaagttggtggttaagaaaggaaatcaaaccgaaaatgtgtatataggtgagtctgaattcccacttgagcctcttcaccttttttgtgttctctgcaatcaggggctggtgacgctcaccacaaatcatgtcttctataaaaacagtcattgccagctgtggagtagctgttccactgcctttcctctcctgaaagatggcacaaggagtgttagaaagccactggcaggttggagcccccacagttgaagagccgttttgaaaaagggaaagggtgggaacggaatggctgggattgaagaagaaggttgacgagcaagaagctcttgccatagaagtcacattgaacatcccgaatgataccctttcatctctttgtgccatggagctgtgccatttgaacactcactccccttttttttcctttggagcagagaaccttctgcattcaagtctctcagttctttattatgatcagttacccatcaagagctgcttagatgtattaagccaaaaaagaaaaaaaaaatcctccgggtggaaattaattttcttggatgattctgtggagttggaaacatttatctgaagctgaattttctctccccagaattaaccttgcctcagttctacagcttcctgcacgagatggagcgagtcagaaccagcatggagtgtttctgctgatttctgtccctgcatctcccctagccccgttccctgccctcctcccttccctgggtgactgctctgagaggcacttcactcacaggcctgtgggatgctccatggggccctgctggctccatggggcccaggtgcaaagggtttctgaaaaacagcaggattaagtactgaaagagcccaacacaattaccctgtaaactctctgttagggcaaccaccaccacctgtcttccaggacacatttttagatactctgacaggccactgcatctcagattcaggggagaaaataagttgtcacctccccttcaaagttccagagtaaacaaatggtgccatcattcaagataacatgctgatcaccctcctcccaaaaagcaagagcttgtttatggctgaggaatcggcggattgtctgaatgacacatatacagagcccccacggatttctgcacactctgggtctgtgctggtggaacattgccaatcagttcttaatgaggcacctgtgtgtaaatacatgcttggtcttctctgcagagaactgaggctaaactctgtccctacttctggttttgccctgtcatgtcgtaacgaggtgggccttttgaggccattttagtttgagttcgagccaaccacctctgttggttagatgatgaataaaaaggttctgaag

SEQ ID NO: 1663 - DNA, 2627 bp, Homo sapiens
ttccatggaacggcctgtgaggtgtgtgagctgggccgctacgggcccaactgcaccggaggtgaggactggggaggggcgggggtgggcctcctggcagcagagagcagcctggagaccccagccgggacaggatggaggcactgggcaactcctatcctcctttataccactgcagtgtgtgactgtgcccatgggctgtgccaggaggggctgcaaggggacggaagctgtgtctgtaacgtgggctggcagggcctccgctgtgaccagaaaatcaccagccctcagtgccctaggaagtgcgaccccaatgccaagactcggccggagcctccacctgcgcctgtgctgcgggatactccggcaatggcatcttctgttcaggtccagccacacggatgcccagggccctccctgaaattttggggtggctgtccccacagagcccccttcacttcctctaggcccagcccccctcactgtcccatctcaggactcacccttccctctgaccttttcctttctctcacgccctcctctcctgtcctgcctccggccccgtgcctgctcctgaggactctctggccatctccccttagaggtggacccctgcgcccacggccatgggggctgctcccctcatgccaactgtaccaagatggcacctgggcagcggacatgcacctgccaggatggctacatgggcgacggggagctgtgccaggaaattaacagctgtctcatccaccacgggggctgccacattcacgccgagtgcatccccactggcccccagcaggtctcctgcagctgccgtgagggttacagcggggatggcatccggacctgcgagctcctggacccctgctctaagaacaatggaggatgcagcccatatgccacctgcaaaagcacaggggatggccagaggacatgtacctgcgacacagcccacaccgtgggggacggcctcacctgccgtgcccgagtcggcctggtaatgatgcccaagtcagacccctgatctggtcttggctgtgccccatgggcctgacccatggtcttggcaaagatccgatttgatcctgattctggccctgaccatgacactgagcctgacccctgattgtacctgggcctgaccccagctatgacccatgaaactagccctgaccccaactcagaccccgcggctttcctttcctcatgtctgccttggctagaccttgggccgcaggtgctgggacaggcaccaggccctgaatgggggccgccccaaatctgagctgaccctcgcccccccaggagctcctgagggataagcatgcctcattcttcagcctccgcctcctggtgagtggccagcttgggcctctgtgacctgcaagtcccacccctctctggacttctgtccccatctggtcagggggttggctggtttgttctctctgagtccaggtcttccccaggagatccatggacgcctcaggcttctcccattccactcatgctgttgctgcctcccgcaggaatataaggagctcaagggcgatgggcctttcaccatcttcgtgccgcacgcagatctaatgagcaacctgtcgcaggatgagctggcccggattcgtgcgcatcgccagctggtgtttcgctaccacgtggttggctgtcggcggctgcggagcgaggacctgctggagcaggggtacgccacggccctctcagggcacccactgcgcttcagcgagagggagggcagcatatacctcaatgacttcgcgcgcgtggtgagcagcgaccatgaggccgtgaacggcatcctgcacttcattgaccgtgtcctgctgccccccgaggcgctgcactgggagcctgatgatgctcccatcccgaggagaaatgtcaccgccgccgcccagggcttcggttacaagatcttcagcggcctcctgaaggtactgctcccgtgtgggcctgtcattgtggacacacatgcacgtgtgtgtgcaagtgtgtatgcgtacctgtgtgtgcatacccacctgtgtgcacactgtcccgtgtgagcctgtgtgaactcatgtgtgcacaggccacatctgtgtgcatgtgcaccccaggttgagcacatgggtgtgcttatgtgtgcccacattcctgacagcagtgtgcacagttgagatgtgtgcacacacatgcctgcctgggatggtcacagatgagtgtgggtgagtgtggagccccttcctgctctgtggcacagccccctgcctttgctaactagtctctgactgggcagcgactgccacatctttgctgcaccccaccaggtggccggcctcctgcccctgcttcgagaggcatcccataggcccttcacaatgctgtggcccacagacgccgcctttcgagctctgcctccggatcgccaggcctggctgtaccatgaggaccaccgtgacaagctagcagccattctgcggggccacatgattcgcaatgtcgaggccttggcatctgacctgcccaacctgggcccacttcgaaccatggatggggcaggaggggctgagggcctgtcccagacaataaaggtgccctcagcggatgtgggccatgtcacc

SEQ ID NO: 1664 - DNA, 3376 bp, Homo sapiens
aactccgcaagcaaatgaaaaacatcctggaattgtgaattcccctgtggcaagtggttatcgttcgtggtggcagtctgctgttacgagcataataggatgaatatggactttgacgtcagatggagctgacttggaatcctggctctgccagctgactggcagaggggttgtggctgtttacataaaggaatcctggtgctccacggaagatgcactaagaacctctgatcctgcaagagaagggttgatgaaggttcagtcgtttggggaaagggttgtgcttttcattctcaacgccattatttttggaagattggagagaaatttggatgatgatgacatgttttttctacctcactctgtgaaggaacaagctaaaatcctgtggagacgtggagcggctgttgggttttacacaaccaagatgaaaggcagactgtgtggtgatggcaccggtgcatgctacctgctgcctgtctttgacaccgtgttcatcaggaggaaacactggcaccgaggcttgggaacagccatgctgcgggacttctgtgagacattcccagaggacgaggccctgggggttagctgcccgatgcctcctgccatgtaccaagcacacccaggaaattccgaggacgtgagccgtcatgcgaggacttctcagaatgacagacccagacagcctgcccctggagacggcagcaaggagaggatgtgtggagaagaactggaagacacaaaggatgatccagagtgtggagtggaagaggaggatgccgggctggcagggcagccaccaggcaagcttacaaggtccagtccctgacgtctccagacgcccatctgggccaggtccagaggcctgcctgggctcccaggattcgggtctgagacttgtgtgtctgggagtgtaccttccctggggatctttgaggggccagtgaccccacgggccccacctacctctgaggtgggctcaggctctagagtacctgagaacgtgctgcgctcagcatgcgacaccgtgccacagtgaggaagtatttccctaagttaatcgttgacagttcctaaacgtttcagaagcttactcgttaaaactaatgtggtttctgtttctcaggataaattggtgggactttaccggaaccacagggatgttttactgaatgtacctctttccttatagaagtttaaagatgctcaggaaggggccacacccgttccatctgggctgtagaaacccattgcaggtttgtgcatgccagccctgctgttgccgtgagaccacggacaccaaagaggtttgcaggggtacacgtgtcctttccggacaccaaagaggtttgcaggggtacacgtgtcctttcccgggaggcttcagccacatcagtgctgatgtgcctcaaggcacatgagtgccttgagggcaggggcagtggctggatggtgcctactgtaggcctggagctctcttctggcctggtatacagaaggcactcagagagctcatatgggaagtactgggtaggaatttgggcagatggtgcttctagaatattggtggccttgagtggaaagtcttgtggtagtaaaagtaactgaaaatgatagcctggctcgaatgtgacattggcttcccccttctcaaatactgatggagccctgtttggtcgctatagtgtatggccgctcttgggatgcagagacaaggacctgctcttaggccccaggtccaatgggctaggcagagttgtcccagggccgcctgccctcctcaagggtggggcgcaaatccaggctgctttagggagcccaaagcctgctccccgagaggtggggtggtgctttctctgctattgggcccagccttgctgatttcagtaggatttttcccagagaaagctggtcaggccctcttgaggcagacgacccaagttcttgcccctgcttttgggaaaatgcaaatccaatcccattgccgaggacatcccaaacccctctgtgctcatcactgactttggagaagccaggggccctgctgcctctgctccttgccattggagttcagctgcaggatcagccctgggctgcctggttactttgttgacagaagaagagggttttacctttttaggatgtaataaagcccctcctgtggcctgatgaggagactaccaacagtcccaagttctgggaatatatcgtctgttcccttgagcagtcaaaggacacacatggtgggacctgttatttattcatccatgcacccagctgtccatctctctgtccatccatccgtctatccatccatcatccatccatccacctaaccatccatctattcaatccattcatcatccatctatccatccctccatccatccattcatccatctatccatccatcatccgtccatcctccatccatcatccatccatccatcctccatccatcatccatccatccatccatccatccatccatcctccatccatcttccatccatccatcctccatccatccatctatccatccatccacccatccatccatccatccacccatccatcatccatccatccatcctccatcttccatccatccatccatccatccatccttcatccagccatccatctatccatacatttatcatccatccatccatcatccatccgtccatcctccatccatccattcatcctctatccatccatcatccatccatccatccatccacccatccttcatccatccatcatccatccatccatccatccatccatccatccatccacccatcctccatccatccatccatccatcctccatccgtcatccatccatccatccatccatccatccatccatccatccattctgttgtacaacagatattcagcatgctttctcagggacatgctctgtgccggggacaggggatataagtgaggtatggatactggcctcaggaaactctcttctctttggaggaatctcttctggagtgttccactggagttttcatctctcttgcacccattacaaagatggaagggtccaattgactagaaatatagtttagagattcatatggagacatcatgaagcctgcctcccccctgccccttatacttgggctctctgtgcaggtggcacagaccataaaaggagagtgaagtctacagcctagagggtgccctgtgtgtggtgtcagatgtaacctttcacatgggatgtgtgtgctgtgagcattgtgctatttgagatgaatggttagtattttgtgtttacatgaaaataaatgtttaaaaatgtctcaggggtttgatgaagttactattcaataaaagaaacctctcagggaag

SEQ ID NO: 1665 - DNA, 1960 bp, Homo sapiens
ataaagaaaaaggtaggcttcagtaaaatgcacataaattaaaatttctatacagcccccttccttaaaggaatttaaatgtggacagattggaggggaaaggtttgcagcaaaaatcataagtagaaggaaacagaatggttaagtacacagtgtagtagccatttaggaaagttataagccatttaaatgccatgtataaagtgtttttgataagaaaaaatcaaagtgtaaaggagaatacaaaattatatgtgtactgcggtcacatctgtattgttctgtgtatggaaaacagactggggagaaatagctttaagtcctaatagtaattttctttttctctcttcttttttctgctttctcttttccctgtctccctcaatattgcatatctttcccattaaaaagtattgtattatatatctaccaacaagacatttgtttcagattttttggttttgtcttcaaggaacattcttctgcatacaacttcatacttttaaaattctctggcctggctcagtggctcatgcctgtaatcccagcactttgggaggccgagttgggtggattgcttgaggccaggagtttgagaccagcctggccaacatggtgaaacccggtctctaccaaaaataccaaaaaaaatagccaggtgtggtggtgtgtgcctgtattcctagctactttgatggctgaggcacaagagtcgcttgggcccgggaggcagaggttgcagtgagctgtgatcacctcactgcacgctagcctgggcaacagattgagacttgtctcaaaaaataaaaataaaaaattattggccgggcgtggtggctcacgcctgtaatcccagcactttgggaggccgaggagggccgatcacctgaggtcaggagtttgataccagcctgaccaacatggagaaaccccatctctactaaaaataccaaattagccaggcgtggtggcacatgcctgtaatcccagctactcgggaggctgaggcaggagaatcgcttgaatccaggaggaggaggttgcagtgagccgagatcgcaccactgcactccagcctgggcaacaagagtaaaactccatctcaaaaaaaaaaaaaaaaaaaatctttactttggataagtacttagaaatggaatttccaggtcagccactagatattattaatggatttaatacgaaaaacatttacttgaggaaatataaagctttaaaagacagggtccctattctttagttataaataaagcagcatttgtaaggtaatattcagaaaacatcagataatatcatataaagtcctcctgttcatgctgatgacattggatggccagttaaggatgacacttcattctgtcccctgcaaccacggtcctgtcatgtctaaatgatactgaccctatgagaatgctgtggatgtgaaagcatttcttcaagttagctttttggcctgctggttttaatctaatgatgggatatccaaagtgaaactaatggagtgaaatgattgtgcatctgttgggaatcagagacagctagagcaagggcagacatgtgctgaactcatctctcctaagagccaaagcaagcagcaatgttgctagcagggctactgcacatctgtacacgtggctccaatggttctgacttgtttttttcctagtatgaccctaatacagggggcaagttagaaaatcagagttgcccgggcatggtggctcacgcctgtaatcccagtactttgggagccaaggtgggtggatcacttgaggccaggagttcgagaccagcctcagcaacacagtgaaaccccgtctctactaaaaatacaaaaattagttcggcatggtggcaggcgcctgtaatcccagctaaaggaggctgaggttgcagtgagctgagatcaggcacttcagcctgggcgacagagcgagactgcttc

SEQ ID NO: 1666 - DNA, 1908 bp, Homo sapiens
taaatgagaaatatatattttctttttgtttatttcatagagacagggtcttgctatgttgcccaggctggtttcaaatgcctgaggcaggagaatcgcttgaacctgggaggcggaggttgcagtgagccgagatcgcgccattgcacttcagcctgggcaacaagaacgaaactccgcctcaaaaaaaaaaaaaaaaaaaaaaaagccgtgggtcaggagccagagccctctgctctagtcttagctgtgccaatgtgactccctgtgtgatttgggggtaaattactgcccctcactgggtctctgtctacccacctgcaaaatgagaggatctttggatgagtctccttaattcatttcctggacaaacttcctccaaggctcccccagatttaccagtgacgcccttccctaagtatcaacttagccgtactttgaactctggcccctcaggtttcaaggggacggccttgtctgggatcagctctgtctggggaaagaagctgcaccagcctctggatagcaggctgagtcacttgtttcttgtgccttgagtcagttctctcatcagctctcctcctaggccagtgttattacctccagtaaagatggaaaagttggggttcagagagggctagagacagacagcctgctgtgtcctgtcttttctcctgtgctgtacaggttcaccaatttttaaaatccaaatatatctcatggtacagtggaagaactggccagagagtctggaagtttgggttctggtcctggctgtgccactgactcactgtgaccttgggatcttgtgctgtgaagacatttcccaagtgcttcatgttagccagcaaatctgacccacaaggcctggaaagaggtgattgttaggttgcgcagaggtggtcttatccagctcagcttcccctgggacccaccgtgggacctgaggcagaactggggtggacttggcctcctccatggcacaccggctgcagatacgactgctgacgtgggatgtgaaggacacgctgctcaggctccgccaccccttaggggaggcctatgccaccaaggcccgggcccatgggctggaggtggagccctcagccctggaacaaggcttcaggcaggcatacagggctcagagccacagcttccccaactacggcctgagccacggcctaacctcccgccagtggtggctggatgtggtcctgcagaccttccacctggcgggtgtccaggatgctcaggctgtagcccccatcgctgaacagctttataaagacttcagccacccctgcacctggcaggtgttggatggggctgaggacaccctgagggagtgccgcacacggggtctgagactggcagtgatctccaactttgaccgacggctagagggcatcctggggggccttggcctgcgtgaacacttcgactttgtgctgacctccgaggctgctggctggcccaagccggacccccgcattttccaggaggccttgcggcttgctcatatggaaccagtagcggcagcccatgttggggataattacctctgcgattaccaggggcctcgggctgtgggcatgcacagcttcctggtggttggcccacaggcactggaccccgtggtcagggattctgtacctaaagaacacatcctcccctctctggcccatctcctgcctgcccttgactgcctagagggctcaactccagggctttgaggccagtgagggaagtggctgggccctaggccatggagaaaaccttaaacaaaccctggagacagggagccccttctttctccacagctctggacctttccccctctccctgcggcctttgtcacctactgtgataataaagcagtgagtgctgagctctcacccttcccccact

SEQ ID NO: 1667 - DNA, 2750 bp, Homo sapiens
agttgttactcaggtgcgctagcctgcggagcccgtccgtgctgttctgcggcaaggcctttcccagtgtccccacgcggaaggcaactgcctgagaggcgcggcgtcgcaccgcccagagctgaggaagccggcgccagttcgcggggctccgggccgccactcagagctatgagctacggccgcccccctcccgatgtggagggtatgacctccctcaaggtggacaacctgacctaccgcacctcgcccgacacgctgaggcgcgtcttcgagaagtacgggcgcgtcggcgacgtgtacatcccgcgggatcgctacaccaaggagtcccgcggcttcgccttcgttcgctttcacgacaagcgcgacgctgaggacgctacggacgccggagccgcagccctaggcggcgtcgccgcagccgatcccggagtcggagccgttccaggtctcgcagccgatctcgctacagccgctcgaagtctcggtcccgcactcgttctcgatctcggtcgacctccaagtccagatccgcacgaaggtccaagtccaagtcctcgtcggtctccagatctcgttcgcggtccaggtcccggtctcggtccaggagtcctcccccagtgtccaagagggaatccaaatccaggtcgcgatcgaagagtccccccaagtctcctgaagaggaaggagcggtgtcctcttaagaaaatggtaatgtctgggaatccgagacacataaccctaattcataaatgggatttggggtaggtctttttgagtcgtgttaatgtaagaatgactcctatcattaggagtgctgctcggaggttactcacctttgggagtaatactgaagagaggggtctgcagaaaggatgtgtatgaagcttagataataatggctgtttcgtaaactgtttgagacctattaatgaaaatgactatttcttgctgtttttatccaacgtctgcattttccccctttaaagctgcggtctcctgtttgataataagaatattggccagtattgcagattttaactgatttggctgatcctccagggaccagtttctgtgggcgtgtattggagcaggtttgtctttaaatgttaaagatgcactatcctcttagagaaacaatcagttcaactattgttgtactgactgggacttcatattctaatggatgtggcaaaagaattgcaataagaagcagtgaacatttggaaccccaaaagaaagttacaggtattgcactgggtggggaaaggatagtgtgtctttaactcttaaattgtttggtcctattttttaaaaaggaaagggccctaagtagctcagatattaaagtagtattctcaattaccaaatgtttcatttgaaacaatttatcttaatgaaatatagaccaattctctgatctcgagttgtttttgtttggatacagcccttttttttttctttttttttcttccccttacctttcttcaccttggttatttggccaggaatacgtaaattcaaacttgtacatgctgatggtagcctttgtgaaattttcctaattgggccttttaaaaacatggctgggtggaacatttctgtaccctactggtttgaccagagccttagtaagtacgtgcctgaaactgaaaccatgtgcactttaatggaaggtaagctgaacttctttcttttcaaacctagatgtatcggcaagcagtgtaaacggaggacttggggaaaaaggaccacatagtccatcgaagaagagtccttggaacaagcaactggctattgaaaaggttattttgtaacatttgtctaactttttacttgtttaagctttgcctcagttggcaaacttcattttatgtgccattttgttgctgttattcaaatttcttgtaatttagtgaggtgaacgacttcagatttcattattggatttggatatttgaggtaaaatttcattttgttatatagtgctgactttttttgtttgaaattaaacagattggtaacctaatttgtggcctcctgacttttaaggaaaacgtgtgcagccattacacacagcctaaagctgtcaagagattgactcggcattgccttcattccttaaaattaaaaacctacaaaagttggtgtaaatttgtatatgttatttaccttcagatctaaatggtaatctgaacccaaatttgtataaagacttttcaggtgaaaagacttgattttttgaaaggattgtttatcaaacacaattctaatctcttctcttatgtatttttgtgcactaggcgcagttgtgtagcagttgagtaatgctggttagctgttaaggtggcgtgttgcagtgcagagtgcttggctgtttcctgttttctcccgattgctcctgtgtaaagatgccttgtcgtgcagaaacaaatggctgtccagtttattaaaatgcctgacaactgcacttccagtcacccgggccttgcatataaataacggagcatacagtgagcacatctagctgatgataaatacacctttttttccctcttccccctaaaaatggtaaatctgatcatatctacatgtatgaacttaacatggaaaatgttaaggaagcaaatggttgtaactttgtaagtacttataacatggtgtatctttttgcttatgaatattctgtattataaccattgtttctgtagtttaattaaaacattttcttggtgttagcttttctc

SEQ ID NO: 1668 - DNA, 1829 bp, Homo sapiens
gcgccctggagaacgcgtcggggctgagccggggtccagcagccgccgctatggacatcccgccgctggccggcaagatcgcggcgctgtcgctgagcgccctcccggtgtcctacgcgctcaaccacgtctcggcgctctcgcaccccctgtgggtggcattgatgagcgccctaatcctgggtctgcttttcgtggcggtctacagcttgtcccatggcgaggtctcctatgacccactctatgctgtcttcgctgtcttcgccttcacctcggttgtggacctcatcatcgctcttcaggaagacagctatgtggtgggcttcatggagttctacaccaaggaggtacttgggggacgaccagggagccccctaccgcactgcccgtctgagtctcccacctgcccccacagggagagccatacctgcgcacagcgcacggagtcttcatctgctactgggatggcactgttcactacctcctctacctggccatggccggcgccatctgcagaaggtgcaggaggcagggagagggtggcccctgaccctgggagagaagttgcatcctcagatggggtcccagggcagggtggagccagaagtgtctgtaggagaaatcaggacgcctctctagggctccagccaggggtggccaggagaaggttccagggaacgtctcaggtgtaggtggtggcctagcattgcttacatccaccctgtgcctgggcagccacttctgttcttggacagagggtctcactgttatttccccgttcaactccctgttgtcccttccatcctgggcaaaactgaaagggacccggagctgggaaacccacggtggtctccaggccctggctggggctctgagattacggagtgactacctgctggtcacccctccatcccctgctcaggaagagataccggaattttggactctactggctgggttccttcgccatgagcatcctggtgttccttacaggaaacattcttggtgcaagaggaacaaagaaagggactcctgcagcgtccggctgacctggcccttgtcatatatctcatccttgctggcttcttcactctgttccggggcctggtggtgcttgattgccccacagatgcctgctttgtctatatctaccagtatgagccatacctgcgggaccctgtggcctaccctaaggtgcagatgctgatgtacatgttttatgtcctgcctttctgcggcctggctgcctatgctctcaccttccctggttgctcctggcttccagactgggccttggtgtttgctggaggcatcggccaggcacagttctcgcacatgggggcttccatgcacctgcgcacacccttcacctaccgtgtgcctgaggacacctggggctgcttcttcgtgtgcaatctgctgtatgcgctgggcccccacctgctggcctaccgttgccttcagtggcccgcattcttccaccagccaccaccctccgaccccctagccctccacaagaagcagcattgagagagctgtggactcaggacccaggactctgtttacgtgcccagtcagccctacctggggaagcgggggttgggtgttttagagacaggagggacatctccgggtgtctttagtcttggctatggtagtttcagtccagtgggtgggatggagaccaacgaccaagtgttcctgcaaggagagcctcccacagctgtcaccatgctccaactcccacacaaacgcttctaccccttccagaacttacccatcatccccccatggatcctttcagtaaaaaccctttcaatttccaaaat

SEQ ID NO: 1669 - DNA, 1991 bp, Homo sapiens
agctctgggagaggagcccccgccctgggattcccaggtgtttccatttggtgatcagcactgaacacagaagagtcatgatggagtttgggctgacctgggttttccttgttgctttttttaaaggtgtccagtgtgaggtgcagctggtggagtctggggaaggcttggtccagcctggggggtccctgagactctcctgtgcagcctctggattcactttcagtaactttgctatgcactgggtccgccaggccccagggaagggactggaatatgtttcaactatcagtagtaatgggcgtcagaaatattatggagagtctgtgaagggcagattcaccatctccagagacagttccaagaacacgctgtttcttcaaatgggcagcctgagagaagacgacacggctgtctattactgtgcgagaggtcatagtatcgacaactatcactacggtgtggacgtctggggccaagggaccacggtcaccgtctcctcagggagtgcatccgccccaacccttttccccctcgtctcctgtgagaattccccgtcggatacgagcagcgtggccgttggctgcctcgcacaggacttccttcccgactccatcactttctcctggaaatacaagaacaactctgacatcagcagcacccggggcttcccatcagtcctgagagggggcaagtacgcagccacctcacaggtgctgctgccttccaaggacgtcatgcagggcacagacgaacacgtggtgtgcaaagtccagcaccccaacggcaacaaagaaaagaacgtgcctcttccagtgattgctgagctgcctcccaaagtgagcgtcttcgtcccaccccgcgacggcttcttcggcaacccccgcaagtccaagctcatctgccaggccacgggtttcagtccccggcagattcaggtgtcctggctgcgcgaggggaagcaggtggggtctggcgtcaccacggaccaggtgcaggctgaggccaaagagtctgggcccacgacctacaaggtgaccagcacactgaccatcaaagagagcgactggctcagccagagcatgttcacctgccgcgtggatcacaggggcctgaccttccagcagaatgcgtcctccatgtgtgtccccgatcaagacacagccatccgggtcttcgccatccccccatcctttgccagcatcttcctcaccaagtccaccaagttgacctgcctggtcacagacctgaccacctatgacagcgtgaccatctcctggacccgccagaatggcgaagctgtgaaaacccacaccaacatctccgagagccaccccaatgccactttcagcgccgtgggtgaggccagcatctgcgaggatgactggaattccggggagaggttcacgtgcaccgtgacccacacagacctgccctcgccactgaagcagaccatctcccggcccaagggggtggccctgcacaggcccgatgtctacttgctgccaccagcccgggagcagctgaacctgcgggagtcggccaccatcacgtgcctggtgacgggcttctctcccgcggacgtcttcgtgcagtggatgcagagggggcagcccttgtccccggagaagtatgtgaccagcgccccaatgcctgagccccaggccccaggccggtacttcgcccacagcatcctgaccgtgtccgaagaggaatggaacacgggggagacctacacctgcgtggtggcccatgaggccctgcccaacagggtcaccgagaggaccgtggacaagtccaccggtaaacccaccctgtacaacgtgtccctggtcatgtccgacacagctggcacctgctactgaccctgctggcctgcccacaggctcggggcggctggccgctctgtgtgtgcatgcaaactaaccgtgtcaacggggtgagatgttgcatcttataaaattagaaataaaaagatccattcaaaagat

SEQ ID NO: 1670 - DNA, 2844 bp, Homo sapiens
agcgactgcgcggacgggttcctgagtggaacatggcgacttgcgccgaaatcctgcggagcgagttccccgaaattgacggacaagtcttcgactacgtgaccggcgtcttgcacagcggcagcgcggacttcgagtctgtggatgacctggtggaagctgtaggggaactattgcaagaggtgtccggggacagcaaggatgacgcgggcatcagggccgtgtgccagcgcatgtacaacactctgcgtctgtatgtgccagggagtaggggttgatgggggcgaagggacggcgaacggtccggagacaagaggtgggggaggaagatctgatggccatagagcttttccctcaactcctaactctgcgctttctatccctacccacatagggctgagccacaaagccagggaaatagccaggtgctactggacgcccctatccagttgtcaaagataacggagaactacgactgtggaaccaaacttccaggactgctaaagagggaacagtcctcggtgaggaggaggaagcaagggaggggactgtctgtgatggggttgggagttgactgtctaattggagtatcttttggggggatttctgactatgtcttttcctgagcctttgagtctgttcatcatgggtaagttaagagggtttactcgagatgttctctcttggggttcctttctgagcctacacccgagagtgaagtcgatgtgtttggacccttagacagtgaatgcaaagaagttagagaaggccgaggctcgacttaaggcaaagcaggagaagcgctcagagaaggacacgctcaagaccagcaaccctctagtcttagaagaggcatcagccagccaggcaggcagcagaaaggagagtcggttggaatcatctggcaagaacaaatcctatgatgtgcgaattgagaactttgatgtgtcttttggcgatagagtactgctggctggagcggatgtgaacctggcatggggccgccgttacgggctggtggggcggaatgggttggggaagacaacgttactgaagatgctggccacccggagtctgcgggttccagcccacatttccctgctgcacgttgagcaagaggttgctggagatgacactcctgccctgcagagtgtgctggagagtgacagtgtgcgagaggatttgctacggagggagcgggagctcactgcccagattgctgctggcagccacaagggcggagggctctgaagctgcagagctggcagaaatctatgccaaactggaggagattgaggctgacaaggcacctgccagggcatcagtcattctcgctgggcttggctttacccctaaaatgcagcagcagcccacccgggagttctcaggtggctggaggatgaggctggccctggcccgggccctctttgctaggccagatcttctgctgttagatgaacctacaaacatgctggatgtcagggccatcctgtggctggagaattacctgcagacgtggccctccaccatcctagtcgtctcccacgaccgcaacttcttgaatgccatcgccacagacatcatccacctgcacagccagcggctagatggttaccggggagactttgagaccttcatcaagagtaagcaggagcggctgctcaaccagcagcgtgaatatgaggcgcagcagcagtatcgccagcacatccaggttttcattgaccggtttcgctacaatgccaacagggcctctcaagtgcagagtaaactcaagatgctggagaagctgcctgagctgaagcctgtggacaaggaatcagaggtcgtaatgaagttccctgatgggtttgagaagttctcgccgccaattctgcagctagatgaggtggatttctactacgatccgaagcacgtcatcttcagtcgcctctctgtgtctgctgatctcgagtctcgcatctgtgtggttggagagaatggggctgggaagtctaccatgctgaagctgcttttgggggacctggcacctgttcggggcatcagacacgctcacaggaatctgaagattggctatttcagccagcaccatgtggagcagctggacctaaacgtcagtgctgtggaactgctggcacgcaagtttcctgggcggcctgaggaggagtaccgtcaccagctgggtcggtatggcatctccggagaactggccatgcgtcctcttgccagcctgtctgggggccagaagagccgagtggcctttgctcagatgactatgccctgccccaacttctacattctggatgaacccacaaaccacctggacatggagaccattgaggctctgggccgtgccctcaacaatttcaggggtggtgtgattctggtgtcccacgatgagcgctttatcaggctggtgtgccgggagttgtgggtatgcgaaggaggcggcgtcacccgtgtggaaggaggatttgaccagtaccgcgccctcctccaggaacagttccgccgcgaaggcttcctctagggccaccaggctgaggactcgcccaggacatggactggtctctcagacccctgggccaccatgtaggccaccactccaggccgtggacttcccccaacttggggacagccttattcccaaatgtctctatccttttgactggagcatcttctgcacaaccttgggagcccatccaagggttggtgaggactggtctcccgggggtgggggtctggggggtaccctctggggttatagattcccccactgccccagctctgactggaccccaagtggctgctatgtaaattaaatctctccccgcgtctcctttg

SEQ ID NO: 1671 - DNA, 1615 bp, Homo sapiens
agctctcagagaggtgccttagtcctggattccaaggcatttccacttggtgatcagcactgaacacagaggacccaccatggagttggggctgtgctgggttttccttgttgctattttagaaggtgtccagtgtgaagtacaactggtggagtctgggggaggtctggtagaagttggggggtccctgagactctcctgtatggtctctggattcttcctgactagttatgaaatgaattgggtccgccagactccagggaaggggctggagtgggttgcatacagtagcagtctcggttctgcgacatattacgcagactctgtgaagggccgattcatcatctccagagactacgccgagaactcactgcatctgcagatgaacagcctgcgagtcgacgacacggctatctatttctgtacgagacttcgtggagatggtggctacgccaaatccgcgaatgactattggggccagggaaccctggtctccgtctcctcggcatccccgaccagccccaaggtcttcccgctgagcctctgcagcacccagccagatgggaacgtggtcatcgcctgcctggtccagggcttcttcccccaggagccactcagtgtgacctggagcgaaagcggacagggcgtgaccgccagaaacttcccacccagccaggatgcctccggggacctgtacaccacgagcagccagctgaccctgccggccacacagtgcctagccggcaagtccgtgacatgccacgtgaagcactacacgaatcccagccaggatgtgactgtgccctgcccagttccctcaactccacctaccccatctccctcaactccacctaccccatctccctcatgctgccacccccgactgtcactgcaccgaccggccctcgaggacctgctcttaggttcagaagcgaacctcacgtgcacactgaccggcctgagagatgcctcaggtgtcaccttcacctggacgccctcaagtgggaagagcgctgttcaaggaccacctgagcgtgacctctgtggctgctacagcgtgtccagtgtcctgccgggctgtgccgagccatggaaccatgggaagaccttcacttgcactgctgcctaccccgagtccaagaccccgctaaccgccaccctctcaaaatccggaaacacattccggcccgaggtccacctgctgccgccgccgtcggaggagctggccctgaacgagctggtgacgctgacgtgcctggcacgcggcttcagccccaaggacgtgctggttcgctggctgcaggggtcacaggagctgccccgcgagaagtacctgacttgggcatcccggcaggagcccagccagggcaccaccaccttcgctgtgaccagcatactgcgcgtggcagccgaggactggaagaagggggacaccttctcctgcatggtgggccacgaggccctgccgctggccttcacacagaagaccatcgaccgcttggcgggtaaacccacccatgtcaatgtgtctgttgtcatggcggaggtggacggcacctgctactgagccgcccgcctgtccccacccctgaataaactccatgctcccccaagc

SEQ ID NO: 1672 - DNA, 2391 bp, Homo sapiens
acttagcagagaagaatcaaatttccgggggcaaagcaaaataataaaatgaatgtcaggatattttatagtgtcagtcagtcaccccacagtctcctctctcttcttttctactgtgctatcctagaatcaaggatttcagcaacaatgcctctgttcaaactcccagaaattgatgatgcaatgcgcaactttgctgaaaaagtgtttgcctctgaagtcaaagatgaaggaggtcgtcaggagatttccccctttgatgtggatgagatctgtctgatttctcatcatgagatgcaagcacacatattccatctggagactctgtccacctccacagaagccaggagaaaaaagcgtttccaaggacggaagactgttaatttgtccattccactaagtgaaacatcttccaccaaactgtcccacattgatgaatacatttcctcatctccaacctaccagaccgtgcctgattttcagagagtgcagattactggtgactatgcctctggggttacagttgaagattttgaaattgtttgcaaaggtctgtatcgggcactatgcacacgtgagaaatacatgcagaagtcgtttcagaggttccctaaaaccccttccaaatacttgcggaacattgatggtgaggcttgggtagcaaatgagagcttctatccagtctttactcctcctgtgaagaagggagaggaccccttccgaacagacaaccttcctgaaaacctgggctatcacctcaaaatgaaggacggtgtagtttacgtctatcctaatgaagcagcagtcagcaaagatgagcctaagccacttccttacccaaatctggacaccttcttagacgatatgaattttttacttgctttaattgctcaaggacctgttaagacctatacccaccggcgcctgaagttcctctcctccaagttccaggtccatcagatgcttaacgagatggacgagttaaaggagctgaaaaacaacccccaccaagatttttataactgcaggaaggtggacacccatatccatgcagccgcttgcatgaaccagaaacatctgctgcgttttattaagaaatcttaccaaattgatgctgacagagtggtctatagcaccaaagagaagaatctgaccctaaaggaactttttgctaaattaaaaatgcatccttatgacctgactgttgattctctggatgttcatgctggacgccagaccttccagcgttttgataagttcaatgacaaatataatcctgtaggagcaagtgagctacgggacctctacttgaagacagacaattacattaatggggatattttgccactatcatcaaggaggtaggtgcggacctggtggaggccaagtaccagcatgctgagccccgcctgtccatctatggccgcagtcctgatgagtggagcaaactctcctcctggttcgtctgcaatcgcatccactgccccaacatgacatggatgatccaggttcccaggatctatgatgtgttccgttccaagaatttccttccacattttggaaaaatgctggagaatattttcatgccagtgtttgaggccaccatcaacccccaggctgacccagaactcagtgtcttcctcaagcatatcactggctttgacagtgtggatgatgagtccaaacacagtggccacatgttctcctccaagagtcccaagccccaggagtggacattggaaaagaatccatcttacacttactatgcctactacatgtatgcaaacatcatggtgctcaacagcctgagaaaggaacgaggcatgaatacgtttctgttccgacctcactgtggagaagctggagccctcacccatctcatgacagcattcatgatagcagatgatatctctcatggcctaaatttaaaaaagagtcccgtgctacagtacttgtttttcttagcccaaattcccatcgccatgtcaccactaagtaacaatagcctatttctagagtatgccaaaaatccttttttggatttccttcagaaagggctaatgatctcactgtctacagatgacccaatgcaattccactttaccaaggagcccctaatggaagaatatgctattgctgcacaagtcttcaagctgagcacctgtgatatgtgcgaagtggcaaggaacagtgtcttgcagtgtggaatttctcatgaggagaaagtaaagtttctgggcgacaattaccttgaggaaggccctgctggaaatgatatccggaggacaaatgtagcccaaatccgcatggcctatcgctatgaaacctggtgttatgaactcaatttaattgctgagggtcttaaatcaacagaataaaaaaaagtaaacc

SEQ ID NO: 1673 - DNA, 2314 bp, Homo sapiens
gcagcgcgccacgcccgagccccaggcgtgcggctggccatggcgctgttctacgtcgcgcggtacccgggtcccgatgcggcagctgcggcggggccggagggcgcggaggccggggcgcacggcagggcccgcgcgctgctcgagcggctgcagagccgggcccgcgaacggcagcagcagcgggagcccgcgcagaccgaggcggctgcatcgaccgagccggcgaccaggaggcgacggcggccccggcggcggcggcgggtgaacgacgcggagccggggagcccggaggcgccgcagggaaagcgacggaaggcggacggcgaggacgcgggcgcagaaagcaacgaggaggcgccaggggagcccagcgcagggagcagcgaggaggcgccaggggagcccagcgcagggagcagcgaggaggcgccgggggagcgcagcaccagcgccagcgccgaggcggccccagatggaccggccctggaggaggcggccggacccctggtccccggcctggtgctgggggggttcgggaagaggaaggcgccgaaggtccagcctttcctgccaaggtggctggctgagcctaactgtgtcagaaggaatgtcaccgaagacctggttcctatcgaggacatccctgacgtccatcctgacctgcagaagcagctgcgggcacacggcatctcgtcctactttccagtccaggcagctgtgattcctgccctcctggagagcgcagcctgtgggtttctggtgggcagaggtggctaccggcctagcgacctctgtgtttctgccccaacaggcagtgggaagacactggccttcgtcatccctgtggtgcaggccctgctttcgagagtggtctgccacatccgtgccctggttgtgctgcccaccaaggagctggcccagcaggtgagcaaagttttcaacatctacacagatgccacacctctgagagtctccctggttacgggacagaagtctctggtcaaggagcaggagagcctcgtccagaaaacagctgatgggtaccgctgcttggctgacatcgtggtagccacccccggccgcctggtggaccacatcgaccagaccccaggattcagcctccagcagctccgcttcctgattattgacgaggctgaccggatgattgacagcatgcatcagtcctggctgccgcgggtggtggcggccgccttccagagcgaggaccccgcggacccctgtgccctgctccagcgaaggcaggcccaggctgtgacagccgccagcacctgctgtccccagatgcccctgcagaagctgctcttctcagctactctgacccagaaccctgaaaagctgcagcagctgggcctccaccagccccggcttttctccacagggctagcacacaggggcctggaagatacagatggggacggggattcggggaagtatgcctttcctgttgggctcacgcaccactacgtgccctgcagcctcagctctaagccgctggtcgtcctgcacctggtcctggagatgggcttctcgagggttctctgcttcactaactcccgagagaactcccacaggctcttcctgctggtgcaagcttttgggggtgtggacgtggctgagttctcctcgcgctacgggcctggccagaggaggatgatcctgaagcagtttgaacaggggaagatccagctgctcatcagcacggacgccaccgcgcgaggcatcgacgtgcagggtgtggagctggtggtgaactacgacgccccccagtacctgagaacctacgtgcaccgggttgggaggacagctcgcgctgggaaaactggacaggccttcacactgctcctgaaagtgcaggagaggagattcctccgaatgctaactgaagctggggcacctgagttgcagcggcacgagctctccagcaagctgctgcagccgctggttcctcggtacgaggaggccctgtcccagctggaggagtctgtcaaggaagagcgcaagcagagggcggcctaggctggggctcagagggccggagggactgaacgctcaccaccctgaccctccttccagagcagtgctgatcactggatcctgtatgtgaggaaaggaatcccccagtggacacagccttcctccccaagcacgtggtctctgcgccaggcagcccgggcgtcagagctcaagcacctgccccgactggagacttcagggcttgtcactttcagagtgtggaggtcaggatggctgcgggcaatgaagccttagtaaaacggtgaaaagtactccc

SEQ ID NO: 1674 - DNA, 2788 bp, Homo sapiens
gttattaattacttttcttattagtccattagccccttttcaagcccaatgttgcttgctcctattttggcaatgctaaccattctttcctgcttaaaatgcttcatgacactgtgctttctaagtgtccctttctcctctttggctggttcttttcagtctccttcaggggctgtacttcctttacctgatccctctcaattcttcttcagagttccaaatcctggctccccgttactctcagtaaataccatccctctggttgaacttaacctacgtattcgttctgtttttgttacacaaatatttaatgagcggctattacgtgacgggttctttttaataagcactggggataaaaacatgcatgactgctgcattagtggtctgattggaaagaatgcaaaatgtgcatggaatcatgaaagcatataatgaggtctggcctggctaatgtgatctgggaaggcttgaggatgtaatcaataagttgtcaatgaaaaaaataaataggagttaactaagtaaaatgggatagaaatgctacatagcatgtgcaaaaaggccctgtaacaagagaaaacgtggctttttaaaactttggaaagctagtgggacctaaacagagaatgaaggaaacaagctggagagtagaaagaccagccttgccagccacattgcagacttttaaaattagtaccgaacgcatttcaaaagtgtagaaaataaaaaactcaatagaaaggttattatataaactggaggaaattgcccaaaaattcaaaaaaggagatttaaaaaaaaagatttttagaaattggagaatcaaaagttgctccagagagaacactagaagcagcagaggagaaatctaagatattattcaagaaaagatccaagaagtgaggggagtaagtttacagactgtaagggcattctgagtgaagagtataatggatggaaagaaacccgcattaaaggacatcactgaaatttcagaaccctgtagacaaagaaaaatgcctatccatgtccagggagttggggataaaaagagatcataaacaaaagattaagcactgaaatagcttcagatctctcactgaaatggaagcaatgccttcaaactctgaaggacatttctgaactctcaaatgtgagagacggacacatgatcacacatgcaatgtctttagaaatgtgctcttcctcagaaagctagcagaaagctaaccatgtggcagaaatgtaatgtatgaaacatttttagtagacattatgatgttatggcccagagagtaaaactgagactgcttggggggtatcacataacatatttttacccaatagaaggaagaggttgtaatagtaagagaagttaaaaaatgaatggaatagccctgcaagtgtaattaagcatagatagtttgacaagttagtagtgactacaattatgggagaatatgctacccacggcttccaaaggttagttggattagatgatgattaaggtgtatttcaacaaaagtattttgtaattcctctatataaaaaagagagagagagagagaaagtgaaaaaaggcagagagtaaaagcagcaaacaatgcctttaaggcatatacttttaagcctatatgtgcttttttctatttatgaaaccaactttagagaagctaaaatatgtaaaagtgattctagtataatcttttttgagcaatgaagctgtaagtcaggataggcaacagaagcataaaaatatgagcaaaatactatatttaattttgggtcatttagaatccttccctgagttttaacttcagcatgccaaaactgacaacactaaagccttatagagttggtgtgagaattaaatgaattaataaagtggttagaagagtgcctggtatatcaaaacactatgtgcgtattagctattattataagtcagtattaacttttggattaaagaacatggactctaaagccagactgctgggatcaaatctcagctcttccacttactagttgtatagaaactttaggtaatttacttaacctctctgaccctcagtttcctcatctgtaaaacagggataacagtacacatacctcacaggattgctgtaaaaattcaacaaagtaaaacatgtaaaggtctcagaataggacttggcacatagtaatgctacgttagtgttacatgttattgctatccccttctgactaaagtcagaacttctaaagaagttccttcaaaattctcagctcaaagaacacaacaatgaatggaacaaatgcctttccaaagtgctaattatgaagtatacgtatctgttaaatgaatcaggttttcctgttgtcagagacattgcaaaattggaaatgtataatttcatgaaaaatgttgctataaatcatgtttctaaaagaaaagcacaaaaatgcatacataaaagaactctaaggccaggcgcggtggctcatgcctataatcccagcactttgggaggctgaggtgggcggatcaactgaggtcatgagttcgagaccagcctggccaacatagctaaatcctatctctacaaaaatacaaaaattagccaggtgtggtgacgcacacctgtagtcccagctactcaggaggctgaggcaggagaattgcttgaacccagaaggtggaggttgcactgagccaagatcacaccactgcactccagcctgggtgacagagtgagaccccatctcaaaaaaaaaaccagtgctctaaactctttttatcccccct

SEQ ID NO: 1675 - DNA, 2420 bp, Homo sapiens
agcccgagccccttgcctcacgccggcccctcccgcgctgagagaggtcagcccgagccccttgtctcacaccggcccctcccacgcggacagaggtcggcgtgagccccttgcctcacaccggcccctcccgcactgagagaggtcagcccgagccccttgcctcacaccggcccctcccacgcggacagaggtcagcccgagccccttgcctcacaccggcccctcccacgctgagagaggtcagcccgagccccttgcctcacaccggcccctcccacgctgagagaggtcagcccgagccccttgcctcacaccggcccctcccacgctgagaggggtcagcccgagccccttgcctcacaccggcccctcccgcgctgagagaggtcagtgtgagcccttgcctcaccccggcccctcccgcgcggacagaggtcagcctgagccccttgcctcacaccggcccctcccgcgcggacagaggtcagcctgagccccttgcctcacaccggcccctcccgcgcggacagaggtcggcccgagcccttgcctcacaccggcccctcccgcgcggacagaggtcagcctgagccccttgcctcacgccggcccctcccgcgctgggaggggtcggtgtgagccccttgtctcacaccggcccctcccacgcggacagaggtcggcgtgagccccttgcctcacgccggcccctcccgcgctgggagaggtcagcctgagcccttgcctcacaccggcccctcccgcgcggacagaggtcggcgtgagccccttgcctcacaccggcccctcccgcgctgagagaggtcagtgtgagcccttgcctcacaccggcccctcccacgcggacagaggtcggcgtgagccccttgcctcacaccggcccctcccgcgctgagagaggtcagtgtgagcccttgcctcacaccggcccctcccacgcggacagaggtcggcgtgaccccctgcctcaacaggccaccgtgagggaggagcgggatcgcgctcgggctgctggggggtaggcggggacttgggcctggggggtcgcggtggggcgagagctgggcctggagactcccctgggaggcaacagcggggtctgcagacacccttctccggccggagctgggactgttcagtcactgggagaagggatgtgggtctgaagagcttggttgcagaaacttcggggtctacaaacgcaggcgggagctgagccaaaggagcttgtttgctgggaggtgggagatgcagccaggaggaacagctgggcaatgcgggaggcagaggccaggcctcctcaagttggcctctcagacccacttgcagcctcccggcgccccctccgggcccggctcttcctcctggctgcatctccaggccggactctggcccgactccaggtcccaacaacgtctttggactcagctcctgcccagctcccagcggccctggtgggcccacaacttccctaagccaagctccccaggcccagctcaggcctcgcggtggcctctccaggctcagctcctggccctccgatgacatctgcaggccccaaatggcctccggtcggtgggctcctctaggcccagcttgggcctcccggcggcctccgcaggcccaaatcgtcccgaagtcagtctctccaggcttagctccagcctcccggcggcctctgcaggcccaagtcgtcctcaagtcggcctggaagtgggcctggaagagcagcaagtcggcctccctgggcccagctccgtcctctcgacggcctctccaggtgcaaaacttcctcgagtcagcctctccaggcccagctcctcctgcctcccagtggcctctttcggcccagcccagctcatggctctcggcggccttcccaggccccgcttttgacttttggcagcctcttcaggcgcagaacttgatctccagtcggcctttgcaggcccggcctcctgcgtctcgaaggcctgcacgggcccagcctcggcctcggcctcacagcggactctccacgcccagctagctctcgcctcactgcggcctccccagtccaaagctcctgcctttcggccacttcggcaggtccagctcctgcctgccagtggcctctttaggcccagctcattcctcatgtcggccattccaggccctgtttttcccttccggcagcctcttggcctctaatttgtttatcttttgtgtataaatcccaaaatattgaattttggaatatttccaccattatgtaaatgttttggtaggtaatttatttggagtgagtttctgcgccaagcccgaattttttattttattttccttattatttggtgttaaacaggtttaatgacggtcatggcaactttttggcacaatgaaaaatatcgcccacg

SEQ ID NO: 1676 - DNA, 2525 bp, Homo sapiens
caactcacacctgacctaaaacctaaatgccttattttcttctgcaacaccgcaacaccgcttggccccaatacaaacttgacaatgtctctaaatggccggaaaatggcactttcgatttctccatcctacaagacctaaataatttttgtcgaaaaatgggcaaatggtctgaggtgccttacgtccaggcatttttcacacttcgttccctccctagtctctgttcccaatgcgattcctcccagatcctcctcctttccctcccgcctgtcccctcggtcccaaccccaagcgtcgctgagtcttcccagtcttccttttctacagacccatctgacctttcccctcctccccaagctgcttgtcgccagaccgagctaagtcccaatacttcctcagcctccactcctccaccctataatccttctatcacctcccctcctcacacctggtccggcttacagtttagttccgcgactagcgcttccccacctgcccaacaatttcctcttagagaagtggctggagctgaaggcatagtcaaggtacatgtacttttttctctatcagacctctctcagatcagtcaatgtttaggctctttctcatcagaccccactaaatatatacaggaattccaatatctaactctgtcctacaacttaacctggagtgacttaaatgtcatcctgacttctactctctccccagatgaacgggaaagttttttctctagcccaatctcgtgctgataaccgccggcttcatgagccagacctccaggaaggcattagagcagttccccgagaggatccccaatggaactatcaggcagattccccaggtacagctaggcgagattacatggtttcctgcctagttgaagggcttaaaaaagcagcttacaaagctgttaattatgacaagcttaaagaaactacccgaggtaaagacgaaaacccagcccaggtcatggcccacttagcagcaaccattagatgctatactgccctagacccagaggggccagaaggccgccttattcttaatatgcatttttatcacccaatccactcctgacattaggaaaaaacttcaaaaattagaatctggccttcaaacccagcaggaattaatcaaccttgccttcaaggtgtacaataatagagaggaagcagccagacggcaacgcatttctgagttacaattacttgcctctgctgtgagacaaaacccagccacacctcctgcatacaggaacttcaaaatgcctaagccgcagcaatcagacactcctacaagacttcatcaggatcttgcttcaagtgccagaaatctggccactgggccaaggaatgcccacagcccaggattcctcccaagccatgtcccatctgtgcaggcacccactggaaatcagactgcccagctcgcccgacagccactcctggagcccctaaagctctagcccaaggctctctgactccttcccagatctattcggcttagcgactgaagattgacgctgcccgatcgcctcggaagtcccctggaccatcacagaagccgagcttcgggtaactctcacagtggagggtaagtccatcccctgtttaatcgatacgggggctacccactccacgttgccttcttttcaagggcctgtttcccttgcccccataactgttgtgggtattgacggccaagcttcaaaacccctgaaaactcccccactctggtgccaacttggacaacactcttttatgcactcttttttagttatccccacctgcccacttcccttattaggccgaaatattttaaccaaattatctgcttccctgactattcctggagtacagctacatctcattgctgcccttcttcccaatccaaagcctcctttgtgtcctctaacatccccacaatatcacctcttaccacaagacctcccttcagcttaatctctcccactctaggttcccacgccgcccctaatcccacttgaagcagccctgagaaacatcgcccattctctctccataccaccccccaaaaattttcgccgctccaacacttcaacactattttgttttatttgtcttattaatatcagaaggcaggaatgtcaggcctctgagcccaggccaggccatcgcatcccctgtgacttgcacgtatacatccagatggcctgaagtaactgaagatccacaaaagaagtaaaaacagccttaactgatgacattccaccattgtgatttgttcctgccccaccctaactgatcaatgtactttgtaatctcccccacccttaagaaggttctttgtaattctccccacccttgagaatgtactttgtgagatccacccctgcccaccagagaacaaccccctttgattgtaattttttattaccttcccaaatcctataaaacagccccacccctatcttccttcactgactctcttttcggactcagcccaccggcacccaggtgaaataaacagctttattgctc

SEQ ID NO: 1677 - DNA, 1906 bp, Homo sapiens
aacacatccaagcttaagacggtgaggtcagcttcacattctcaggaactctccttctttgggccacggaattaacccgagcaggcatggaggcctctgctctcacctcatcagcagtgaccagtgtggccaaagtggtcagggtggcctctggctctgccgtagttttgcccctgggtgagtgttcctgggaggggctggtgctgggggcgaggaggcggctgggaagggcgggggtcctgtcccgggacccgtgggagagaaaatgggggacacccgcagccttgctgccctgtcctgtcttctcacagcaggcgtccaccctaactttccatctgggagggggcccggggcaggcagactctggccagatgcccagccctgggtgttccacaggtcctctcccctctgggcccgggcctcctcctgcctagccggaaagggtctatctaccactgagtcccactctcttcagctctcccttcccccagattcaccatcagaattcatctcctttaggagtttaccttgtcaatagggccccgtgtcctatgggatctcacatccagagtatcgattttaacaaaattcttcagctcacttttttcattagtttctgggagatctctttctggttttatttattctcattttcttccttttcaccctcgattcccctccctcaaagtcaacctttctaatatatttaatgtgtgtctgtttttcatatgtatttttgcagaatgggtattgtgttttgtttgcgggcattttaactgacatgcaggatggtgtgctgtagatcccattctattgcttttttccacactgagaaccatattcttgagatccatcagtgtcattcgatgagcatctaatactggcttctacctgctgacaagtgctcctctgtgtgtatcccctgccctttacctttctgtctccgtgggtggacatccaggggttcccccaactccgccagcacaaatggcacaggcttgaatgggggcacagggcccctgactccgaccctgacttctgacccctgccccaacctctaacctctgtttgagcctgcactcaccctttgctgaccctgtcatcctcagctgccctgagccccaacatctctctcctcagacccttgctgggggcactggaggctagctccttcatgctggggtccctcactggcaccctgttttgcaacttggaggtaactggccctcggcaacacacaccactctgggctcccaactcagtacagagaagtgtgatgagcaagcaagggcctgggccacgcccagcagtcctttctgtttgtcagaaatgcagatgacttctcagtttaagatcaagcaattcataaaattaaaataataacagctcaacttaagcaagcgcttttatgttctagtcacttaccctagcacttgaggtttgtcaatttaattctcataacaaccccagaggaagataagaagataatatcgtcccttatttaccaactgggacaatttactgttgtccaagtgctctgggcaggacagaagggtgtgggtgtgctgcttccaggcttggaacaggaggtagaactatgaacaatgacagaaagtattaataggccaggcacggtggctcacacctgcaatcccggcactttgggaggccaagaagggcggatcactcgaggtcaggagtttgagaccagcctggccaccacggtaaaaccctgtctctaccaaaaatacaaatattagctaggcatggtggtgcatgcctgtaatcccagctacttgggaagctgagtcagaagaatcacttgaatccaggaggcagaggttgcagtgagccgagattgtgccactgcactccaggctgggtgacagagctaagattctgtctc

SEQ ID NO: 1678 - DNA, 2553 bp, Homo sapiens
ttgtcttcttcttgacacaaatgcctggaaggtgaaagtataaaatatcttgatattaccaaggaattaatgtgtggaactttcacaattaaatcactactgtcattactatccaataattcattgtttatttctacacctgcagttgcagtttacctggaggtactttgcatacagaaacatttttcatcacttactaagtgagaataggaccctggcctagggggaaaaacaaccacagacaaaccatacttccctgagaagcaggagcatagtgctggctagtgaattgctttcacaaaccgacctcataactctgtgccttagaaaaattagaaatgggaacatttggagatcacttgggaaaacttgaaattatgaatgttaatctgtgattgctaagggaacgtggtatttcctgcctattttgtctgtagtttgtctctttctcttctaattcatttttaaaactctgctagattaattttgctaaaataacgttttgcactcctcttttcctgtttaaaaacatgtagtgactcaccatcagttttagaaatcgatttaaaggacttcatgaaactggtttcaggccacccacagtttggcccatacctatctcctgttctccttcataaacctttcaaatctagccaaattgctttgttctttgtccctggagtatggctttctctttcttctttctttcttttttttttgagacacagtttcgctcttgttgcccaggctggagtgcaatggcacgatcacaacctccacctcctgggttcaagcgattctcctgcctcagtctcccgagtagctgggattacaagcatgtgtcaccacacccagctaattttgtatttttagtagagacggggtttctccatgttggtcaggctggtctcgaactcccgacttcaggtgatctgccggcctcagcctcccaaagtgctgggattacaggcgggagccactttgcctggcctggaatatgcctttttctattgctgtgctttattctgatttttgttttagaatagctttcaaatcttattctgtttctttaatctctcttgtgtctctctttatgccttctgggcttcacatggggactggtgtggttgtaaaggccccctgagttgagatgtggaagcaccctctgttacagagtgagggattgactcactgaaaagaactattcaagtcattcctgaattgcttacctttggtacttcttgatttagtaaagtagatttcctgttttcatatgaaaagcataattgaatcatagagcaggtactaggaatcagactgtctgggtgtgaaaccccactctgacttttactagctcttgaccataggcatagtttccgtatctctaaatgcatgtaagggtccctgtctaccttgtagggtggttgtgaggataaaaacaatacacagcacatgataagagctcaatgaatattagctgctgcctttgttattcgtattcatattattgtagatattttctgatgaatttgatactcgttcaccatttacttcaacacatttcaagttaaaagatatttcctgctttgagaataaaattatttcaagttaaaataaaaattaatctaatatacccttaagtagtaatgaggcatgtagttagtgcactgaagtagttatgtgcttcccaaagtgggaacttaaaacaaaggaatcttttaagcttaacaattccttatgttagtcatataattatcccttttctcagaagcctggggccaaaaggatctgttcctaggagaaaggaactgtctctcctggcttaacaaagattcagtttaaaggctagctaccctctgagtcatactgctttctgatcttggagtgcttgcctctgtcccatgagaaagaaaggtggatgaacagcacttgcaggaaggaactttcatctttcttgaagccaatccaaggcctcagatgcagaaagaatgcctaccttacctcttcaggggaaaaggggtttgataaaggtgctctacataatgcgaatctgttttcattaattcatgcattcatctactcttttattatgcattcaattcctcaaccatttattgagtatatacctggtgtcaagcactgtgctagctactggacacgtcaaaaggaaagaatgagattttgtcctctgccttgagattaaggtagtttttttgtttgtttgtatgttttaacataccaagtccagtgaaatcttaaaatattttttatatggctgggcgcgttggctcacgcccgtaatcccagcactttgggaggccgaggcgggcagatcatgaggtcaagaaattgagaacatcctggccaacatggtgaaaccccgtctctactaaaaatacaaaaattagctgggtgtggtggcaggcacctgtagtcccagctactctgaaggctgaggtaggagaatcgcttgaacccaggaggtggaggttgcagtgagccgagattgcaccactgcactccagcttgggtgacagagtgagactccatcac

SEQ ID NO: 1679 - DNA, 3686 bp, Homo sapiens
ttcagaggctgcgtctttcaggaggccagccaccattggttcaggcaatcttcagcggtgatccagaggagatccggatgctcatccataaaactgaagatgtgaatactctggattctgagaaacgaacccctcttcatgtggccgcatttctgggagatgcagagatcattgaactcctgattttgtcaggagctcgtgtaaatgccaaggacaacatgtggctgactccactgcaccgggctgttgcttccagaagtgaagaagcagtacaggttttgattaagcactcagctgatgtcaatgcaagggacaagaactggcagacccctcttcatgtggcagcagccaacaaggctgtcaaatgtgcagaagtgatcattcccctgctgagcagtgtcaatgtctccgaccgaggggggcgcacagccttgcaccatgcggctctgaacggccacgtggagatggtcaatttactcttggccaaaggggcaaatatcaatgcatttgacaagaaggaccggcgtgctctgcactgggcagcatacatgggccacttggatgttgtagcattgctcattaaccatggcgcagaagtgacctgtaaggataagaagggttatacccctctgcatgctgcagcctccaatggacagattaatgttgtcaagcatctcctgaacctgggggtggagattgatgaaatcaatgtctatggaaatacagcgcttcacatcgcctgctacaatggacaggatgctgtggttaacgagttgattgactacggtgctaacgtgaaccagccaaacaataatgggttcacccctttgcattttgctgctgcctccactcatggtgctttgtgtcttgaattgttagtaaacaacggggcagatgttaacattcagagtaaagatggcaaaagtccactgcacatgacagctgtccatggaaggttcacacggtcacagaccctcattcagaatggaggtgaaattgactgtgtggataaggacggcaacactcctctccatgtggctgcaagatacggtcatgagcttttgattaacaccttaagaaccagcggagctgacacagccaagtgtggaatccatagcatgttccctttacatttagctgccctaaatgctcactctgactgctgcagaaagttgttatcatcgggctttgaaatagacaccccagataaatttggaagaacgtgccttcatgctgctgctgcaggaggtaatgtggaatgtataaaactcttgcagagcagcggagcagatttccataaaaaggacaagtgtgggaggacccctttgcactatgcagctgcgaattgtcatttccactgtattgagacattagtgaccacaggggccaacgttaatgaaacagatgactggggacgcacagctttgcattacgccgctgcatcagacatggatagaaataagactatcttaggaaatgcccatgataattcagaagaacttgaaagagccagggagctgaaggaaaaggaagccacactatgtctagagtttctgcttcaaaatgatgcaaatccatctatccgggacaaggaaggttacaatagcatacattatgctgccgcctatgggcacaggcagtgtctggaattgcttttggaaagaacaaacagtggatttgaagaatcagattctggtgctactaagagtccactccacttagctgcctacaatgggcaccatcaagccttggaagtccttctgcagtcgttggtggacctggacatcagggatgagaaaggccgcactgctctggatctggctgcctttaaaggacacacagaatgtgtggaagcgcttatcaatccgggcgcatccatctttgtgaaagacaatgtaaccaaaagaaccccacttcatgcctcagtaattaatggtcacacactgtgtttacggctgttgctagaaattgcagacaacccggaggcggtcgatgtgaaagatgccaaaggacaaacaccactgatgcttgcagtagcatatggacatattgacgctgtttcattgttacttgaaaaggaagccaacgtagacactgttgacatcctaggatgcacagctttacacagagggattatgacaggacacgaggaatgtgtgcaaatgctgctggaacaagaagtgtcaattctctgtaaagattccagagggaggacgcccttgcactatgcagctgctcgtggccacgccacgtggctgagcgagctgctccaaatggctctttctgaggaggactgttgtttcaaagataaccaaggctacacgccgctgcactgggcttgttacaatggtaatgaaaactgtatagaggtacttttggagcaaaaatgttttcgcaaatttatcggtaatccctttactccactgcactgtgcaataatcaatgatcatgggaattgtgcatcattgctgcttggggccatagattccagtatcgtcagttgtagagatgacaaaggcaggacaccccttcgtgcggcagcatttgctgatcatgtggagtgcttgcagcttcttctgagacacagtgctccagtgaacgcagtagataattcagggaaaacagcactgatgatggctgctgagaatgggcaggcaggcgctgtggatattttggtgaacagtgcccaggctgatctgactgtaaaggataaggacttgaatacacccttacatttggcttgtagtaaaggtcatgaaaaatgtgccttgttaatacttgacaagatacaagacgagagccttattaatgaaaaaaataatgcactgcagacgtaagtgtaactactaaagttggacttgaacccagggtcatagtcatttattcaataagtattaagagcctgctgtgtgccagactagctctggggagcacagtggtgaaagatgcagtcctggcttcccctgcatgaaggtgacagtcacatacctacaagtgctgaccaagctgggcagttttagttagaatcctccttttgatatgtcttcatttaattttgtgaagtctctgtttttctttgctgatatttctggggtaatattataaatttagtgggctgttagaaaaattttatggactgacatatttggggaaactatttgtattatgtattagcattatgtattctgactggaaaatgacagttttgcaaatcaggttcccagaatacatttgaagagtttctaagctatttgtcttgattatattttaatataattcagtgtaacccttggtgtgaaagatctaaaagctgtttcattttccgctttaggaaattatttatgcatttgttttaaaggcaaaggaatttttttcatttaagattcttaagccgggcgtggtggctcatgcctttaatcccagcactttgggaggccgaggcagttggattacttgaggccaggagttcatgacccgcctggccaacatggtgaaaccccgtctctactaaaaatacaacaacaacaaaattagctgggcatgatggtgggtgcctgtaacctcagctacttgggaggctgaggcaggagaatcacttgaacctgggaggtggaggttgctgtgagctgagatcgtgccactgcaccactccagcctgggcaacaagagcgagactgtccccccac

SEQ ID NO: 1680 - DNA, 2396 bp, Homo sapiens
aaaaaaaacaggcgcttccgcacattcttcgcgcgcgccgcccctttcctgccccttcccagccggaggagggtccccgcgcgaccccccttcctgccccgcggcaggcggagcccgcacctcggcaggaagtgggggccgagccgaggccacgctgagtccgaggccgagtcgcctgcggctgtcctgtcattagtgcccgggtcggcgggactaggcggacccggccggagcccgctggggcagctgtgcctagctacaggaaagacctgcgccaaccctggatcccgctgcgtgggagagggcttcggggatccgactggtactggacacccccccgatcacccgcagggagccccgcgcggactcactctatgatgtccctgtcggtgcggccgcagcgccgtctgctcagcgcccgggtcaataggagccagtccttcgcaggcgtcctcggcagccacgagcgggggcccaggagtttcccggtcttcagcccgccggggcccccacggaagccccccgcgctctcccgagtgtccaggatgttttccgtggctcacccagccgccaaggtgccgcagcccgagcggctggacctggtgtacacggcgctgaagcggggcctgacggcctacttggaagtgcaccagcaggagcaagagaaactccaggggcagataagggagtccaagaggaattcccgcttgggcttcctgtatgatctggacaagcaagtcaagtccattgaacgcttcctgcgacgactggagttccatgccagcaagatcgatgagctgtatgaggcatactgtgtccagcggcgtctccgggatggtgcctacaacatggtccgtgcctacaccactgggtccccgggaagccgagaggcccgggacagcctggcagaggccactcgggggcatcgcgagtacacggagagcatgtgtctgctggagagcgagctggaggcacagctgggcgagtttcatctccgaatgaaagggctggctggcttcgccaggctgtgtgtaggcgatcagtatgagatctgcatgaaatatgggcgtcagcgctggaaactacggggccgaattgagggtagtggaaagcaggtgtgggacagtgaagaaaccatctttctccctctactcacggaatttctgtctattaaggtgacagaactgaagggcctggccaaccatgtggttgtgggcagtgtctcctgtgagaccaaggacctgtttgccgccctgccccaggttgtggctgtggatatcaatgaccttggtaccatcaagctcagcctggaagtcacatggagccccttcgacaaggatgaccagccctcagctgcttcttctgtcaacaaggcctccacagtcaccaagcgcttctccacctatagccagagcccaccggacacaccctcacttcgggaacaggctttctataacatgctgcgacggcaggaggagctggagaatgggacagcatggtccctgtcatctgaatcttcagacgactcatccagcccacagctctcaggcactgcccgccactcaccagcccctaggcccctggtgcagcagcccgagccccttcccatccaagttgccttccgcaggcctgagacccccagctctgggcccttggatgaggagggggccgtggccccagtcctggcaaatgggcatgcaccctacagtcggactctgagccacatcagtgaggctagtgtagatgctgccttggctgaggcttcagtggaggccgttggcccagaaagcctagcctggggacctagcccacctacacacccagctcccacccatggagagcaccccagtcctgttcctcctgccctggaccctggccactctgccacaagctctaccctcggtacaacaggctctgtccccacatctacagaccctgccccatctgcacacctagactcagttcataagtccacagactctggcccttcagaactgccaggccccactcacaccactacaggctctacctatagtgccattaccactacccacagtgctccaagccccctcactcacactactacaggctccacccacaagcccataatctctacccttactactacaggccctaccctcaatatcataggcccagtccagactaccacaagccccacccacactatgccaagccctacccataccacagcaagccccactcatacttccacaagccccacccatacccccacaagtcccagcctcggctcagcacatcccttgccacaaatcagtgtctggggcttggccaccctgccgctgcccagccacatcccttggttttgtattttatttacagagttttacagaaaataaaaaagcaaaatgtctttc

SEQ ID NO: 1681 - DNA, 1851 bp, Homo sapiens
atcttctacgcccctgggagcgttgtggctgctgtttccttcggctttcctcctcctgctccaccatgtggagccgacggcagggccgcctcaggcccacggtctgcggggtggaggagctacggcgccgccggcgggagcgggaggcagcactgcggaaggcgcggagggagcagcagctggtcagcaagaggctgctgagaaacgacgccccagaggaagctggagagggatgtgtggctgcgatcctcggggaaaccgaggtgcagcagttcctgcggcaagcccagcgggggacagaggaaaaggagagagagggggctctggtcagccttcgtcgaggcttgcagcaccctgaaacacagcaaaccttcatccggctggagggcagcatgcggaccctggtcgggctcctgaccagcaaccaggccctgctgcagcttgaggcggctcggtgcctgcatgagctctctcactccgagcagtccactgttgctgaggcctgcctgccagccacttcttacctcctcacctacctctccagtcacagctcagacttcatagagctgtgtctgtatacactgggtaacctgatcgtggagagtgaggctgtgagaaggcagctcctgccacagggcattgttccagccttggctgcctgcatccagtccccccatgtggctgtgctggaagctctcggatatgccttgtcccagcttctacaggctgaggaagctccagagaagatcattccctccatcttggcctccactctccctcagcacatgctacaaatgttgcaacctggcccaaagctcaaccctggggtcgctgtggagtttgcctggtgccttcattacatcatctgcagccaggtcagcaatcctctgctcattggccatggggctctgtctactctggggttgctgctgttggacttggctggggctgtccagaaaaccgaggatgcaggactggagctgctggcatgccccgtgcttcgatgtctaagcaacctgctaactgaggcagcagtggagactgtgggagggcaaatgcagctcagagatgagcgtgttgtggcagccttatttatccttctgcagttctttttccagaaacagcccagtctgctccctgagggcctttggctcctcaacaacctcactgcaaacagtcctagtttctgtacctccttgctctccctggatctgattgagcctctcttacagctgttgccagtatctaacgtggtgagcgtaatggtgctcacagttctgtgcaatgttgcagaaaagggtcctgcttactgccagcggctgtggccagggcccctgcttcccgccttgctgcacacactagccttttctgacactgaagtagtaggccagagtttggagctgctgcatctgctgttcctgtatcagccagaggctgttcaggtcttcctgcagcagtcagggctgcaagccctggaaaggcatcaggaagaggcccagctccaggatcgtgtgtatgctctccagcagacagctcttcaagggtgatcttgtttctcaatgtcactcattcccctctctcttaacatcaagcttgtttgtccagtagagcctttggagatttaggaccataatgaggtctcatgttctctgctcccacacctaagccaagacctttgggtcccagctcctccccttccactcagcactatccaggcaggaggaccaaaagggactcagtgtggtctacttactctggggccctagaatccctgcccccccgccacccttcatgtttgcttcagcagctggtagcttttgatgagacagaataaagttttatttttatatt

SEQ ID NO: 1682 - DNA, 2750 bp, Homo sapiens
agtgctccctaccctcacctcaagacgaccatggccaccatcccagactggaagctacagctgctagcccggcgccggcaggaggaggcgtccgttcgaggccgagagaaagcagaacgggagcgcctgtcccagatgccagcctggaaacgagggctcctggagcgccgccgggccaagcttgggctgtcccctggggagcctagccctgtgctagggactgtagaggctggacctccagacccggatgagtctgcggtccttctggaggccatcgggccagtgcaccagaaccgattcatccggcaggagcggcagcagcagcagcagcaacaacaacggagtgaagagctgctagcagagagaaagcctgggcctctggaggcccgggagcggagacccagccctggggagatgcgggatcagagccccaagggaagagagtcaagagaagagagactaagtccgagggagaccagagagaggaggctggggatagggggagcccaagagttgagcctgaggcctctggaggctcgggactggaggcaaagcccaggagaggtgggagacaggagctcccgactgtcagaggcatggaaatggaggctgagtcctggagaaactccagagcggagtctgagactagcagagtctcgagagcaaagccccaggagaaaagaggtggaaagtagactgagcccaggggaatctgcctaccagaagttgggcctgacagaggcccataaatggagacctgactccagagagtctcaggaacagagtttggtacaactggaggcaacagagtggaggctgaggtcaggagaagaaagacaagactactcggaagaatgtgggagaaaagaagagtggccagttccaggggtagctccaaaagagactgcagagctgtccgagaccctgacaagggaggcccaaggcaacagttccgcaggagtggaggcagcagagcagaggcctgtggaagatggcgagaggggcatgaagccaacagaagggtggaaatggaccctgaactccgggaaggctcgagaatggacacccagggacatagaggctcaaactcagaaaccagaacctccagagtcagcagagaagcttctggaatctcccggtgtggaggctggagaaggggaggctgagaaggaggaggcgggggctcagggcaggcctctgagagccctgcagaactgctgctctgtgccctcccccctcccaccagaggacgctgggactggaggcctgagacagcaggaagaggaagcagtggagctccagcccccaccaccagcccctctgtctcccccacccccagccccaactgccccccaacctcctggggatcccctcatgagccgcctgttctatggggtgaaggcagggccaggggtgggggccccccgccgcagtggacacaccttcaccgtcaacccccggcggtctgtgccccctgcgaccccagccaccccaacctctccagccacagttgatgctgcagtcccgggggctgggaagaagcggtacccaactgccgaggagatcttggttctggggggctacctccgtctcggccgcagctgccttgccaaggggtcccccgaaagacaccacaaacagcttaagatctccttcagcgagacagccctggagaccacgtaccaatacccctccgagagttcggtactggaggagctgggcccggagcctgaggtccccagtgcccccaaccctccagcagcccaacccgacgacgaagaggatgaggaagagctgctgctgctgcagccagagctccagggcgggctgcgcaccaaggccctgattgtggatgagtcctgccggcggtgaccatcttccaacatagggatatacctccctccttcttataactgaagatcctggagcccggaagattcagggcagacagaccctgataatgagcctggcagggaagggcaaccaacatcttgtaacttgctttccccaccctgtttctgggggcagagccaattgcccaatttctaccctaatccaaagtccctggtgtgggtggggttaaacgtgctggtgcatcctaggtcatccaagagtgagcgccaagtcctgagaaggggcacagaactccctggagggtggagatggagcacctgccccccatggcagggtacactctccccacagccttcctccccaccatcccgtggggactctcgggatttaagcactcgtctctctgggaggcccagaccccactccatttataggcacatctccttcatttcctaggtcactgcccctttgtttacagctcctgcctcctcccttgaccacagcctggtttacaaattccatcagctcccagccccacctgccaaagtcccaggtttacaagccacgcttacttgctgtgtctgcgtggaattctctcctctgtcccctccagtctcctcattggagtgacctgaaggtgtggcttcctccactttttctcagtattactttgccttagttttccccaagagggaaggctggaactcttaactctgtaccccttgatagttatttaattctgtttctcctagtggttcacaattgaactgaattgagatggtgtcgggtggctaaggagacacctcacctctccttccccattgtgccgcctttatcaattgcctgttttgttttgtttgttttttaactttccataataaaatggagttctcttc

SEQ ID NO: 1683 - DNA, 3224 bp, Homo sapiens
ataatgcagagcatgtgaagggagaccggctcggtctctctctctcccagtggactagaaggagcagagagttgtgctgtttctcccattctttacagctcaccggatgtaaaagaactctggctagagaccctccaaggacagaggcacagccacacgggagtgaaatccacccctggacagtcagccgcaatactgatgaagctgagaagcagccacaatgcttcaaaaacactaaacgccaataatatggagacactaatcgaatgtcaatcagagggtgatatcaaggaacatcccctgttggcatcatgtgagagtgaagacagtatttgccagctcattgaagttaagaagagaaagaaggtgctgtcctggccctttctcatgagaaggctctcccctgcatcagatttttctggggctttggagacagacttgaaagcatcgctatttgatcagcccttgtcaattatctgcggtgacagtgacacactccccagacccatccaggacattctcactattctatgccttaaaggcccttcaacggaagggatattcaggagagcagccaacgagaaagcccgtaaggagctgaaggaggagctcaactctggggatgcggtggatctggagaggctccccgtgcacctcctcgctgtggtctttaaggacttcctcagaagtatcccccggaagctactttcaagcgacctctttgaggagtggatgggtgctctggagatgcaggacgaggaggacagaatcgaggccctgaaacaggttgcagataagctcccccggcccaacctcctgctactcaagcacttggtctatgtgctgcacctcatcagcaagaactctgaggtgaacaggatggactccagcaatctggccatctgcattggacccaacatgctcaccctggagaatgaccagagcctgtcatttgaagcccagaaggacctgaacaacaaggtgaagacactggtggaattcctcattgataactgctttgaaatatttggggagaacattccagtgcattccagtatcacttctgatgactccctggagcacactgacagttcagatgtgtcgaccctgcagaatgactcagcctacgacagcaacgaccctgatgtggaatccaacagcagcagtggcatcagctctcccagcaggcagccccaggtgcccatggccacagctgctggcttggatagcgcgggcccacaggatgcccgagaggtcagcccagagcccattgtgagcaccgtggccaggctgaaaagctccctcgcacagcccgataggagatactcagagcccagcatgccatcctcccaggagtgcctcgagagccgggtgacaaaccaaacactaacaaagagtgaaggggacttccccgtgccccgggtaggctctcgtttggaaagtgaggaggctgaagacccatttccagaggaggtcttccctgcagtgcaaggcaaaaccaagaggccggtggacctgaagatcaagaacttggccccgggttcggtgctcccgcgggcactggttctcaaagccttctccagcagctcgctggacgcgtcctctgacagctcgcccgtggcttctccttccagtcccaaaagaaatttcttcagcagacatcagtctttcaccacaaagacagagaaaggcaagcccagccgagaaattaaaaagcactccatgtctttcacctttgcccctcacaaaaaagtgctgaccaaaaacctcagcgcgggctctgggaaatcgcaagactttaccagggaccacgtcccgaggggtgtcagaaaggaaagccagcttgccggccgaatcgtgcaggaaaatgggtgtgaaacccacaaccaaacagcccgcggcttctgcctgagaccccacgccctctcggtggatgatgtgttccagggagctgactgggagaggcctggaagcccaccctcttatgaagaggccatgcagggcccggcagccagactagtggcctccgagagccagaccgtggggagcatgacggtggggagcatgagggcgaggatgctggaggcgcactgcctcctaccccctcttccacctgctcaccacgtagaggactcaagacacaggggcagcaaagagccactccctggccacggactctctcccctgcctgagcgatggaaacagagcagaactgtccatgcttctggggactctctggggcacgtgtctggcccagggagacctgagctcctcccgctgaggaccgtctccgagtccgtgcagaggaataagcgggactgtctcgtgcgacgatgtagccagccggtctttgaggctgaccaattccaatatgccaaagaatcgtatatttaggagggaggccatacgccatgccatagcttgtgctatctgtaaatatgagacttgtaaagaactgcctgtagattgtttttaaaaggtcttgaataagctccttgagaaagttgtggaaagccctcctcagtgaggatagctacaccatggccatggcgcatcagatagtctctgtgtacctggatttgtgcaatatgtaaaaatgtatcaaatgtattatagataaggtgttaggtgcaaaggatgtctaataatccctgcacacgttttgaacttgcagtgaagtacactgctgttccttgcttcctggggcacttttctcttggttagtgtttaaaaattatcttcgcttttttaatgtggcctcaaatgtcatgccaattttcacatcttccacaaactccatttagggagaaatgtttaaatctctggtataagtttactccataccagagtaaactatatattactctatataagcagtcttgcaataactaatcaccaccatagaagaaagaaacagactgcaaggaacagagttgagtgtctggagtcatcaaaggcattaaaaactccagtaaaagctggggccgtagcaaaaatcatgaaaaacacttcaacgtgtcctttcaatcatccaattaaatgtgggtagattaatgaaaatgtattacatcaatattaactcatctatagcactttgagtatctttgtagttcatgatatcctatcctataatgtggaggtaaatgattttatatgcattgggggtcatatataaaacttcaatgtaatttcactacaataaattgccttccttatttgaaagt

SEQ ID NO: 1684 - DNA, 3493 bp, Homo sapiens
atttcccccaaaatcacatccacagaatttgcgttattttaaacagcatcatttgccccaaaatgcggcatgacccatggttggggactcagagtgggtgggtctgtcatgttgaccctaccttaaggtgcccagaccccaccctcttcatttgccctgtttttcccatcagttcgggttcactctttctggtgtcattcctttttgcaagcactgcttcctggtattattgctatgggatccttggggtgtcatttcaccagccggaaacctctgtggccagtggcgccttggcctgagttttgctctggcccattaggctcgttccacccacttggaacctagcaggctgcactcagctcatgctaccggcctagatcccatgcctgccaagggcgagccaggcacagagtggtgagggatgtgtgagtgagcgtggggtctggccactgcgcataggcaggcacgccggctgctgctgcaggccaggcagctccaggtgccacctccttgcaaggctgtggctggaccaggcacatcacaagcagcttccacggttggcaccaggaacatgatgttgcccagaagcttggagactagggagtcactgccctggctcagggggctcccaggacagagctccccaaagggccgcagctcttcacctgctgtgtggcaagcaagaagcgtgtttcagcctgtttgtgttacagctctcttagccccaccatttggcaggtctcaagttcttgtcctgcgttcaggaagaatgaggtacacagagaagtagagggtgagcaagatgaagaggagctttattgagtgatagaacagctcagagttgaactgcagggggcagttcctctctgcaggcaggttttccccgtcatctcttgtgctctcagcagagagggtagctcctctctgccactggtcgtcccattgtctcttcaagtctggctaagtccggggcttttatgtgcctcagaggagaggaaatgcgtgcagttggtccatgggcagtcatggacagacccagaaaagcaccacaagttcccactccagtccacatgactggcaacctggcccccaggcttcagggcttctctggcttgaaggtggggcttcaccggggacctccccttttctgcccaggagcttctttgctccctgcttctgtttatggcacccaggctgttcatgctgagggggcacctgcaggccggcaccaagctgtcctgagcaccccttcctcagcctcccttccatgcttattggcacccaaagtctggagcaggccaatggggtaggaggtgggcatatcagcactgcctcaagcgtgtgcacacccaaccaggttacagcagagcccaggctcagccccagccttgctttgagattggagcaggtgctgacagcagggagaagccaggcagcaggagcaggtgcttcttgagcccgtggggggaaaggggccttcctggacccctgagagtgcagagatgcctggatctgcagccacagcagggtagctacagtgatgcctgggagggcaggagcgctcctgcctgctcccagcttccaagagcacaggggtgcctgggtcacagctgcagcttgggcagctgcaggcagttgtgcctggtaagctcccacaccgtcaacttggaaagggcagggctcgtgcttgtccccagctcccactggctccatgaagtgtggcaccacccctggcccagctctgcctcagggcccctctctacccactcctgcatgccctagtgtgctgttttcccctgccagcaggtgactcagcctggccccatcgcagtggctctcatgacggcaggtttcagggactgcccacctcctctccatgttttcccagcagcaacagcaggcaaggtgcaggtagtgcagtggccctggccaaccctgcacacatgaacctgacactctcaggactagccccacaagtcccggctgcaccttcagctgggtgctcactggctcctttctgaatatgaaatcttctcctcttccccaaatgaaaacagacgctcttgccaaatgtagtttggacattgtacctaaaaatcaaaatctaactctaggaaaagaaggaagaagtgaggtttcatggttcattagtgaaaggcacagaggtcttaaaggggacagaaacgtctaagaaaaaggagaaactctagaaaagcaaggaagaaatagggtaggcaccctttatttttactgaacatgacagagtgagccaaaattgaatagaaggtattggtgctcaaggttagggagagccacagtgggtagggtgggaccgttaccttcaacagaaccgagggtgttcccgtgcccttcacgcgctcttacgtgactcttccacgtgattgctcctgtccctgtggtaaccaaagacgagttagctcgcctgggacagatgcgtgaagaggactgttgactaaatgaaccctggtagctggagaaatgtgtggccacaagcaggagtgacaattagtattcaccacggtccttgcagaaggtcttcccaggtgctctctgtttaccccagcccttgtctttctcgtcagtgttatgttttagatccctgaaggctgacagctgagaggaaaggttccaattgcatttttccatgaaatcttatcttcattattattggccttttcagggaaaacaagtccaacctggaagaagacttccttctaaaccaggcagacgaagtcaaattacaaatcaaatgtggtcgttgtcagattactgctcagtcttttgcggaaataaaatttcatttacttgatgttcatggagaggaaattgagggcaggctacaagaagggaccttcccaggaagcaaggggactcaggaagagttggtgcagcacgctagccccgactggaaaaggcatcctgagagagggaagccggagaaggttcattcctcctccgaggaatcacatgcatgtccaagactgaaaaggcagctccaccttcatcagaatggcgtggaaatgctcatggaaaatgaaggaccccagtcaggaaccaacaagccaagggaaacctgccagggccctgagtgtcctggcctccacacgtttctcttgtggtcccattcaggctttaactgcctgctttgtgcagagatgctgggacggaaagaggacctcctccaccactggaagcaccagcataactgtgaggacccttccaaactgtgggctattttaaatacggtctccaaccagggagtgatcgaactttccagtgaagctgagaaatgagaccccaaggcagcctggggttaaggagagagctctgccgccaccttccttcagagcttcgtgctttatggtggtgcttagtcacaaagatcaaacaacaggattggtgtgagtgaacagaaatgatttttgtacatggttttattttcttaacgaaataaaatataagctctcgaagc

SEQ ID NO: 1685 - DNA, 2161 bp, Homo sapiens
acgctcccctgccgccccgcctgttcgcgggtgggtgggcgcttccctcggctccccgtgacactttgcagacgctccccggcgccgggcatgggcgccgccgccgtcggtccccgagccggattccgcgagcgggtgggtgagcgcggggggcctcggcccctcggaccccgggcacccgcgggcgggggatggtggccgcgtttgcacccccgccctagtgcatgttcccgctggaatcgttccacgaccgctccccctcccacccgcgggacaaagggcgggggcgggggggggcgcacccccacgcgtgacctttccccgtactgcgcacgcgcccagcccccaccaccgggggacggtccgcccgcccgcgcgagtgcgggggaggggtgtgggggccccgaaggtagaggaggcagcgcgcacgggctggacctcctcctaccctgggaagttggggcagtttccccctgcacctgcctcttccttaggcctggcagtggcccgcgatgagagagggtccttccccttcaggctaggtgtccctggtcaggcgaccccttggggcacccagcaatttagggcttcagcttccttttccttcgatacccaggagcccacgtccccagctcacttctcccccaggacctaggcggctgggccccctgcccctgactccaggagcccaggagtttgaagcccaggcgcgttttgcctcagtcctggggtccaggctccctcctccctcagaccaggggtccaggccagaaggtccctcctgtctcacttcacctcccccaggatggaccctccagtccatctgcgtctctccatttgtggctgccgtttctgtccagtgcccctgaggccctcggctgctggggtccgcaggaagccgcgccatgaatgaccggagcagtcggaggcggacaatgaaggacgatgagaccttcgagatctccattcccttcgatgaggcaccccacctagacccacagatcttttacagtctgagcccctctcggagaaacttcgaggagcctccggaggctgcgtcctccgccctggctctgatgaacagcgtcaagacccagctgcacatggctctggagaggaactcctggctgcagaagcgcatcgaggacctggaggaagagagggacttcctgcggtgccagctggacaaattcatctcttctgctcggatggaggcagaggaccactgccggatgaagcctgggcccaggcggatggagggggacagccgtggtggggctgggggcgaggcctcggaccctgagtcagcagcctcctccctcagcggagcgtccgaagaaggcagtgccagtgagaggaggcggcagaagcagaagggaggtgctagtcggaggcgctttgggaagcccaaggcccgggagaggcagcgagtgaaggacgccgacggggtcctctgccggtacaagaagatcctgggcaccttccagaagctcaagagcatgtcgcgggccttcgagcaccaccgcgtggacaggaacaccgtggcgctgaccacgcccatcgccgagctgctcattgtggcccccgagaagctggccgaggtgggcgagttcgacccctccaaggagcgcctgctcgagtactcccgccgctgctttctggccctggacgacgagacgctcaagaaggtgcaggcgctcaagaagagcaagctgctgctgcccatcacctaccgcttcaagcggtgatcgcaccacgcctccgcgcctccacccgggccttcctcccccgtggaccccggtggatgacctgcccctctccccgccgcgcccctgcccctcctcctcgctccctgggttgggggctcccttagccgggcccccaagcgcgacggccccggaccggccgcggccccttcccgaacgccggcacccccttccgcttgggctgcccagccctgtcctcgccgggccccttcctcctggaaaaccaggcaggcgggtgccccccccctcgagtgggggactgtacagaccccgtctccgccctggccccgcggaggagctgcccacctgattcccggacagacctccccaactccgcgtgagacagagaattattcagataatttaaattaaaaaacgacgtgaaaatttggaat

SEQ ID NO: 1686 - DNA, 1727 bp, Homo sapiens
gaagaatttgggggattttgcaaatgacctgaagcctgagaggaagtgcaacactgcagggctctcaggagggggtaccctgctgacgcctgtgactaggcctaaccttctggggttctgcggcccagtgctgcacactgtcatctgccttgaggtgcgcctggggtccagattggccgatgaatacgtacacccgcagcgcctccttcactccgaagactttcactttcccccttgcacaaaaccgaacatcccaccccaccaccacctccaagctaaaatacctgggccgcccctccccacgaagggacgcgctccaggcgaatggggagggcccggaagtcgggcctgggacagaggagccggcccaccgcctcccggtcggaagcggcagtgcaggtgaggcggcggccagcccggggactgcgcgggtaaggagcgggagggcggaatgcaccgcgaagttggcgggggacggccacgcacgcctcgcctcggccttcctgcaccgtagggccgccctcccgccacccctgggcacctgtcgaccacgtctgggcgagggcgggtcggctcccgccctcgggccctcaccgcggcggggacgccgggtcagcgaagggttaagggactcgctccctcctctcggctccctcacccttggaaagtccccgaaatgacgtttcaacccgacaatttaaaaaagagtttaattatagagacaggctctgggagctggaacaaaccctcggtcggcggggccggtaaacaactcgggagcgagcgggctaggccagtcgcagccttgcggagcccgcgcccccggggagagggggaggggagggcctccgggagttggaaaagccgaggaaattcgaggaatcagctttctttggaaaaatccactttgtagccattctggggcgcctgatggtgctcctggccggtcccgcagccttggagggaaagcggcgccgcccgaagcaggggcatagccggtgccccgcggggacaggccctgggccgggaagggggccccgcccgctcccagtccccttcccctttgcttttttccagcccctcctccggtccccccagctgagcttcgcgaaccctcgggagttaaagaccagccggcctcttttttggggggggtggggggtgggggagcgggaatgggtggaggccgggggaataaaaaaccgaaatagcttcacatcagaactcagactaaccttgtggtttcaacgcgcactctgctctgtcctgaaatctggaactcattacctcatcaccaagaaactgcacgaaatctctcccccaccgccccaacacccacttgggaaaggaacgagcaaacatccctctaagaaagaaacctacacttgaatgatttaaattaaggtggatggaagttatttccctttctggcgcttgccagatttcaagaaaagctgaaaaatgggagcgggggagggaagcaacagacggctggagggcagcagcagaacaagcgaggggcagcagccgagttaaagtgggggccatccatttcgggcagaggagacaaatgaaagccgaccccgctgggatcacgtaggttcgtggctgcagcaaaagttgggtttcacaaagttgaaaaacagccggtttctcaaacaattgtgatttggaaggtttcgctgggtttgcccagatgtttacgaataaataagaaacgcagtttt

SEQ ID NO: 1687 - DNA, 2619 bp, Homo sapiens
cttaagatccttaagctcttgctgaacttcctttttcaatgaaaagaaggaccatcatcctaggatggtcaccagcccaagccaccaccccagccacccatccaggaggttggttccttttgcccagttcatagcagctcagtccttaccagatggattcttggtgttgggaagcagcctctttttattcctgaaaggcaatgccctgtccgtttgcagtagagaatccccagggagcaagaaagatgacagaagtgtggctgccgtgtttctaggtcatgagagctctggcgatactaccacaaggcctgcacgtggactctatgataacttgagtcttccatcatgtttgccaccagccctccctgagtgcccagaggagatgggggcagagtcacttggcctactaaagcctcctgttccttctggctcatgcattgctttgtggtaagagaaaggaagtctttagaacagcgcctgggaatcagcccttctccctactgagtccccagtcctgtcccttccctgactcgctcctcctccaaccttggtttctatagctgcattttttttttttttttttgagacaagatctcattgtgttccccaggctgaagtgcagtggcatgattctggctcactgcagcctcaaactcctgagtccaagctatcctcctgcctcagcctccgaggtagctgggaccataggcgtgcaccaccatactcagctaatttttaaaattttttgtagagatggggggggggtctccccatgttgcccaggctggcctcgaattcctgagcccaagctatcctcctgcctcagcctcccaaagtgctgaggttataggtgtgagccactgtccctggcctatacggtcattttttaaaagatattttaaaattaaaagcaaacaacactgtccacccatctacctgtccaggataaggcatatttggacggtgaacggatttactctcgttcatgcatttgagcgcttcacagaagagtctttcttgctccaggcatgacattttttttcaccagacgttcactgacttcgtgactttgaggtgagacatgggatctctcagaagcgtctctgcatctgcatttcaggagatgagctgctgtccctggtggacagaggcggtctctgccatggtcaccatgatgccctacaagtgtttattgagtcccctggggggcacccagaataccacccaaaatagcaagaagacccggtccccgccttgcggacgatgcactcacacgccacagcaacccattctcgcctcttccttggccgggaacccggggctctagggctgctcgctgctgctgtggcctgcgcagccacgggaggcttcctgaaaggcattgctcggaggggcgggggcggggaggcctagcctgccccacagacacagctgtgaggcctgggtcatacacataccagcaagcagctgccgagacaaatggtggtgggaagtcctgggaacacacacagcctttgcattgacagcacaagtaggatcagagcccaggtgagcccctgaggataccgaggccttccctccctgaggcccgcaagtctccatgcgtctcccgggagcctggccccgctgcagaaatcccttctcttcctccacaccctgtcctttccccaaaggctcgtgttatcagttccagctacccatcgactttcccaccgagccgctgccctcaaaacggagggggcaccgcagcctccttgagcctggcatcccaggccttgccaaaggggacggtggcttcctggataattggaaatctctgagaagaagaggaaacacctgagtgacactcagctgtcctctggggtcccctggtgtgcatgcacgtcctcctgaatacctgtacttccaagaggtggtctcctgttttcataacccaacactctgagataggatcttccaactttttagccccggctgtggaaagatagtgagtatgaagtctttgtgcatttggaagtgacatcgctgtgtggattatgaatacagagagctgccatcttcctgatcacaatagaccacgattgcaaagcctcctctcccagagaccccttctgcgcctgccctccccacccaccacccagctgttgaagctcggcgtgtgcaagtcagaccctgcacaggccgggggtgtctcacctggcctaaacgtaaaggcttgtgccggagacagtgattgaaaacatttgaaaagccagctctccctggcagagaaagacacttcccccccaaagtggaatttagatgtctttccctagtccatcaagaagtcatttttgtaacagtccctaagcgagtgttctcaattagaagagtttagtggcttttggtgttgttaaaataataagaatccttctagcatccaaagctttctaatttttttcagggagatttggacattaatgaatggaaacttccacggtggcggtcactcctgaaggcagcggcttctgttctcccgctgctgtaactctgtgtgttccgtctatcgcgtcacagtgccgctggatctagatggagccactgttgttgtttttaaaagagaaataaattccttaatgg

SEQ ID NO: 1688 - DNA, 2363 bp, Homo sapiens
tagtcccacctggagggtgggcagggccagataggagatgcccagaccgaccccggctgcctgcccgcagacccggactccttcctgaagtctgcacggctgcagcggctgccatcgtcgtcgtcggagatgggcagccaagacgggtcgccgctacgcgagacgcgcaaagacccgttctccgccgcagcggccgagtgctcctgccgccaggatgggctcacggtcatcgtcacggcctgtctcaccttcgctaccggtgtcaccgtggcgctggtcatgcagatctacttcggggacccccagatcttccagcagggtgccgtggtgaccgatgctgcccgctgcacttcactgggcatcgaggtgctcagtaaacagggatcttctgtggacgcagcggtggcagcagccttgtgtttgggtatcgtggctccacacagttctggcctgggcggtgggggcgtgatgctggtacatgacatccgacgaaatgagagccacctaattgatttccgggagtccgcaccaggggccctcagggaagagaccctgcaaagatcctgggagaccaagcctgggctcttggtgggggttcccggaatggtgaaggggctacatgaagctcaccagctctatggcaggctgccatggtcccaagtcctggcctttgcagcagctgtggcccaagatggcttcaacgtgactcatgatctaggtcagtggggcctggggatttgggagagacatgaggttgatggagaagggtagaatctttgagatttggagcccaagccagagaggccctctcttccagtttgctcctcagaccccctccccaccttatcccaccctcacctggaggcggcctcaaacgagggggtctgggaagggcccttagacatccctgcctcgcacttaacaggctcctgggggtcagggcacttagggtgggccactcagcccccatctaccccatctattgcgcgtctcatccggtccagtcctggcgtcccgccctgcccagcctcccgtccctgcccctagcccgtgccctggctgaacagctgccacccaacatgtccgagcgcttccgggagacgttcctgccatcgggccgcccgccactacctggctcgttgctgcatcggcccgacctggctgaggtgctggatgtacttggcacctccggcccggctgccttctacgcaggtggcaacctcacactggagatggtggccgaggctcagcacgcagggggtgtcataaccgaagaggacttcagcaattacagcgcccttgtggagaagcctgtgtgtggcgtgtacagaggtgacctctcccccggctcccagggtcccccctcaggagaagcctcccagtccatggccacatcgttttggcctagagactcctctccatttcacaggagagaaactaaggcagtgagctacctgggcagtcaactgttgaagcaaaccagagtcagcccaccttctgaaaagtagctgtggggtcagttaccccaagtatttaggatattggggggtggacctggtcaaagggtccaacctggaagttggggttctggccataggttttcttgatttgggctctgtgttgcctctgccctttccccagcagcgctgtcactgccctgtacttcctaagaatttttaagacaaagtccatccaagcttcacagtagaatgaacctttcaagacagtcatagacccagctcctcatagtgccaaaaagaaattgaggcccgaggagggaatataacaactggccaaactcaagaaaaccaacagggaacccagaaaaccaagcttatgacatgggtggggtccatgtttactgaacccaaggtggtaggtgctggatttctcagaagattctcaggttctttcccttctaggagagccagatcacatcaagccccaggaaagggtttctctgagttcaactttccaggcctcaatctccaacctgattcctctgccagaggcagtggaatatgaagcaatggaaagagcctatcagctgggtgcagtggctcaggcctataactccagcacattgggaggctgaggcaggaggatcacttgagcccaggagttcatgaccagcctgggcaacatagtgagacaccgtctctataaaaaatttaaaaattatccaggcgtggtggtgtacctatagtcctagctactcaggaggttgagatgggaggattgcttgagcctgggaggtcaaggctgcagtaagcatgattgtgccactgcactacagcctgggtgacagagtgagaccattatctcacacacacacacacacacacacacacacacacacacag

SEQ ID NO: 1689 - DNA, 2570 bp, Homo sapiens
gatccacaacaggaatcaaaagatgacacaatagcatggagagagtctcaggaggaggagaggaaaacgggcgaggaggaaggggaggaggaggagaaagaggaggaggggaaggaggacaaaaagattgtcatggaagaaactgaggaaaaggctggagaagtccaagagaaggaggcttcaggaatacaggaagaaaccacagtagagccccaagaagtcacagcgtccatgatccgtttggagacacagattactgattcccagtcaatcacatcaggaattttcccaaaaacccaaagaggtagcaagtcaaagctttccttacaattggaggatgcagaaacagatgagcttttaagagacctgagcacacaaattgaatttcttgatttggatcaaatcagtcctgaggaacaacagattagttcccctgaaaggcagccctcaggagagcttgaggagaaaaccgaccggataccccaagatgaactgggacaagaaagaagggacttggagccagaaaacagagaggagggacaagaaaggagagtatccgacatccagtccaaagcagggatctcccgggagtcactggtgtccagcaccacagaggacattctgtttcaaaaggataaaagcaccccggtgtatcccttgaccatgacctggtcgtttggatggaacagttctcttcctgtttactatattcgagaggaaaggcagagagttcttctgtatgtttgtgctcacactgcgatcatctacaatgtgttcaggaacaatcaataccaccttcaggtatgcagggatttccttcctacaggtgggggagttgtctttaacgtgcgtgtggtattttgttttgtatctcaagggctgacttcattctatcactgtcgtattttcccactctccttggaactaaaagcaagcctgtctttagaaacacatggtattgtttattgtctctctgtttctaatcagaatcaacttacaaaacagcagttgatattaattttatagtgagaatttaaaacatctgtattttttacacttctgcaaaaatgtggacagcgtagatcatatctccacagatataacacaaagggcagctattcagcagggtgccgacctcacggacacttacacacatctctagttttcaaagggctttcatcttataactgtaccgagaagtgggtattcatatacccattttacagaagaagaaactgaggctcagagtgttttaagtgacttgcccaagactgtactagtaaacaatgactctacatctcctgtcttgaaagtgttaagtaggtcagttgtccttttatccctccctcctctcagcagctttgctcattttcacccttctctgagcctcccccatttgtccttcatgcctgccctcctcacagcactctgcctcctttgttcctgatatttgggacccacttcattttcatcatttacctttccaagcatcctattccttggtgtctgactttccactcgttggcctggtcaactgttccacatcaccctttcagttgacgtgtgttgttacaggagtgtccttagctgatgcctagatcaaaaacaccacgaggtatttaccaaggacccagtcagtactcagtgttgtgccagggactcaagatgtctgggtgcaacttaaggaattcactctctagaagtccagaaatacgcaggcagaaatcagcaggcagctccccttggagcttcattgaatgcatggcactgaacacagtggtgatggcagagagagaaggagagattgctgtgggcaggctcagatagtcaggggaagcaggatgcgcagatgggctggggtggaaggaggcaggagtccagcctcactagggccagagggctgggagtggccttgaccatccattcgtttcacaaatagttatagctgctatgtttcacagtataggtctgtagtaatgaacaaaacagatgtattccctgctctcatggagcttacagtctagaacagagacagatgttaaacaagtgaacacataaatgattacaaattgtaaccagtgcttgaaaggagatgtgaaaacgctctaagggagaaaaatcagggtaagagaagacttaactttagattgagtgggcagggattgaagaggtgctgtttctgctgagacctggaggatgcgaatgagccagccaaagacagtctgggggagaacattccaaacagagggagcaacaagtgttcaggcctgtgtgtggggcctggaaagaaggctggtgtggctgctgcaccatgagggagacagagaaggaaggagggaagaggggccatttcccagcagggagtgctgccatttgtgttcccagaagattcctctcttgtgtgcataaaaggattgtaagaagataagagtggaagcagaggccgagcatggtggctcatgcctgtaatttcagcacaggccgtggccaaggaggctgaggtgggtatatcgcttgagcccaggagtttgaggccagcctgggcaacatggcaagacccttgtctctac

SEQ ID NO: 1690 - DNA, 3492 bp, Homo sapiens
aactgtagtgctaagactaaatgcttcacgatccttggaggggtaagaggtgacgtgagccacggggaagccacctaggtcaccctcaaaactatcctttgcatgtcccacagcaactccaagaaaaccatctgaacctaagacaacagacgcagctgcacctggtacagcagacacagctgggcctgggacaatggacacagctgtacctagaaaagcagaaacagctgtgcctgggaaaaggaacacagctgtgcctggaacagcagacccagcttcacctgggacagcagacacagcagaacctatgagaacaaccactccaacagttctggcctcctggccttctctcacccagagcaccaacagcacccagcccacggctcttaccagccccctcaccaggtgagcagagctgggctcccacagacctttccctaggctgccccatgactgctccttcagatgctctcaccagggaccctcatgtggcgctcgtcaggggagaaacagtgaagtctgtagtgggccttcccctccctgtctacacctgagcactgcaggagattctccctgatgagctgcaacaggctgagctccagagagcaggctctgggctccaagcttcaccgagtccctcaagccccaggaggcaaaagcgaggtgaagctttgggtgctctggaagggcagctgtctgggtggctttcctgtggctgctgtaactgatcgttacaaactttgtggcttaaaacaacacagtctcatgatcatacagctgtggagaccagaagtctgaaatgggtctcactgggctgaaatcaaggtgttaacagggctggttccttctagaggctccagcggagggcctgttcccttgccttttccagcttctggaggccacccgtgttccttggctcatggccccctcctacccaaagccagcaaaggtcggtggagtctcccacagagcatcgctccactgtctctcctgcctccctctttcatttataaggacgctggtgattccactgggctcagccagatgatccaggataatccaccctgggtcacctgacgagcagtctcaaatccacccactgccttaactcccccttgcatgtaataaaacatattcacaggctttggggttatgacatcgtgggtggggttcactattctgcctaccacagtcacaggcaggggtgtgcccatcgctccatctctccagccaaggctagggaagggcagggcgggagagcaggaagctgggcctcttgcttttctttcacattcccagcatggtagatgggtgtggacatcaatccgaagcccacctcctttcgagggatcaataggatgtctcatcaccgcgcaaatgcggctgcccctgtttaaccccatcacagcctggtgcttcaggatccctcaaagtccagggtcaaggcccattctctccctggatcctgccttccctgctccaccggctcccttctccagcccaactccgttcctttcaaagggtcttgttccctggagcctgccagcaccgatcctgtgttccctaggagtccggaagaggcgaggcactggggatgcttcctgacctggccttcgtctcgctccactgtttgcagagcggttgttctgctgagtggggatggcagtgccaggacttctagcgagacgggagaggcacaaggggaaacttggcgggaagagaccaagggtgcggcttctccacggggagtggaacttgcaagaagaacacagtggtttaaagggtatttttaggatgtgcaatatggcaggcctgctctcactcaagaaaactctgagttaaattcacatgactcatcactgcttccatgccctgggctggaggccagcttcggggagagaacagggatggcctgagggaaagggccctggcaccgggtgtacgggagtggatgaggaataagactggggaatcagactcttacacgctgatggggactccccagaacccactcgtttagctagaccaaatattaaacatgtgggtgatatgaggcagcaggtctcagatctgctgtcataaagtgggtccaagcaggaggagacccctcccaggagaaccaaatagataaatagccaggttgttagaagtgggggaatcttcctgtgcttcaaagaggtaataataattagatttgagcttgaaagatgggcagaagtgacaaagggagacacaaggcagagagaggagcagaagcaggaatacaggacacagcagaccctcgagcttggcgggacacaggtgagtagcagggactgtgggaaagaagaccaaaggcaggcctggctgggtgcagtggctcacgcctgtcatctcagcactttgggaggccaaggcaggaggatggcttgagctcagtagttcaaaatcagcctggggtatatagcgagacgccatctcggcaaataatgttaaaggctgggcagtcacggccaagggcagcgaaggggccgggccccagactgagcctgtgggaaggccactggaagctcagcctccgggtggcatgactttgccccttgcatggggcttccctggttggggaccaggcagctgaccagggtggcaggtgttggctcagggaagaggctgctcactcttggcatcttgacccctttgtccaggatcctgctctgcaacatccacttcctgctcccgatctccctgaaggggctgctgcttgtgggcctgctctgcactgtgctgcaagtgagcagtgctaagggggcctccagggggaaataaagtcacagcctgagccggggaaccgcagctcccacaccatcaacaccctcggagggggcaagcagaacctctggcctcctatcaggtaataagcagcaattgcagttccccaggagacaagggtccctgcagagatgaaatatccctcatcctggcctcaggaaggcaatcccactcccagctggctctgcacagcacagggatgctgacggggcctctctgccttctgccacctctgcctcaggagcagataaaagaaaggacatcccccttgcacactgattccttggaggcatctgcatctcaccttcatggatcctccctcaggcctcctttccttgtggctccaggatgaccctgtcagagatactggactatcgttcagttgcagaggccccagggcctgtctggacttttccatcccaagaggggctcggctctatcccctttgtgcctgtgaccctctccatcccccacccggctcagaactggcacagccaccaccaaccactcctgattcaacccaagcttcgccctttccacctctcgagctgtgcaacaacaaatgcaggatgctcagccctcatgtgtcagtcccctcaattcacttgtaattaaataacaacacacctctttttctaattttcaaaggtgtatatatttcccctcaataaagttgttaggatt

SEQ ID NO: 1691 - DNA, 3843 bp, Homo sapiens
ttttaaatttattttttatggagatggggtcttgctgtactgcccaggctggtctcaaactcctggcctcaaggaatcctctcgccttggcctcacaaagcactgggcaactgtgtctggcctaacagtagagttcttgacccaggtatggggggatggaggagctgtttatgggtggctccgcctctcagtgcatggctggagtgacagtactggaatactggggctgtgaactgggtgttttcttttctttttctcttctttttttttttttattgagacagagtctcacagctgtcacccaggctggagtgcagtggagcgatctcagctcactgcaacaacctctgcctcctgggttcaagtgattctcctgcctcagccttccgaggactgggtgctttatcccggagccaacaagggaggaaactgaggcccagggagctgggtatcccacgtgcaggctcttacctcaggtccatgcttcaggtgcctcctttgtggctcacccctgctgactccttacaaagccaggccgttggcaggcacaggaaccaggctctgaaaccccgtgctcccctgccagtggctcagttgatgtaatcaccctgcagtgggagtgctctttgagtgcggccactgcgccccctcccgacccgcatggccctgtatgtagtggcgctggcccctaccccatggggcccacattctgaaccacaggctgctcattagaaatgtaccgtcaccaacccagttcccctgagaccctccacaccagcaggacaagtcccccagtcagcaagatgtgtcttctgccagaacgtgctcggcatttttctgtgctgtagattcatatgtgtgattttgcagggaagccagattgcttttttgcaatttgcattgttcacctgccaatagtcatggggtcacgggcctgtctctgcccaaggcttgcaagaggctacgttgtgtggctccaactcggtgagtcagccccggggcaggacgtcaggcctgtgctctccacccagctgcgctcttccacctggagccttcctggctgctgggcgcagagtgggagattctccccatgtgccgggccacctgctgccccctgccctgattgcccactctggggcccgcagatccgttggaagtacatgattgtggacgaaggtcaccgcatgaagaaccaccactgcaagctgacgcaggtgctcaacacgcactatgtggcaccccgccgcctgctgctgacgggcacaccgctgcagaacaagcttcccgagctctgggcgctgctcaacttcctgctgcccaccatcttcaagagctgcagcaccttcgagcagtggtttaacgcaccctttgccatgaccggggaaaaggtggacctgaatgaggaggaaaccattctcatcatccggcgtctccacaaagtgctgcggcccttcttgctccgacgactcaagaaggaagtcgaggcccagttgcccgaaaaggtggagtacgtcatcaagtgcgacatgtctgcgctgcagcgagtgctctaccgccacatgcaggccaagggcgtgctgctgactgatggctccgagaaggacaagaagggcaaaggcggcaccaagaccctgatgaacaccatcatgcagctgcggaagatctgcaaccacccctacatgttccagcacatcgaggagtccttttccgagcacttggggttcactggcggcattgtccaagggctggacctgtaccgagcctcgggtaaatttgagctccttgatagaattcttcccaaactccgagcaaccaaccacaaagtgctgctgttctgccaaatgacctccctcatgaccatcatggaagattactttgcgtatcgcggctttaaatacctcaggcttgatggaaccacgaaggcggaggaccggggcatgctgctgaaaaccttcaacgagcccggctctgagtacttcatcttcctgctcagcacccgggctggggggctcggcctgaacctccagtcggcagacactgtgatcatttttgacagcgactggaatcctcaccaggacctgcaagcgcaggaccgagcccaccgcatcgggcagcagaacgaggtgcgtgtgctccgcctctgcaccgtcaacagcgtggaggagaagatcctagctgcagccaagtacaagctcaacgtggaccagaaggtgatccaggccggcatgttcgaccagaagtcctccagccatgagcggcgcgccttcctgcaggccatcctggagcacgaggagcaggatgaggaggaagacgaggtgcccgacgacgagaccgtcaaccagatgatcgcccggcacgaggaggagtttgatctgttcatgcgcatggacctggaccgcaggcgcgaggaggcccgcaaccccaagcggaagccgcgcctcatggaggaggacgagctcccctcgtggatcatcaaggacgacgcggaggtggagcggctgacctgtgaggaggaggaggagaagatgttcggccgtggctcccgccaccgcaaggaggtggactacagcgactcactgacggagaagcagtggctcaagaccctgaaggccatcgaggagggcacgctggaggagatcgaagaggaggtccggcagaagaaatcatcacggaagcgcaagcgagacagcgacgccggctcctccaccccgaccaccagcacccgcagccgcgacaaggacgacgagagcaagaagcagaagaagcgcgggcggccgcctgccgagaaactctcccctaacccacccaacctcaccaagaagatgaagaagattgtggatgccgtgatcaagtacaaggacagcagcagtggacgtcagctcagcgaggtcttcatccagctgccctcgcgaaaggagctgcccgagtactacgagctcatccgcaagcccgtggacttcaagaagataaaggagcgcattcgcaaccacaagtaccgcagcctcaacgacctagagaaggacgtcatgctcctgtgccagaacgcacagaccttcaacctggagggctccctgatctatgaagactccatcgtcttgcagtcggtcttcaccagcgtgcggcagaaaatcgagaaggaggatgacagtgaaggcgaggagagtgaggaggaggaagagggcgaggaggaaggctccgaatccgaatctcggtccgtcaaagtgaagatcaagcttggccggaaggagaaggcacaggaccggctgaagggcggccggcggcggccgagccgagggtcccgagccaagccggtcgtgagtgacgatgacagtgaggaggaacaagaggaggaccgctcaggaagtggcagcgaagaagactgagccccgacattccagtctcgaccccgagcccctcgttccagagctgagatggcataggccttagcagtaacgggtagcagcagatgtagtttcagacttggagtaaaactgtataaacaaaagaatcttccatatttatacagcagagaagctgtaggactgtttgtgactggccctgtcctggcatcagtagcatctgtaacagcattaactgtcttaaagagagagagagagaattccgaattggggaacacacgatacctgtttttcttttccgttgctggcagtactgttgcgccgcagtttggagtcactgtagttaagtgtggatgcatgtgcgtcaccgtccactcctcctactgtattttattggacaggtcagactcgccgggggcccggcgagggtatgtcagtgtcactggatgtcaaacagtaataaattaaaccaacaacaaaacgc

SEQ ID NO: 1692 - DNA, 2562 bp, Homo sapiens
ctgctgcaagaagcacgggctgcgggggatgcgctggaagtgccgtgtgtgcctggactacgacctctgcacgcagtgctacatgcacaacaagcatgagctcgcccacgccttcgaccgctacgagaccgctcactcgcgccctgtcacactgagtccccgccagggcctcccgaggatcccactaaggggcatcttccagggagcgaaggtggtgcgaggccccgactgggagtggggctcacaggatggaggggaagggaaaccgggccgtgtggtggacatccgtggctgggatgtggagacaggccggagtgtggccagcgtgacgtgggctgatggtaccaccaatgtgtaccgtgtgggccacaagggcaaggtggacctcaagtgtgtgggcgaggcagcgggcggcttctactataaggaccacctcccaaggctcggcaagccggcggagctgcagcgcagggtgagtgctgacagccagcccttccagcacggggacaaggtcaagtgtctgctggacactgatgtcctgcgggagatgcaggaaggccacggcggctggaaccccaggatggcggagtttatcggacagacgggcaccgtgcatcgtatcacggaccgcggggacgtgcgcgtgcagttcaaccacgagacgcgctggaccttccaccccggggcgctcaccaaggccctgggccgcgtcgggaaggtggtgaaagtgtttggagacgggaacctgcgtgtagcagtcgctggtcagcggtggaccttcagcccctcctgcctggtggcctaccggcccgaggaggatgccaacctggacgtggctgagcgcgcccgggagaacaaaagctcactgagcgtggccctggacaagcttcgggcccagaagagtgacccagagcacccgggaaggctggtggtggaggtggcgctgggtaacgcagcccgggctctggacctgctgcggaggcgcccagagcaggtggacaccaagaaccaaggcaggaccgctctgcaagtggctgcctacctgggccaggtggagttgatacggctgctgctacaagccagggcgggcgtggacctgccggacgacgagggcaacacggcactgcactacgcggccctggggaaccagcccgaggccaccagggtgctcctgagtgctgggtgccgggcggacgccatcaacagcacccagagcacagcactgcacgtggccgtgcagaggggcttcctggaggtggtgcgggccctgtgtgagcgcggctgtgacgtcaacctgcccgacgcccactcggacacgcccctgcactccgccatctcggcgggcactggagccagcggcattgtcgaggtcctcacggaggtgccaaacatcgatgttaccgccaccaacagccagggtttcaccctgctgcaccatgcctccctcaagggtcacgcgctagctgtgagaaagattctggctcgggcgcggcagctggtggacgccaagaaggaggacggcttcacggcgctgcatctggctgccctcaacaaccaccgcgaggtggcccagatcctcatccgggagggccgctgtgacgtgaacgtgcgcaaccggaagctgcagtccccgctgcatctcgccgtgcaacaggcccacgtggggctggtgccgctactggtggacgctgggtgcagtgtcaacgccgaggacgaggagggggacacagccctgcacgtggcgctgcagcgtcatcagctgctgcccctggtggctgatggggccgggggggacccagggcccttgcagctgctgtccaggctacaggcctcgggcctccccggcagcgcggagctgacggtgggcgcggcggtcgcctgcttcctggcgctggagggcgccgacgtgagctacaccaaccaccgcggtcggagcccgctggacctggccgccgagggtcgcgtgctcaaggcccttcagggctgcgcccagcgcttccgggagcggcaggcgggcgggggcgcggccccgggccccaggcaaacgctcgggacccccaacaccgtgacgaacctgcacgtgggcgccgcgccggggcccgaggccgctgagtgcctggtgtgctccgagctggcgctgctggtgctgttctcgccgtgccagcaccgcaccgtgtgtgaggagtgcgcgcgcaggatgaagaagtgcatcaggtgccaggtggtcgtcagcaagaaactgcgcccagacggctctgaggtggcgagcgccgcccccgcccccggcccgccgcgccagctggtggaggagctgcagagccgctaccggcagatggaggaacgcatcacctgccccatctgcatcgacagccacatccgcctcgtgttccagtgcggccacggcgcatgcgccccctgcggctccgcgctcagcgcctgccccatctgccgccagcccatccgcgaccgcatccagatcttcgtgtgagccgcgccgtccgccgcgcccgagctgccttcgcgtgcccccgccctgtgttttataaaaagaaagattctcgg

SEQ ID NO: 1693 - DNA, 2443 bp, Homo sapiens
actagcccctcctgagtgtgtcactaacagcccactgtgcttgcaaagcattttgttcccttttgcctgatgaagactgagggtcagatttgccctgagctgcactggacaaaatgcctccaggacccacttcgcgtgctacttccgcttggcgggggtgctgggcctgttgttttcctttgcctgggcattctcctcatgtttcccacctggagttccgcttttccaactgccccaggtagtcagggtcagggaccttggacttgtctcttactgctgaccagtctgtgctttatgggcagagatgagacccaggcccgtgtctgccagctgaccacctttcagccagccttgttctcctgtcttcctatctttatcatttggcaagtcctcagcttctgtcagtgtcttagggcagataggagggcatttccttgcacaaacagtaagatgactttgagtgatggcactgggagatcagggcaggtagtaggccttccttcctccgctgggctgggtcacctggcgagggtttcactcatcatggatgccatgggacaggtatcattggtttatgagagctagactctataaagcgattcctaaacactctgcaagtagaactatttttatataaagcatttattaaacacttttcatgcttaaagctttgtgttagggagaggctatgggggtatagggagtcatcagacacaggctgtgctctcagtctagtgagggagaaaagacacacagtagcagaagagaacaggctcacagcagtctggactctgcaccaagcagctcgatccaccaacactgtcaaggtggagactggaggtggtggggcttgaaatgagcccaggaaaccagagcagtgagggcgggcggggcatttcacccaggaatattgagaatgagggcctggaggtgaaatgtgcaaaacccacccctcacactgcagccaaggtttttatcatgttactctgatcatgtttttcaccccctgacattcttcaatgacttactatttctagcacaaaaagctagaacttttggtctggtagatgtggcctttgtgagcttacatcagtttgcttttctggaatctttctctttgctgatctccctcttttctaaacaagttcttctggttcatccagtaatctctttcttttttaaaaatgtggcgacaaggtcttgctctgtcacccaggctggagtgcagtggtatagtcatagctcactgcaacctccagctcctgagctcaagtggtcctcctgcttcagcctcccaaagcagctgggactacaggcatgcaccaccatacccagccctagaaagctctttcttatccctcccttaacctcctcaagttgtgctcacctttctctcacatgcctgggtcggcatttctctcgctgtctcatgattagttatgtttgcctgtctccccacccatcagtgaaatccctgagggcaggggctgtctcattcatctgtggatatggagcgggaccactatgtgccaggccctgtgccagacactgcttatattgtggtgaatcaaacggacagacttcactcttgtgtagcttatgtcagacagacattaagcaaactcacaaatacataaaatatgctcataaaaggcctttatgaagaaaaacacttaagctgagacctggataagtgggagctagccagataaagctgcaggaaatagcattccaggcaaaggaacaaaactggtgcagacccagctgctagaaggagcagagagcatttgaggaggtagaagaaggtgacatgatggacaggttcaccttcccacagagtaaggggtgagtgacccaaggctcaatggatgagcagggtccctgctgaggacttctcttgagtacaatggggagccactgatagctttttaaggggatgaatggtgggatttggtttacatttattattatttgagacagagtctcactcttatcacccaggcaggagtgcagtggtgcgatcaaggcccactgcagtcttgacctcctgggctcaggtgatccttccacctcagcttcctaagtagctgggaccacaggcatgcgccaccatccccaggtttttttgttgttgttgttgttgttttgtatttttggtagagacggggtttcatcatgttgcctaggctgttcttgaactcctgggcttaagtgatctgcctgccttggtctcctaaagtgctgggattataggtgtgagccatggcacccggtcttggtttatattttaaaaagacaactgtgtagctgggcgtggtggtgggtgcctgtaatcccagctactcgagaggccaaggcaggagaattgctagaacctgggggtgtgaaggtttcagtgaactgagatcactccaacctgggcaataaagccagactctgtctc

SEQ ID NO: 1694 - DNA, 2246 bp, Homo sapiens
gcagtggcatttccatgcctcatgctcaccatcatgaggttaacttcccgccgtcgcctcttgcctgccaggggtttttcgggggcccctctctgttccactctgattccttttgtttctttgctgaccattcactctctgtgtctgttgttggatccaaatacgagtgtttttctttctttttgtggtcagtgcttttttccttcttgaaattgttttaatgtgttttgtcaaaagcatttaaccatgttatgatttaagaattctctgttcacttgaggtcaggagttcgagaccagcctggccggtatggcaagaccctgtctctactacaaatgcaaaaattggccaggcgtggtggcgcacgcctgtagtcccggctgctcgggagactgaggcaggagagtcgcttgaactcagaaggcggaggttccagtgagccatcgcgccactgcactctagcctgggtgacggagcgagactctgtctcaaaaaaaaaaaaaaaaaaaaaaaaattatttgttctgtctcaggtcttagggaccccttacctcagctaatgtctctgtcccctaaatgcacatcggtgggcagggcaaacccgtaggtgcccttatccctcccaaggctgcactgcaaagctcctgtgtttccattgcccactttcttctccctctcctttcttttctgattataccaaacaggaatgactcgtgtacttgagtcaaaatcctgatggcattgggaaaagtaaactgaaggaatttttgtacacttataccagctaagatgttctgactgcaacgacagaaaactccagctcaactggcttaaacaagaacagggctctctcacgtgagaagccaagagttagaacaactccaggcccagaatggtcggagctcaagctgcagttctcttagctcagtcttcctcgtactgtgggcttttattggagactagctctcctcatggtgacaagatggctgcaggagttcaggcatctcatccagaagcaagaaaagggcatgtcttgcttgcgtctctaggcgtaagggaactggtccagatgtccccgccccacatcccttcagatcccaattggccagaatatggcacgtgcccatgtttcaaccaatcatgggcaaggacatgggaccagcatgattggcctagacccctggagcctggggctgggcccagcatcccctgaatacacggccatctggaggagaaggtaactgaatttcactggggatctgtgataaaagggagcatgggtgttggggagacacctgttccagttgggtttcctatgaggtccaggacagggcttggtgggcactcggaagccagtgtctgaagtgctcagcatcctcctcttcctcggtggtgggtgtccaccacccaggccccacccctggccttggacacttcatggaaacactgctggtttgctgtggtgttgggtggctcctatctattccccgtaagtgctggcctctgttgacaccatttctgctacctcatctgagattgttctcatcagctcacagagattcatttcagtgaataaaccaaatctaagctaaaaagcataaaggagggcagaaagaaacagcagtgtgggagaaagagcgcaaacaccgagagaaagatgtctacctggcagccatgtcagagaatcaccagtatgtatgtcactgccaccaagaacctaagagccacagaggcctacagaagccaatcccaatggaactctctctgggtgtgggggttgagagaacctaaagcattcagctgcacagagcctctttccagcgatgggaaccagtctcaaagcctttacatctctcccctgccctccatcactgctgagaaccctgccccaggctggcctgcctacatgacacaaatagcagtggactgtcactcatcagtatctgcagttctgtttaccaaagcctgcttgctagagacgtttcagggcctccttccctcaaagcgtccactgtacctccatctggatacaattagctggctccccacttcctggactgacggtaaccaccttttccaatgaccctgaagaaaacatgcaatctaagctgctttaagagtaacctacaactgaggacaaattttctatcaactcccagtacccctctctgccgtggctgatttgttactggttttcctttttttttttaatttgaaaatgtaagtaattatactaagaccagatc

SEQ ID NO: 1695 - DNA, 2064 bp, Homo sapiens
ttcaaatgctggcacaacgcccagagctcgatgaggtgtgggcaagtagctgtctaaaggtggatgatgccctccatgcactttcagcctgcctggtggctgggcagtcgaaaacgtcgccgtctattaagctcctttgattgggagcaggtgacgggtagagacggaagttctgggaatcaccggagaagggagggaagggctccttccggccgcctgctcccggagtcttcgtggggaacgtgaggtgagagcaggcggtgaagagtagacacgactgatgacttcagggatgctacacctttctctcctgcctgggcaagcctcggtagtaagatttccgtagtccgttttgtatgtggttttgcagaaacataccccctctctgctccagcttcagtcgtcagtatccagctacttccaagagtcttgcccatgtcttgtgggatgttcagcaaatgtataaacacttaatatcccgacaaagcttggcctcttccctcccaaattacttcccaggctatgcacccgtttttgttaatacaaccaacttggaaactttgatgtcagatttgatgccctttcttgcctttccatgctccaatcacttgccaagtcctgtcgattgtacccctacagtaattcttgcatcttcttacccactgcccccacctaatcaacgttctcattaccatcccctgcacggtgtcagtgcagtacctttctcattgatgtcctgcctctagcatcactctgctactagcctatcttacatatacctgctataggtgtagccatcttcaagcaccaccgtgatccaaaatagctgatccaatggctctctgttgcctgtagattaaaggtcaagtttattaacttggattcaaaactttttttattttctgctgttccccttccattctccctcagtcagtggtaaaccagaccctgtgaagtacgtcatgcataaattattacatttttatagattgctcatgtcccttgcatgaaatacctgtctctccccctcatctccaaatgttgaaattctttccattatttaaagctttagaaagtgacatctctacctagaaataatttttctttctattgagagtccatcatatttctggaatttcatgtatttagttattaccactttctaacttcgaactaaaattatttacttgcaagtctttccccctattaaactgtaaacaggcctttatctaatgcatttctacattctggagtgtataacattgtgctttttttgtttgtttgtttgtttgtttctttgacacagggtctcattctgttgcccaggctggagtgcagtgacgtggtcatggcatgctgcggcctcgacttcctgggctcaggcgatcctctcggctcggcctccggagagctgggactgcaggtgcacaccaccaccctgctaattttttgtattttttgtagagatggagttttgcagtattgcccagtctggtctcgaactctgggctcgagcggtccacccacctcggcctcccaaagggctgggattacaggcctgagccgtggagcccagccccacattgtgctttttccatgacgttagcactgaataaatgtttgtggaatgaatgatagaactatgaatattccaagtaatgttttagaaacattaacctagcaaaagtatataggatagtatggatgagggaataggatagtcttggtgttgggtagtaaaggtaagaggtgtaacaaccaaggttacaataattgaataaaaggccgggtgcggtggctcacgcctgtaatcccagcactttgggaggtcgaggcgggtggatcatgaggtcaggagatcaagaccatcctggctaacacggtgaaaccctgtctctactaagtatacataaaattagttgggcgtggtggccggcgcctgtagtcctagctactcgggaggctgaggcaggagaatggcgtgaacccaggaggcggagcttgcagtgagcagagattgcgccactgcactccagcctgggtgacagagcaagactccgtctc

SEQ ID NO: 1696 - DNA, 2153 bp, Homo sapiens
ggctcctttccttatatgtctaaccctggcctggagcactggaggatgaggtccgctgactgcagcgtccatcctggtcctccccaggcactgtggcctccctcacagcatggctgccttgggtactcggacttcacgtggaaggccagggctccgagagcaaatgccccagcaagacagaagctcagccgcctttgatgacctagaagctaggcagcatccattgtactgccttctatgggttgtgagtgagtcccaaacctgccttgactcaaggaaacggaattaggctctacgtcttgactaggtagtggcgaagttctggaagcacatgagtaggagatactgtgacggtttcatctttggaaaataccatctagcacacctgaatctgctttcagggggtgtaaggggatttccatggcaaaatttgaagccacatgtggtcactgctttgtactgaggaaacaaagtgctctgggcatccagaaagggggtacgttttttcttactgggataaatctggctgcattttagctaatcctggaaaattgatcgacaaaagcaaaggaccaagaaagctgcttatatcagtgtctcctccaccctcagcctccagtagcatccctacgttttacaattttatttatgtcactttaaataaggacattgagagggaaaaggcctcatcgacataccaactacaggccaggtggaccttcggtgcacacacaccccagcgcccacagagatccaggcctcctgtgtatgaatgtgtgccatgaatttagacctatttctcgccttccgggctctctattcctcatcctccatccaagtggccatcttgtgcaggccctgaaagcagcagatctcacctgcattggaggatgagacgccacatgaagaagaaagaagacgccacagacagcagcgcagtaccaccttccagagatgtgagtgtgaccgtctttgaccttctagcccagctgctttccctgaatgcaatgcatgagcaggccaggcaaaactagagagggaagctgcccagctaacccacagaattatgagagataaaaaatcattgtcttaagccactaagtctgttatgcagcaatatatagcattcattcaacttttgtctcatgaatactctcatttcttttataagttcttttgtggttcaaattagctcaaatcagtttctgatgcttatgaccaaatgcccctatgtgatagattttgaggggttaagaagcttgctcggatcacacagcggtaagtagcagcacttcatctttaacccacctctggcccactccctttccataggtccttgttgcctccctccctaatcccttccagtctagtttcctcactcattttagcatcttgaagatgcctgaccttttgtaacaggcacttagaagaggcaataatcaagctgtgagctggaatactgggtttctcatccaataaccaggttggcaggttggtaaccatacaagggacttttcaaactggagaattagtgtgctgagcacaaagtggtgagtattttgagagttactgaaatataattgacataacaataaaaatacaatatttaagtgcatgtatttcaagtgtacgatttgacaagtttggttatattatatacacctacgaaaccatcaccacaattaagaaaatgagcatagctatcacacacaaaagtttccttgtgccccttggtaattcctccctctctcctgcccacatctctccttttcccaggcaatccctgatctgatttctgccgctatcaattcgtttgcatttcctagaattttaaataactgaaaacatacattaagaactctttttctctggccgagtgtggtggctcacgcctgtaatcccagcactttgggtggccaaggcgggcagatcgcctgaggtcgggagtttgagaccaccctggccaacgtggtgaagccctgtctctgctaaacatacaaaaattagccaggcatggtggtgggcatctgtagtcccagctgctcgcgaggctgaggcaggagaattgcttgaacctgggagacagaggttgcagtgggctgagatcgcgccactgcactccagcatggacaacagagcgagactccgtcccc

SEQ ID NO: 1697 - DNA, 3234 bp, Homo sapiens
tctgctattgtatatatgcctgcctcatcttaccaatctctttgtcggatgggttccagggtttgtgtgagtggctttccacggcaacatgaaaaacactggaaagaactctgtggtcgaatagtattggatcctgaatttatggtgcaacttctcacaggggtttattatgccatgtataatggacagtgggaccttggccaggaagttcttgatgatatcatttatagagcccagctagagcttttttctcaaccactattggttgccaatgccatgaaaaactcattaccatttgatgctcctgattctacacaagaaggccagaaagtccttaaagttgaagtcactccaacagtgccgaggatttctcggactgcaattacaacagcttcaatccgtcgtcatagatggagaagagaaggtgctgagggtgtaaatggaggagaggagtctgtaaacctgaatgatgcagatgaaggattttcatcaggggcttccctcagcagtcagccaattgggaccaaaccatcctcctcttctcagaggggaagcttaaggaaagtagcaactgggcgttcagccaaggataaagaaacagcctctgccatcaaatccagtgagagccctcgagattcagtagttcgcaagcagtatgtacagcaaccaactgatcttagtgtagattcagttgagctgacaccaatgaagaaacacctgagcctgcctgctggccaggtggtgccaaaaatcaatagcttaagtctaatccggacagccagtgcttcctcaagtaaatcatttgactatgtaaatggcagtcaagcaagtaccagcattggggttggcactgagggaggtactaatttagcagccaacaatgctaatcgatactcaactgtcagtctgcaggaagaccggctaggtcaagctggcgaaagtaaagagctcctcagcccaggagcccccttgaccaagcagtctcgatccccaagtttcaatatgcagctaatatcccaggtgtagttttgacatcctccctcatctttctgcttaccttttaaactgaacatttcattgtgcaagaagacacttcatcccacattgtgaaaatattggtcactgttatcagatttcatttagtttaggtatcttcatactgtattttgtatcaaaacagcaataaggttttctttatccctctttcctacatcttctcttcacctatcccttgtaaatgtgtttgtgaagcagtataaaatggttgccttttccatgccttcctttctccttgggtgatgtgcaatccatcgtaggctgatcggtcccatttcaacactgtgagactgagggtacattagaggaaatggtgtatatgatccctatgaaacgattctttggcttttgtttaaaaacaaaacgggtttgttctcataatctatagaactatgaagattactggatcatatttttttctcttaaccaggagtgcctcagagattctgctatgactttggacttctctgagtctgtgcaatcattttctggagaagcatggggaaaggtggtagactgctgcactttttcattaaaatgagggtagctctttctccacccccccatctcctttatcccgaagacataaatgttcaattacggaggcatttaaatcaagttgtgaccacctccattggagggcaggactcttgattgtgtaattgataatgcactttctcaatggctgtatagtcattattaacgtgtcttccctcttccccacaaggacatataaggtcatttctgtccttcaagtttggccaactaacaaatcagaatctgaggggcatgttctatttcccaggaatgattgacactttggtgctggggttttgtgggggcggggggtagtttttgtttagcttttgtggagattgtgtgtgtgagaggagatttgatttttttttcttcttttcctttgtgagctgatggctgaagtgtaacagtacatcttcaggtaaagagagggatttctcaatctactttctgttatgtcagactataagagaaaccctttcagctgctttctagatgtacctaaattcagtcagacattttggattaagaaacctaaagtcctgatacattacatactccaaggaaatatatcagggacagacaattggctgaaacactgatacttcaatgtgacacatttttatagaacatttctaccagggggtactgaccttgatttctcctacaaggaccacactgcctttgtgtttaatgtaatgcaatttgtgtaccttctaatcatatatctgcagttcctcatttttataaaactttgatatcatgccagtaagctagatgttgaatgtatgtaagtagcatttggtaactgctaagaggttacaaaaacattattggtaaaaaaaatttccttagttctgatctggttggataagattttatcataacttttctgggtctcaggctctgatgtttgaaaaagaagggaatatattgggttttaaaaaagtgtattgtgacttaaactgttataagttatccttccacagaatacatcagagctatcagtgctttgtacatttagatgtttttacttgattattgtttaagaaaaatatactgaatttatagaaagcaagtattctcctaattagcaaaagttaaaattttatctctaccattaaaattacaatagattttgataaataaccagaaaaaacgccttttttttttttcacacctagcaatcctcccgtttttattgtaaggactttcttttttccctaagagactttctgttagactctttatatatgagatgcttgtttaaatatggtggtctgtaacatttttccagctcatgtgaaaatggaaaactagaacctgaactagtatctacaacattgccaaagtccagggtaaagctaaaagttgataagtagacaatttattgttttgtgtgtgtctgtgtgtgtgtgtgtgtgtgtgtgtgtgtgtgtatggtgtgtatatgtatatatcacaaagttgtattttaaatattttaaataccctttcttttaatttaagggatgtcaaataaatgaaaggagtttaaaaatagccaaaataaatgagctataaaggcccataacatactaaaacaggcagtttcaggtatgtaaggaaaggaacattatacttacctagaaagtgagatct

SEQ ID NO: 1698 - DNA, 2187 bp, Homo sapiens
cttcctattgcaccaacagccttgtgttgctgcaatgaaaacactcccccaagcagctgtggccaagagacgcagaaactgccttgtccacgggccccgcctcagactccaacactcacaagagagcagaggagccccaagtcttggggaccacagaagatgccatgtgctccacgatgtcggcccccacctgcctggcccacttgcctccctgcttcctgctgctggcactggtccttgtcccctcaggtaagtggggtctaggatagaacagggtccacccccggctggtcagtccctagaggggcactaagtgctctgccatgcctgaagaagcttgaccccatgaagatagagtaaagaggggtccactgaaaatttgcctgactccggcagagggcacccccagtgtcccaagaagcagcgtagtgaagtgataagctcccaggctctgcgctcacacccactggcttccagcttgattgctcctatgcccacgtcagatgctgcagctcttttagccccaggagcctcttctacaaaacagggacgctcatgggacctttctctagggctactgtgagtattaaatagagaagtggtgaggctcagccctgggccggctgcatagtttgtgagacccactgcaaaatgaaaactgcggtcttttgttcaaggagtattgagcaacacagcagagcagtaaaccaagcatgggctccttctaagcacagggccctgtgcgactacatagatggcacagccatgaaccagccctggctcagcttgagacgcagtaggctcaaacctcaccactaaccagtttaagtaatttctttctgagcctcagtttttccaactgtaaaatggagctaaaaataggacccaccttgggactttcttaggagaatttaacaagataatacccataagtgcctggcataacaaagatttgataactcttggcgattattattatcattcccatgtttcctctaactcaggggcaggccaggttagctccagagtcttgagacccctgaatatatagctcagcctctgagtccagaactctctgatctaccaggcagggatacttggctctcagtgggctcattccatctcctgcccatctgggcctctgctccaggctctactgagatctagattctgtccatgacatctttggtcctccggggtggccatccccaggagagatcctggcagaacccaggtgtggggtcggacctaggtgctcccttactcattggccgtatgactcaagacaccacctactccgacaaccaacccggggtgctgatccaggtgtacgagggcgagagggccatgacgaaagacaacaatctgttggggcgcttcgagctgagcggcatccctccggcccccaggggcgtgccccagatcgaggtgaccttcgacatcgatgccaacggcatcctgaacgtcacggccacggacaagagcaccggcaaggccaacaagatcaccatcaccaacgacaagggccgcctgagcaaggaggagatcgagcgcatggtgcaggaggcggagaagtacaaagcggaggacgaggtgcagcgcgagagggtgtcagccaagaacgccctggagtcctacgccttcaacatgaagagcgccgtggaggatgaggggctcaagggcaagatcagcgaggccgacaagaagaaggtgctggacaagtgtcaagaggtcatctcgtggctggacgccaacaccttggccgagaaggacgagtttgagcacaagaggaaggagctggagcaggtgtgtaaccccatcatcagcggactgtaccagggtgccggtggtcccgggcctgggggcttcggggctcagggtcccaagggagggtctgggtcaggccccaccattgaggaggtagattaggggcctttccaagattgctgtttttgttttggagcttcaagactttgcatttcctagtatttctgtttgtcagttctcaatttcctgtgtttgcaatgttgaaattttttggtgaagtactgaacttgctttttttccggtttctacatgcagagatgaatttatactgccatcttacgactatttcttctttttaatacacttaactcaggccattttttaagttggttacttcaaagtaaataaactttaaaattc

SEQ ID NO: 1699 - DNA, 1871 bp, Homo sapiens
ctagcaatcccattactgagtatatacccaattaattataaatcattctataaagacacatgcacatgtatgtttatcgcagcactgttcatgatagcaaagacttggaaccaacccaaatgtccattaatgatagactggataaagaaaatgtggcacatatacaccatggaatactatgccaccataaaaaaggagttcatgtcctctgcagggacatggatgaagctggaaaccatcattctcagcaaactaacacaggaagagaaaaaccaaacactgcatgttctcataagtgggacttgaacaatgagaacacatggacacagggaggggaacatcacacaccagagcctgtcagggggtaggggagtaggggagggatagcattaggagaaatacctaatgtatgtgacgagttgatgggtgcagcaaaccaccatggcacatgtgtagctatataacaaacctgcacattctgcacgtgtatcccagaacttaaagtataataaaaaaataggatgaataaaaactactacttcatagcacaaccagctgactatagtcaacaataatttattgtacattttaaaatcactaaaatagtataattggaatatttgtaacacaaagaaatgataaatgcttgaggtaaaggatactgtgtttaccctgatgtgattgttatgcattacatgcctgtatcaaaatatctcatgtatcccataaatatacacacctactgtggtacccacaaaaattaagttttttaaaaagtgacaaaatgaaagcaacttgtacatttatattctctaaggttctccttgatttctcaatgatacaaccttgccctcacaagtgttaaagcagtaactttactatgctcaagtaaggtgtggcaggtgaattctaacagtgcctccatgatctctgttccctggtcttatgtctgtgactaggttacattatacggcaaagatgatggatttggttacattttatggcaatggtgaatgaattttgaaaatgcagttaaggtcccaaagcagctgaatttactcaaaaaggagatgatcctgagtgggcctcatttcatcatgtaagttctttgaaagcgagtctagatgtgagagacaatcttctactggcctcaaatcagaaaacagccacattatgttctgagtatggagaggggtggcctctgggaggtgagggcctcagcctcaaaaccacaggaggtgaattctgccaagaagcatatgagcttgaaagaggaccccaaagcctcagaagatacagtaaccccatctgacaccttggttacaacctgtgagatctcaaagagaggacccagctcatctgtgcacagacttctaacccatggaaactgtgaaataagaaatactgtgttttgagctgttaaattggtggcaatttgttacacagccacagacaactagtacgtaaagttatatccaatgcactataaaacttgtcaatttatgtagaaattatatacacatacacatgtaatttatacatatttgcacatacacacccccctccgtagttcagcagtagcatcactaacttagagttttaattgcaaaactttcattgaagctgtggagccactctacaaaagttatgagagaacatatttttaagaaaattgcccccctgccctccaacccccatcactacaaaaaaaaaaaaaaattagccaagcatggtggcacacagctgtagtcccagctactcaggagcctgaagcaggagaatcgcttgagcccaggaggcagaggttgcagtgagcctagattgcaccactacattccagcagcctgggtgacagagcaaggctctgtctc

SEQ ID NO: 1700 - DNA, 2770 bp, Homo sapiens
attgttcctgttctctttcttaagtcattcgaaacactgtccctgcgagttctttaagttccctgcaatctgtacacaagagaaagagggagagagagagggagagagacagagagagcagggatcaggtaaaggagtggggctgctgcagccattcagacctcaggagctggaaaattgccaaggatgcagaaggaaatgaagatgatcaaagacgaggatgtgcatttcgacttggctgtgaagaagaccccctcctttccccactgcctgcagccagtggcttctcggggaaaggctccccaaagacaccccttcccggaagctctccgagggccattttcccagtttcggtatgaacctcccccaggagacctagatgggttccccggggtcttcgaaggagcagggtctaggaaacggaagagcatgcccacaaagatgccctataaccaccctgcagaagaagtcaccctcgccctccactcagaggagaacaaaaaccacggccttcccaacctccctttgctgttcccgcagcccccgcgccccaagtatgactctcagatgatcgacctgtgcaacgtgggcttccaattctaccgcagcctggaacactttgggggcaagcccgtcaagcaggaacccattaagcccagcgccgtgtggccccagccaacgcccactccattcctgcccacgccctacccctactaccccaaagtccacccgggcctcatgttccccttcttcgtgccctcgtcctcgcccttccccttcagccggcacaccttcctgcccaagcagcccccggaacctctgctgccccggaaagccgaaccccaggagagcgaggagaccaagcagaaggtggagagggtggacgtgaacgtgcagatcgatgacagctactacgtggacgtgggcggctcgcagaagcgctggcagtgccccacctgcgagaagtcctacacctccaagtacaacctggtcacccacatcctgggccacagtgggatcaagccgcacgcgtgcacgcactgcgggaagctcttcaagcagctcagccacctgcatacccacatgctgacccaccagggcacgcggccccacaagtgccaggtgtgccacaaggccttcacccagaccagccacctgaagcgccacatgatgcagcacagcgaggtgaagccgcacaactgccgcgtgtgcggccgcggctttgcctaccccagcgagctcaaggcccacgaagccaagcacgccagtgggcgcgagaacatctgtgtggagtgcggcctcgacttccccaccttggcccagctgaagagacacctcaccacgcaccggggccccatccagtacaactgctccgagtgcgacaagaccttccagtacccgagccagttgcagaaccacatgatgaagcacaaggacatccggccctacatctgctcagagtgtggcatggagtttgtgcagccgcaccacctcaagcagcactccctcacccacaagggtgtgaaggagcataagtgtgggatttgtgggcgggagttcaccctgctggccaacatgaagcgacacgtgctgatccacaccaacatccgcgcctaccagtgtcacctctgctacaagagcttcgtgcagaagcagaccctcaaggcacacatgatcgtccactctgacgtgaagcctttcaaatgcaagctttgtgggaaggaattcaaccggatgcacaacctgatgggccacatgcacctgcactcagacagcaaacccttcaagtgcctctattgcccaagcaaattcaccctgaaggggaacctgacacgccacatgaaagtcaagcatggagtcatggagcggggccttcattcccaaggtctgggaagggggagaatcgccctggcacagacagccggtgtcctgaggagtctggagcaggaggagccctttgacctctctcagaagcgccgggccaaggtgccggtgttccagtcagacggggagagtgcccagggcagccactgccacgaggaggaagaggaggataactgctacgaggtggagccctacagccctggcctggccccccagagccagcagctctgcacacccgaggatctgtccaccaagtcggagcacgcccccgaggtgctggaggaagcctgcaaggaggagaaggaggatgcatccaagggagaatgggagaagaggagcaagggtgaccttggggcagagggcggccaggagagagactgtgccggcagagatgagtgtctcagtctcagggcttttcagagtacccggcggggcccctctttttctgattacttatacttcaagcacagagatgagagtttgaaagaattactggagaggaaaatggaaaaacaagcagtgcttttaggtatctaagtggacagttttaaaattacatttggaaaatgagaacgaggcagttcaaatatagctttctgtatgaactgtcattttctggagactggcgaatagtaccaatctctacaaatggcttagactaaatgagcagggatgtaggtaatggaaagccttctcaggtcattcacggggcccttgatacccttcacacatgtgcagggtcttcatcagtggcgttttatgcattgccagtataataaactgtgagtattcttccagatatctaattgtaagctgatgctgaggtgcttttagaaattctactttcctttgattcatatgcaatacatggtaaatttctaattgc

SEQ ID NO: 1701 - DNA, 2351 bp, Homo sapiens
ctaacttgatgcgaagaatttacatttgggttgaattaaaagccgtagcccgggccgggcgtggtggctcacacctgtaatcccagcactttgggaggctgcggccggtggatcacgaggtcaggagatcgagaccatcctggctaacacggtgaagccccgtctctactaaaaaatacaaaaaaaattagccaggcgtggtgccgggcacctgtggtcccagctactcgggaggctgaggcaggagaatggcatggacccgggaggcggagcttgcagtgagccgagattgcgccactgcactctagcctgggtgacacagagagactccgtctcaaaaaaaaaaaaaaaagccgtagccctggagcggtggcttacgccggtaatcccagcactttgggaggttgaggtgggcggatcacctaaggtcacgagttcaagaccagcctggccggcagggataaaccccgtctctactaaagatacaaaaattagccaggcgtggtggcacacacctataattccagctacttgggaggctgaggcaggagaatcgcttcaacccggaaggtggaggttgcagtgagctgagatggcgcactgcactccaacctgggtgacagagcatgactgtgtctcaaaaaaaaaaaaaaaaaaaaaaaaaagttagttgtgctggtgatgttagcaaatgcagataccaaaactgttgattagaatggggaaggcccactggtcactcatgaaatggcagtttgactcaccttgccattcctcgggaagtcactcaggaccacgtagaccacaactgcatcacccaacttaggatatgttagtttgtttccaaaactcatttgactacctcattcttactttttgtcattattgcaaagcacatatgctgtgatttttctcgatattttccattaaatcgcttaatttcttgctgaaataaatttttaaaagaaatttcatgatactagcatgagtaagaaagcagcagcatttgccataaattgaaggtaacgtaaaaattaagtccagtgaaaatcacgccttgttaaattctgccttaattctcttgcctgcagaatgctcggagatggcagcctactctctgtcaacacgggactgagggaggtattaaagacaaaccagcacctccctgagaatttctccataatcaaatcagggaaagtgaaaaataattgaaaaaggaacagcgttctcagtacgcaagtcattgttgtgtgggatagtgtgcgtgtgtcatataaaatcttctcctactccaccagaacattgcccacactgggagacagtgtcctggtgtccacagaaccatggcagggactgatcctatttcacagttgtaggcactgtcctttagggtcacaggctaaaaccagctctggactttgagcgccacatgaaagggccagactgctcggttaattccagacagcaaacacagaccttggtttgatctcagcaatcacaggttggattaacacaactgttttccctccccttgttccaggattgtgcttagaggacaagaaatcgtcagttctgttgttcccaagtcaaacagtgtttttgacttccagaaagcttacaagctgactgaagaggaggtaaggttgccatcttgtctttctatgccattgtcctggaaagatgagttagcttgggcaacatgatgagactccatctctatgaaaaattcaaaaaaattagctgggcatggtgatgcatgcctatggtcccagctacttgggaggctgaggtgggaggatcacttgagtccaggaagcggaggttgcagtgagccaagatcgcaccactgcactccaggctgggcaacagagtgagatcctgtctcaaaaaaaaaaaaaaaaaaagatgggttgatgccaccctttgaggtcaccactgaagacacaacattgggcactagaccttgaccctcaatgcctatgattctgtgatttgaggcccctccaaaatttctgatcgagctggtcttggaatgacgcttaccagtaagtgttctgtggggtgacttcgggcatttcctctcccctccctggtcctaaatttgctcatcgctaaaatgaaagcatctcccaggcatctcctaatttccatgtctacctcccctttctccttataggccctggatgtcagcgaccactttccagttgaatttaaactacagtcttcaagggccttcaccaacagcaaaaaatctgtcactctaaggaagaaaacaaagagcaaacgctcctagacccaagggtctcatcttattaaccatttcttgcctctaaataaaatgtctctaacag

SEQ ID NO: 1702 - DNA, 2073 bp, Homo sapiens
atccaggtgcccctgagccgaggaacgcaggcggtggtcgtggggaagggaagaggagccccgggagacgacagcagcatgggtgggcggccttcgagccctctggacaagcagcagcggcagcacctaaggggtcaggtggacaccctgctgaggaacttcctgccttgctaccgtgggcagctggcagcgtctgtcctgcggcagatctctcgagagctgggccctcaggagccgaccggaagccagttgctacgcagcaaaaagctgccccgagtccgtgagcaccgaggacccctgacccagcttcggggccacccaccccggtggcagccgatcttctgtgttctgcgcggggacggccgcctagagtggttcagccacaaggaggaatatgaaaacgggggccactgccttggctcaacagccctgacaggatacacgctcctgacttcccagcgagaatatctccgccttttggatgctctctgccctgaatccttgggagaccatactcaggaagagcctgactccctcttggaagtgcctgtgagcttcccgctgttcctgcagcaccccttccgccggcacctctgcttctctgcagccaccagggaggcacagcatgcctggaggctggccctgcagggtggcatccggcttcagggcacagtcctgcagcgaagccaggcccctgctgcccgggccttcctggacgccgtccgactctaccggcagcaccaaggccactttggcgacgacgacgtgaccctaggctcagacgccgaggtgctgaccgcggtgctgatgcgggagcaacttcccgcgctgcgagcccagacccttcctggcctgcggggggcaggccgcgcccgcgcctgggcctggaccgagcttctagacgccgttcacgcagctgtcctggccggggcctccgccgggctctgcgccttccagcccgaaaaggacgagctgcttgcgtcgctggagaagacgatccgcccggacgtggaccagctgctgcggcagcgggcgcgtgtggcggggcggctgaggacggatatcaggggaccgctcgagtcgtgcctgcgccgggaggtggacccgcagctgccccgggtcgtgcagaccctgctgcgcaccgtggaagcctcgctcgaggcggtgcggaccctcctggctcaaggcatggaccgactgtcccaccgcctgcgccagagcccctcgggcacgcggctgcgcagggaggtttactcatttggggagatgccgtgggacttggcgctgatgcagacatgctaccgtgaggccgagcggagccgggggcgcttggggcagctggcagcaccgtttggctttctggggatgcagagcctcgtgtttggggcccaagatcttgcacagcagctcatggctgacgccgtggccaccttcctgcagctggctgaccagtgtctgacgacggccctcaactgtgaccaggctgcccagaggctggagagagtcagggggcgcgtgctgaagaaattcaaatcggacagcgggttggcgcagaggaggttcatccgaggctggggtctctgcatctttttaccttttgtgctgagccaactcgagccaggctgcaaaaaggagctgcctgagttcgagggggatgtccttgccgtgggcagccaggctctgaccactgagggcatctatgaggacgtcatccgggggtgcttgctgcagaggattgaccaagaattgaaaaagacccttggtgccaatgatgtatcctgcactctggacagctgcttggaggtcccatgggaacaggagggagcagatgaggaaactgaggctgagcgggaaggaggggcttgtcccaggcagccagactctggtgcccagatccagccactctgcccaccgccttctccaggaacattccggagctgaatcttcacccacatctatcttgtttctattggataaatgtctacaagtggaatttctgggccaaaacggatgtgccatctttaggcttttgtaacccctgcaacttcagaaaactgtaccattttatactcc

SEQ ID NO: 1703 - DNA, 1960 bp, Homo sapiens
cttcaacaacaggctcttcacagtgggtggaagccacacagggacactcatggtgtggaggcctttcaaagtggacagaataattacagctgcacccaatgtgggaaagacttttgccaccaacatacactgtttgagcaccagaaaatccacacagaggaaaggccttatgagtgcagtgaatgtggcaaattgtttaggtacaactccgaccttattaaacatcagcgaaatcatactggagaaaggccttataagtgtagtgaatgtggaaaagccttcagcctcaaatacaatgttgttcaacaccagaaaattcacactggagaaaggccttatgagtgcagtgaatgtgggaaagcttttcttagaaagtctcacctacttcagcaccagaggattcacaccaggccaaggccttatgtgtgtagtgaatgtgggaaggccttccttacacaggctcaccttgttggtcaccagaaaattcatactggagaacggccttatggatgcaatgaatgtgggaaatactttatgtacagttcagcactcattagacatcagaaagttcacactggagaaaggcctttttattgctgtgaatgtgggaaattctttatggacagctgcacactcattattcaccagagagttcatactggagaaaaaccttatgaatgcaacgaatgtgggaaattctttagataccgttccacactcattagacatcagaaagttcacactggagaaaagccttatgagtgtagtgaatgtgggaagttctttatggacacttccacactcattattcatcagagagttcatactggagaaaagccttatgaatgcaacaaatgtgggaaattctttaggtattgcttcacactgaatagacatcagagagttcactctggagagaggccttatgaatgcagtgaatgtggcaaattctttgtggacagctgtacactgaagagtcatcagagagttcacactggagaaagaccttttgaatgcagcatttgtgggaaatcctttagatgtcgctccacacttgatacacatcagagaattcacactggtgaaaggccttatgagtgtagtgaatgtgggaaattctttaggcacaactcaaatcatattagacatcggagaaatcactttggagaaaggtcttttgagtgcactgagtgtgggagagtttttagccaaaattcccacctcattcggcaccaaaaagttcacactagggaaagaacttacaaatgcagcaaatgtgggaaattttttatggacagctccacactcattagtcatgagagagttcatactggagaaaagccttatgagtgcagtgaatgtgggaaagtctttagatacaactccagcctcattaaacatcggagaattcacactggagagagaccttatcagtgcagtgaatgtggaagagtctttaaccaaaattctcatctcattcagcaccagaaagttcacaccagataaagaacgtatatataaagcagatggggaaagacttcacacagaaatctactctgatttagcactgggacctacgttttaaaaaaagtattcttgtagaatacagataacataaaatctaacatcttaaccatgttaaagtgtatagttcagtaccgttaagtcattcacattgtgcaatgaatatctagaagtcttttcaacttatgaaactaagtctataccttttaaaaccttattcctcactccatccagcctcttgacaagcaccgctctgtatgaattttactagtccgggtacctcatataagaaaacttaagttttggtcttcttgtggtttattttgtggcttattttgcttaacgttatatttttaaggtttcatgttctaatccattagaatttccatcctttttaaaggctgaataaaattctgttagtcatgtgttgcttaac

SEQ ID NO: 1704 - DNA, 2197 bp, Homo sapiens
ctctgctctgcctcccgcctgaggctgccctttctccgaagttgagggcctggccttcccaggttctgggtggcaagaaacctcatgacatggaacactatctccccgggcctcgggctaggagttttcagggttagcttatatcgtttctgttaggccatcgctgccctcctgaggaggttccaaggaacaaagctttctctctgtgccacaccccgggccctgtgctgggcacctgaaatatgaagaggacccagacgagtctctgccctcatgctgctcagatgtattgggagagaggaaatagatgatctcaacagctgccagaagaggggtagtgggcatctgtttatagcagggacaaaacagggccagaggttaaggatcagaggcagctccccagaagtagggactcacgacctggttggaaagtgcgtttgtgtgagccagaggtagtactcttcctggcagtatctctgtgacatgtgttttcatccaggactgacttccttcagcagacttgagaaacctactatgtgccggcatagtgtcaggcactggtttcatctgctgtcagtaaggagtgtcttgggaatgcagactgcttgaggacaaaaaaactagggtgaaaagtgaaagttctgccacagggcatcacagtaagtgtttctgcctggagaaagaaaatggggtgggtatatcaggagacactgggctcagcaaacctgccattggaaaccagggtctactgtcctgagggtatggagaggaaagcttccctctagcccaggagacactgcagagatctgatggctcttcccagaggagcccatgggcatgagacagttgagaaactatgtcttaggagaaacagctccaggctttggggctggcagccaggggccatgtgcgctggtctctacagattggagggctatctttgggcacactgaggccacgtggagtggtggagaggaggcagcaggctggggttctcccctcccctttaccagtaattgcatgtctgtaggcaagttttccagcctctggagataatgtgttcatcctttctcggttacagctgtgctaattaaagcacccagcacattagcagggctcatcactggttgatgttatgatgggtctctattgccccagggtactgggagaaacctacagacgttttaaaactcaataaggagatttttttttgcaacagatttttttgacattctaaaaatgacaaaaatgattacacatcataatcaagtgattaatatgcgttgtcgtttctccctgcgctgactgttccacagcagcgattcagtacagcagtgattcactgtgcatacttgaaacaattcagccacctctgatgttcaccatttgcagagtaaactttgtagtagggagaactttcaaagaaccatgacctggccccacactgagccctgacccagtgtacagaaagacctgagtttctgtacactgaggctctggcctcaacttccatttgagtgtagagctggatgggggtgtgctgagctccctggagaagagaaaaccatgccttcctgtgggcagccccagttcaggggatccaaactgaatggtgatagagacatggctcccaaagtactgttctcctcattctaccgccactggctcaggtcaagccccactcctggcctggatcattacaattgtcttctagttgctgtctttctgctcagtcccaaccctccaagccatcctgttattctgaaattcacatctggtcattcttcccagcctaaggcctgatccactgctccccatgtcctatgggaaagtccccattctctaggtggcactggaggcccttcaggatctgtctctaatgtcccttccacactcctttcccagctgtccccaccacactgctaacaacctggctgcattgacttttttggatcttcctcaacagtctttgtacttttcacgcctctgtgcctttgctcaagccgatctctttagctggaatgcccttcttcctcgggtgaaatattccttatattttcaggttgaacttaaaaacattttagcctgggtgcggtggctcacacccttagtcccagcactttgggaggccgaggcaggcggatcacttgagcaccattgcactccagcctgggcaacaggagtgaatctccgtctc

SEQ ID NO: 1705 - DNA, 2356 bp, Homo sapiens
ccttcagtctcgatgttgatggcaggacaaaggggcgcctggaccatgggtgatgtggtcgagaagagtttggaagggcccctggcaccttctacagatgagccctcccagaaaacaggagacttggtcgagatcttaaatggggaaaaggtcaaatttgacgacgcgggactctccttaattcttcagaatggcctggaaaccctgcgaatggaaaacgctctgacagatgtcatcttgtgtgtggacattcaggaattctcctgccaccgcgtggtgctagccgcagccagcaactatttcagggccatgttctgcaacgatttaaaggaaaagtatgagaaaaggatcattattaaaggggttgatgctgagaccatgcacactctgttggactacacgtacaccagcaaggcgctgatcaccaagcagaatgtccagcgggtcctggaggctgctaacctcttccagttcctgcggatggtggatgcctgtgccagcttcctcactgaagccttgaacccagaaaactgcgttggaatactgaggctggctgacacacactcgctggacagtctaaagaagcaggttcagagttacatcattcaaaactttgtgcagattctgaactctgaggagtttcttgacctgcccgtggacactctgcaccacatcttgaagagtgatgacctttacgtgaccgaggaggctcaggtgtttgagaccgtgatgagctgggtccggcacaagccatcagaacgactctgcttactcccctatgtcctcgagaacgtgcgcttaccgcttctggacccgtggtactttgtggagacggtggaagcagatcctctcatcaggcagtgcccagaggtcttcccgctgctccaggaagccaggatgtaccacctttctggcaatgagatcatttcggaacgcaccaagcccaggatgcatgagttccagtctgaggtgttcatgatcattggcggctgcacgaaggatgaacggtttgtggcagaggtgacctgcctggaccccctgaggcgcagccgcctggaggtagccaagctcccgctaacagagcatgagctggagagtgagaataagaagtgggtggagtttgcatgcgtgacattgaaaaatgaggtctacatctcaggtggcaaagaaacacagcatgatgtttggaaatataattcttcgatcaacaagtggattcagattgagtatttaaacataggccgctggaggcataagatggtggtgttgggtggcaaggtctatgtgatcggaggctttgacggcttacagagaatcaacaatgtggagacctacgacccctttcacaactgctggtcagaggccgcacccctccttgtccatgtcagttcctttgcagccaccagccataagaagaagctgtatgtgatcgggggagggcccaatgggaaactggccacagacaagactcagtgttatgacccttccaccaacaagtggagtttgaaggcggccatgcccgtggaggctaaatgcatcaatgcagtgagtttccgggaccgcatctatgtcgttggtggggccatgagagcgctgtacgcctacagcccgctggaagacagctggtgcctggtgacccagctcagccacgagcgggccagctgcggtatcgcgccctgcaacaaccggctctacatcaccggcgggcgggacgagaagaacgaggttatcgccacggtgctgtgctgggaccccgaggcccagaaactgacagaggagtgcgtcctgccccggggcgtgtcgcaccacggcagcgtcaccatcaggaagtcgtacacccacatccgcaggatcgtgcccggagcagtgtctgtctgacggcaggatggggagctggagagcccccccgaccctcagcgtacccgcctcacctctcaccctcctccagtcccacttcaggcagcaggctcgagtttgaggccatacatcaggggatccccttgactcactttgggggaaccttggaagtcacagtttggggtcacttgagaccggccaggaatgtttgcatgacctacctcaggaggggaggcgaggaagagtaatatttagcattcaggacccacccaccctatgccggcttctgtgccaggcacttccttttatcggttcatttaacctggtgactggctcttatcacttctagtttacaggtgagggaaccaagtttcacagaggctaagtggcgtgcccctgatcactcagatagcaagtagctaccccaggggtctaaaatccaggtctttcatctccgaagtcaatgctctttccaccatgctgcctatctcagagcagg

SEQ ID NO: 1706 - DNA, 2560 bp, Homo sapiens
aaaaaaaccacccgggcgcatacgcggtgcggccgctgcttcaggtcggcgggctccagggagacctgggtgggcagcgtcgccgtttctcctttcttgggcagtatttttcccagcgccacgcggaggctgggccattatgagctctgcatttccaggacctggtcactattcaggacacggttccagcgcagtgcgcgttagccatgtctcagggatgagtgacattccaagatgtggccattgacttctccaaggaagagtggggattcctgaaccctgctcagagagatttgtacacaactgtgatgctggagaatcatcagaacctggtctggctgggactttccatttctaaatctgtgatttcactgttggagaaaaggaaactgccttggataatggcaaaagaagagataagaggcccattgccagatgtgccaggtgcagagattaaggagttatctgcaaagagggctattaatgaagtattatcgcagtttgacacagtgataaaatgtacaagaaacgtatgtaaggaatgtggaaatctatactgccacaatatgcagcttactctccataagagaaatcatacacaaaagaaatgcaatcagtgtttagattgtgggaaatacttcactcgtcaatcaactctcattcagcatcaaagaatccacacgggagagagaccctataaatgtaacgaatgtattaaaaccttcaaccagagggcacaccttacctagcatgagagaattcacactggtgagaaaccttacaaatgtaaggaatgcaggaaaaccttcagccagatgactcatctcacacagcatcagactacacatacgagagaaaagttccatgaatgcagtgaatgtggaaaggccttcagccgtgtctcagctcttatagatcaccagcgaattcatagtggagaaaagccgtatgaatgtaaggagtgtggaagagccttcactcaaagtgcccagctcattagacatcagaaaactcattctggagaaaaaccctatgagtgtagtaagtgtaagaaatcttttgtgcacctgtcttccctgattgaacattggagaattcacactggagaaaaaccatatcaatgtaaggactgcaaaaagaccttttgtcgtgtgatgcagttcactctgcacaggagaattcatactggtgaaaaaccctatgaatgcaaggaatgtggaaagtccttcagcgcccattcttctcttgttactcataagagaacacacagtggagaaaaaccgtataaatgcaaggaatgtggaaaagccttcagtgcgcactcttcccttgttactcataagagaacacacagtggagagaaaccctatacatgccatgcctgtgggaaggcctttaatacttcctccacactttgtcaacataatagaattcatactggtgaaaaaccctttcagtgcagtcaatgcgggaagtcctttagctgcagctctcaccttactcgacactgtagaatgtgtaatggaaaatttagcaaataaccaaaactcaaaatgttaattctgattattctgtatcatcaccagtactttgtactttgagtctttttaaatatgctctgttagtttgtatggaatgatatttcattgcacttttaatttaacttaaaaatgccttcccttgactgttgatatgtattttttgtgaagtgtgtgttgaagccttgcagattatttttcaaattagaggtttatcactaggtatatctcctaatgctatccctcccccctccccctaatgtaaatgacgagttaatggtgcagcacaccaacatggcacatgtatacatatgtaacaaacctgcacgttgtgcacatggtaccctaaaacttaaagtataattaaaaaaaaaaattagaggttttccttcgggtgcatttatgagagttcaccagattttggaaatattttctattctgtaacctaccttttcatttacataacagtgataaaagctttaagtttgatcacatccaattaatcacattttttaatagttatgcttttatttgtttttcagacagggtcttgctctgtcacccaggctggagtgcggtggcacaatcatggctcactgcagtctctgcctcccaggctcaagtgatcctcccacctcagcctctcaagtagctgggactacaggcatgtgccaccacacctaatttctatattttttgtagagactaggtttcaccatgttgtccaggcttgtcttgacctcctgagctcaagcagtccatctgcctcagcactttaggagccccagacaggaggatcacttaagcgcagaagatcaagaccagcctgggaaatatagcaagaccttatctctacaaaaaaatttagaaattggctgggcatggtggcacccatctgtagtcctaactgctcaggaggctggggtgggaggattgcttgggtccaggagttcaaggctgcagtgagttgtgatcacaccattgcagtccagccaggttgacagaatgagaccctgtctctt

SEQ ID NO: 1707 - DNA, 2558 bp, Homo sapiens
gggcccgcgagggaggccgggcggcccggcaagcggcgctgcggggtaggctgctttcctgaggccggactcaacgggtctcggctgagccaccgggtgagctcaccgcccagcccaaaccaggagattgcgagggagcgatgcggtgcagcgcgatttgcttgtaaatgcatcacgaagaggcagcccagaatgaagaaagcaagcaggagtgttggctcagtgcctaaagtgtctgcaataagtaaaacgcaaacagcagaaaaaattaaacctgaaaacagctcttcagcatctacgggaggcaaacttgtaaaacctggaacagcagcatcattgtcaaagaccaagagcagtgatgaccttttagctggaatggccggaggggtaacggtgactaatggtgttaaaggaaagaaaagcacctgcccatctgcagcaccttcagcatctgcccctgccatgaccaccgtggagaacaaatccaagattagcacaggcacagcttcttcaaccaagcggagcacttctacaggtaataaagaatccagttctactagagaaagattacgtgaacgtacccgattaaaccagagcaaaaaactaccttctgcaggtcagggagctaatgacatggcattggccaaacgttcccgcagtcgaactgctacagaatgtgacgttcgtatgagcaagtctaagtcagacaatcagatcagtgacagagctgctttggaggccaaagtgaaggatcttctcacgctggcaaaaaccaaagacgtagaaatttttcatttgagaaatgaactgcgagacatgcgtgcccagctgggcattaatgaggatcattctgagggtgatgaaaaatctgagaaggaaactattatggctcaccagccgactgatgtggagtccactttattgcagttgcaggaacagaatactgccatccgtgaagaactcaaccagctgaaaaatgaaaacagaatgttaaaggacaggttgaatgcattgggcttttccctagagcagaggttagacaattctgaaaaactgtttggctatcagtccctgagcccagaaatcacccctggtaaccagagcgatggaggaggaactctgacttcttcagtggaaggctctgcccctggctcagtggaggatctcttgagtcaggatgaaaatacactaatggaccatcagcacagtaactccatggacaatttagacagtgagtgcagtgaggtctaccagcccctcacatcgagcgatgatgcgctggatgcaccatcctcctcagagtcggaaggcatccccagcatagagcgctcccggaaggggagcagcgggaatgccagtgaagtgtccgtggcttgcctgactgaacggatacaccagatggaagagaaccaacacagtacaagtgaggaactccaggcaaccctgcaagagctagctgatttacagcagattacccaggaactgaatagtgaaaacgaaaggcttggagaagagaaggtgattctgatggagtctttatgtcagcagagcgataagttggaacactttagtcgacagattgaatacttccgctctcttctagatgagcatcacatttcttatgtcatagatgaagatgtaaaaagtgggcgctatatggaattagagcaacgttacatggacctcgctgagaatgcccgttttgaacgggagcagcttcttggtgtccagcagcatttaagcaatactttgaaaatggcagaacaagacaataaggaagctcaagaaatgataggggcactcaaagaacgcagtcaccatatggagcgaattattgagtctgagcagaaaggaaaagcagccttggcagccacgttagaggaatacaaagccacagtggccagtgaccagatagagatgaatcgcctgaaggctcagctggagaatggaaagcagaaagtggcagagctgtattctatccataactctggagacaaatctgatattcaggacctcctggagagtgtcaggctggacaaagaaaaagcagagactttggctagtagcttgcaggaagatctggctcatacccgaaatgatgccaatcgattacaggatgccattgctaaggtagaggatgaataccgagccttccaagaagaagctaagaaacaaattgaagatttgaatatgacgttagaaaaattaagatcaaacctggatgaaaaagaaacagaaaggagtgacatgaaagaaaccatctttgaacttgaagatgaagtagaacaacatcgtgctgtgaaacttcatgacaacctcattatttctgatctagagaatacagttaaaaaactccaggaccaaaagcacgacatggaaagagaaataaagacactccacagaagacttcgggaagaatctgcggaatggcggcagtttcaggctgatctccagactgcagtagtcattgcaaatgacattaaatctgaagcccaagaggagattggtgatctaaagcgccggttacatgaggctcaagaaaaaaatgagaaactcac

SEQ ID NO: 1708 - DNA, 2342 bp, Homo sapiens
gtgaaacactagctgggcgtggtggcctgtgcctgtagtcccagctacttggggggcttgaggcaggagagttgcttgaacctgggaattggaggttgcagtgagctgagatggtgtcactgcactctagcctgggtgacagagggagactctacttcaaaaaaaaaggtaataatgggaaaatttccagaacctaggcaacgtttactaggctaatcatagggttggaagatgtttgtcatcgtagatgctatccttcatgctatgctatccttcagctaaggtggtctttactcagtattttcttttcttttcttttcttttttggagacagagtcttttctctcttgcccgggctggggtgcagtggcgccgtctcggctcactgcagccttcgcctgctgggttcaagcgattcttctccttcggcctcccgagtagctgggattgcaggcgcccaccactacgcccggctaattttgtatttttggtagagacggggtttcaccatgttggccaggctgatctcgaactcctgacctcaggtgatccacccgacttggcctcccaaagtgctgggattacaggcatgagccactgcacccggccagtattttcaaatagacaaactaaactagtgacatctgacattctagattggagttcttgatttcccttccagtcctagatttttttaatatagaatgttgagttttctaatttattagtatgctggaagagatataaagtcctggatagatataaagtcctgtttaaaggaatatgagaagacttattcttaaggagttgagaatctcttagagttaaagctgttaggttagtgagtaatttaaataagtggatagtaatagatactcatggaagagacctctgtaggtgttgtcaaagatggctaggatttgggtggataaaaaagaggaagtcattctaaggaactgaatgaggtgagaatgaggagagtttttgggtaatggtgaaatcagctaaagtagaatggagcttataaatgctggataataatgtagaacctgggagattaaatactgtgatgaaaggtaagcagaagtcatcacattagattcttttggggttgacctgtggtaactatgtagattggttatcttttgccttatgttaccccaaaacttagtggcttaaaaaaacaaggatctgttatatcatagtttctgtgagtcacaattctggatgcagcttacctgggggcctctggcttatggtctcttacaaggctgcaaccaaggtgacggcttggtagcagttctctctctctctttttttttttttttttttaaagacagaggcttgctgtggtgcccaggctggagtgcaatggcataatctcggctcattgcaaccctcacctcttgagtccaggtgatcctcttacctcagcctcctgagtagttgggactatagatgtgcaccaccacaccccagcttatttttttgtttttatgggttttttggtagagaccagtatttttttgttttgccatgttgcctaggctgctcttgaacaccttaattcaagggatctgcccgccttagcctcctaaagtgctgggattacaggcatgagccaccgtgtctggcctgggtagcagtcctcaaggcttgactggggaagcttccccttccgagctcactcatttggctgtgaccaggccagattttcactggctggttgttgcccagagatatcagttccttgccatgtgggcctctccataaagtggctgacaacacagtagcttgtttcctccagagtgagggatcttagagaaaaggcccatacgatggaagccacaaagtttttataacttaatttcagaagtaacgtcgcatcactttgcaatattctatttgttgtaagtgaataaccaaatccagcccatactcaatcggaggggattatacaaagatgtgaagaccaggaggcaggggtctttgggggctatcttagaggccggctgtttgtctctgtctctctctgttaagaggtaaattacagctattgtataatgcctttctatccaatctttttgtatgctattgggagaacatagtgttttggattttttattttggattaaccgtaaattaattacttttggctttgcaaaacattatacctgtaaatgataaacattcctaataacctttcagtggcttaagtttaaaatagcttgtagtctcagaattggtaggaatttgagaatctccagtttactgatttttttttttttttaactctagctacgtaatggaatcacctggggatttttttcattactggtttt

SEQ ID NO: 1709 - DNA, 2096 bp, Homo sapiens
ttaagaaaggcaatgaatcatgtgccacaagaatcttgggagaacccacgagcttgggagctggtgacagacccccattcggagcgctctctgcacagctacacagcgaccccgcccccgcctgcccatcaggacggctctgcagctgcaaagggcgagtgcttggttcccaaggcagggcccagctccatggttctcctcgcctcactctcctccgtgagcctcagggacccggtggccacagcaccctcagttctccccagagttgctgttcccacctctggctgtgaggtaggtggcatggcagagggggctggcctgggatgtgggatcctgctgtgagcggcaccagtggggtttgtcatgctgacactgatgacagaggtgaactcatggtcccccggccctggggagcagagacccccttccaggcagcagggcagggtaggtgcatccagcaccctccatggtcgcagccctccaccaggtggcaggtcacgccatgccttctctgtcctcacagtggtgtggcggggctgggtgtgtaactctcgtcctgtgttccgtggacactgtgcctgggtcacacaacagcggatggagcctcagagccccaggagccctgtggctgctcctgctcctgggacggcagggccagcgcagggactgtggagctcaggaggagggaccctctagctcattatgtagaggaggcggcagtcaggcggacggggtgggcaccggagggaggatgggatgggcagggaagccgccgcaacagctgcagtgaggttctttcccaaggtggaggagggggaaggacaggcagggcccatgtggttgggctcttcctcctccagctcaggagccaccgacaggacatggcctcagctgggtggcaccaggtgaccaggcccagctcagggtctgctctcctctgatggtccaggcgggtaccatgcagccctggggcttgacatcggctgagctgtggcaaagagctgtgttcttcccagctcccaagccctgtggcacccgcagttgtgaagtcctcaggtgacctcggacagtgtccattgggtgcttccctggtgccagtgctgttctggaagcttctgtggtcttgtttggtgctcacagcactcatgcctgcagtaactgtccccacattaaagtgagggacaggctggggcttggaggtgccatggtggcgccagtgtcccagggccaccaagcaaaccaccgtgggcccggcagcctgagcggcaggcctgtattccctctccacccgccctgtctggaggctggacttggagacagaggggcctcttggctatcttcttccgggaccactctccctggcaggagcccgcctggcacagctgcgtgagtgccgggcgtccttgcctgaaacaaactgcaattcagcgcgggattccaggattccatggcaactgctcgtgccctgtgttccggccccagctggggcttgggagcagctgctgtgtcatgggggatccacttgtttaccgacagccccaaggacccggacatggtgccagcttcccatgccttggccctgagatctgggaggcccatcgcggccggtgcttcccccaaccccactgagcatctccttcccgccctgtgtccacccacctcctgcccaagacccctgagtgttcgtgggctctacctggtgggatgctctttggcttgtagacaggggttggttggcagcatagtgttccctatcgatgtccacatcctagtgggagcctgtgactacctggctcgggggatccaggttgcagatgaaataaggttggatcagctgactttaaactagggtggtgaccctggagcatcccggggggcccagtgtgatcacaaggtccttaaaagtggaggaggggccagcgtggggctcacgcctgcaatcccagagctttgggaagccgaggcagcaggatcccctgaatccaggagttcgaagccagcctgggcaacaaagtgagaccgagtcttcaaagccagcctgagccacatagtgagactgagtcctgtctctacaaaaagtaaacaaaaatcagccg

SEQ ID NO: 1710 - DNA, 3025 bp, Homo sapiens
agaattcggagcgcggaagagccagagctgcgagcgcctggagctggatctctctccggtcgcgcacgccgaggccagtagggagagaagatggtggttctccgcagcagcttggagctgcacaaccactccgcggcctcggccacgggctccttggacctgtccagtgacttcctcagtctggagcacatcggccggaggcggctccgctcggccggcgcggcgcagaagaaacccgcggcgaccacagccaaagcgggcgatgggtcatcagttaaggaagttgaaacctaccaccggacacgtgctttaagatctttgagaaaagatgcacagaattcttcagattctagttttgagaagaatgtggaaataacggagcaacttgctaatggcaggcattttacaaggcagttggccagacagcaggctgataaaaaaaaagaagagcacagagaagacaaagtgattccagttactcggtcattgagggctagaaacatcgttcaaagtacagaacacttacatgaagataatggtgatgttgaagtgcgtcgaagttgtaggattagaagtcgttatagtggtgtaaaccagtccatgctgtttgacaaacttataactaacactgctgaagctgtacttcaaaaaatggatgacatgaagaagatgcgtagacagcgaatgagagaacttgaagacttgggagtgtttaatgaaacagaagaaagcaatcttaatatgtacacaagaggaaaacagaaagatattcaaagaactgatgaagaaacaactgataatcaagaaggcagtgtggagtcatctgaagagggtgaagaccaagaacatgaagatgatggtgaagatgaagatgatgaagatgatgatgatgatgacgatgatgatgatgatgatgatgatgaagatgatgaagatgaagaagatggagaagaagagaatcagaagcgatattatcttagacagagaaaagctactgtttactatcaggctccattggaaaaacctcgtcaccagagaaagcccaacatattttatagtgggccagcttctcctgcaagaccaagataccgattatcttccgcaggaccaagaagtccttactgtaaacgaatgaacaggcgaaggcatgcaatccacagtagtgactcgacttcatcttcctcctctgaagatgaacagcactttgagaggcggaggaaaaggagtcgtaatagggctatcaataggtgcctcccactaaattttcggaaagatgaattaaaaggcatttataaagatcgaatgaaaattggagcaagccttgccgatgttgatccaatgcaactagattcttcagtacgatttgatagtgttggtggcctgtctaatcatatagcagctctaaaagagatggtggtgtttccattactttatccagaagtctttgaaaaatttaaaattcaacccccaagaggttgtttgttttatgggccacctggaactggaaagactctggttgccagagcacttgccaatgagtgcagtcaaggggataaaagagtagcatttttcatgaggaaaggtgctgattgtctaagtaaatgggtaggagaatctgaaagacagctacgattgctgtttgatcaggcctatcagatgcgcccatcaattattttttttgacgaaattgatggtctggctccagtacggtcaagcaggcaagatcagattcacagttctattgtttccaccctgctagctcttatggatggattggacagcagaggggaaattgtggtcattggtgctacgaacaggctagattctatagatcctgctttacgaaggcctggtcgctttgatagagaattcctctttagcctgcctgataaagaggctcgaaaagagattctaaagattcacaccagggattggaatcccaaaccactggacacatttttagaagagctagcagaaaactgtgttggatactgtggagcagatattaaatcaatatgtgctgaagctgctttatgtgctttacgacgacgctacccacagatctataccactagtgagaaactgcagttggatctctcttcaattaatatctcagctaaggatttcgaggtagctatgcaaaagatgataccagcctcccaaagagctgtgacatcacctgggcaggcactgtccaccgttgtgaaaccactcctgcaaaacactgttgacaagattttagaagccctgcagagagtatttccacatgcagaattcagaacaaataaaacattagactcagatatttcttgtcctctgctagaaagtgacttggcttacagtgatgatgatgttccatcagtttatgaaaatggactttctcagaaatcttctcataaggcaaaagacaattttaattttcttcatttgaatagaaatgcttgttaccaacctatgtcttttcgaccaagaatattgatagtaggagaaccaggatttgggcaaggttctcacttggcaccagctgtcattcatgctttggaaaagtttactgtatatacattagacattcctgttctttttggagttagtactacatcccctgaagaaacatgtgcccaggtgattcgtgaagctaagagaacagcaccaagtatagtgtatgttcctcatatccacgtgtggtgggaaatagttggaccgacacttaaagccacatttaccacattattacagaatattccttcatttgctccagttttactacttgcaacttctgacaaaccccattccgctttgccagaagaggtgcaagaattgtttatccgtgattatggagagatttttaatgtccagttaccggataaagaagaacggacaaaattttttgaagatttaattctaaaacaagctgctaagcctcctatatcaaaaaagaaagcagttttgcaggctttggaggtactcccagtagcaccaccacctgagccaagatcactgacagcagaagaagtgaaacgactag

SEQ ID NO: 1711 - DNA, 2701 bp, Homo sapiens
aaaccttttttttttttttgggtgggggtcatattaatcctcaatgcctgtccagagactataacaagatcccatctgaattagcattatgcatagattttgcccgtttctcccatctccttgtactttccctccttctcacatctggagcccctggtctgtcctgcttgcatggcccatggggtaccttgtctgcactggtctcaggcattctctgctctgttcccaccatcacctctagaggagaccatgactcgctcaccttgctccccccaccagggtcaagaatgttaactcagacatgcttaatatgactgggatctggggattggggaccttgaatcctctgtgcattcattgtgtgcgcttagataagctgtcttccttccctgcctcagtctccttcgtttaatctggaacagccatggtgatggcaaataaacacaggctccttgtgaaagaactcgagggaggacatgcctgtagggcacggggtcactcgcgccgctgacctgctgccgtcctgtttctgagtctctgcagtctcgggagctccaggatccaaattcgttctgtgccctgaccttctgcctctcattccttgcagactttaagtttgccatgtacccaccgtcgatgatcgcaactggaagtgtgggagcagccatctgtgggctccagcaggatgaggaagtgagctcgctcacttgtgatgccctgactgagctgctggctaagatcaccaacacagacgtggtaggtggccaccaccttcttggctaagtccagatgtctcttctcagctcagggaaggagacgacggatttgattatgttgtgtcagaggtatttttctggtttgtttcctaagatcgacatccaagggagtgcaaagttcagcaggtgacaccccctcttaaggttctgaaaagctgtgcacgggaaaatacgaagaaaactcagcaagcagatgaagggggtgggggtgggagggctgtttaccgatgttcctttatggcgtgggcttctcagtgggtctgaattgttgcttcattgccatatttgtacacgctgccaggctgcctctgcccggcagcgaagagctgccgtgtctgctttcacacgctgaggctgtaaggcgcacagaggagaaaggagagccaggactcagctgcagtggatggagcagacacacaagaggtgccccactgtgagaacggtgtccgtccctggcaaacctctcgacccctccccgctctctcttcccttttgttcaatgcagtaatggattacaaagtgctttcaaaagacaaagtgccatacaaactcaagaaactattattagctacggagcttccccattctgtgtgccctgtggacggcccagaggctgttaacttcctgttgccagaatttggagctcctgagaagaaaggttttgagagagaccagggtcaagtgagcctctgaattcaatcagcaggaagctgcagtcctagcccgtccgagacaggatggtgccaagaggtcagagaggccattccttcgttttccacgggcaggacagggactgaagtaaccagccaggagcggggtgggcagtggctgagctggggctagaacccccaggctccggctgccccctggaagcttcccactccacccttgttgccgctcctgggatctgttggtttgaaaaaaaaccctggggtttaaagtcaacctgagagaggggtgttggccctgagccctcatgcatcaccatggagaggctgaagaatgctgggcacttcacgatgacaccctctggatggtccggggggattcagatgccctctgcgggcttttattgagttaagggatcatgtggtttataggcctatggctgaggcctgcacgagggatacgggacaggttaaacctcagagagcccacggctgcagctcgccggcctcctcgcccgcccacctggattttccctggcatttgttcccagctcagagaaatggcgcagggagatgctgacggagcaaatccggggtcctcctctgagatagttcgtagatatggttttaaaatgcgggctccaaacatacgctttttaaacgaggactccagaacacagactgaaaacctccctccagtgcagcatgaagaatgcttttctaatcctccagaggaaaatcgtggacgggacttaacgtttatagaaatggtacgctttcctccttttctgaatgtctccaattaaggctgccttacaaataggactctcagccagtttaagacaagcccttcctcaatgcctggagacaaaaatgtcagtgacaggagttggaagcggccacccccctcctcctgcccccaggcattgtaaccttttccccccgatgttgatagacctgctctgatgggctgaccaccctaccggctccagccttttcccacctccctttgtcccccgttactgatctcacacggacagtggtggaaatttccctcctgggagttgctgctacgtctcttggcttttcgagaccgcaggcaagtcagtccgtcatctcatctggagaaactgtttgcctttttctgatactacgtagccagtccatttaagtcagctggccaactctgttaaatggatatgaagtgggtacgaagctggtttaggggtgtcctcctataaatcctaactgttggtc

SEQ ID NO: 1712 - DNA, 2637 bp, Homo sapiens
ctcttttaccaaggacccgccaacatgggccgcgttcgcaccaaaaccgtgaagaaggcggcccgggtcatcatagaaaagtactacacgcgcctgggcaacgacttccacacgaacaagcgcgtgtgcgaggagatcgccattatccccagcaaaaagctccgcaacaagatacctgaaatcctaggcactgacaggagaacttcagactggagaggagaccagctctcctgcatcccggtgcccttccctaacagcacaatggaactggcaaaggggctacaggacaattccaggagctgcgtgcattcttcaaaaacgtgttgcaggtatcatactgtgggtccaccacagttggccaaaattggcagcactggacaagtggaccagtcaggaagacccagaccacccaacagggctgatcttgcgatggaaccaagtcatgctgagaaggacaaccactctgctctgtccactccagaggctggacagtctacacatggctgaagcttgaggaaacttcaagccctgccctagtcacaccacaagctgactagtctatgcacggctgaagcttgaagagtcttcctcagatgagtaaatgtggatagaagtattaagtttagttgctatcttagtaatattacttgttctgttgctatgctataatttttgccagtccctcctcccaggaaaggaccttttttgtcaaaataagggtttttcccttggcatagatgccacatccttatatcttaacctctgccaacacactttcacggtgtccactcacttaattattatctctgaccctgaaggttaccttagcagttgtcataccactggatgtgcaccctccatttgctctgccagatacctagtgatgattggatgctggagctgctcaacatggttacacaacccattagaggaggctctacttaccagaatgctagccaaacctcactgtaattggaaaacatgttcctgtagtactgtgaattttactatcttaaagccaaatgaactcatatggactacaggatatcccataatgttaggagttgctgatcaaaaggcagccatggaaatctagctatttattattaagaaaacaaacaaaacagccaatacctcagttctagtcttcatgtcattttataaatattccaaccagaaggtatctgagccacctcctccaaccaaaaacttatttgcccagctagctgaaaacataactggcagtttaggaattacttcctgttatgtttgtggaggaacaaatgtagaagaccaatggccatgggaggcaaaagaattaatgcctcaagataatttcactcttcctaaatccaccaatgaaccaatagactcagccagcgtgtggatactgaatacctccataatttgaaggtactgtatcatccattgaggagaagcatttacagatgtagtaggataattaacttgcttagggcaaaaatattataatagaactgaaggaaaattccatggaggagtacaaaaaatgattcctccttatctaattttaaccccttttctcagtttcccacctcgcaccattcttggtatcagcttgaggatccaaattcttggcaagtaccctctggcctccattgcatctgtggaacataggcatatcagaaactgctgcctaagtggtcaggggccaatgtattaaaaataattaggcctttctctttcttaacccccctaaagcagggtgagacttcagggtatacagtttatgatgagaataaaaatgaaccaggaggttattttattttgttgttagtctcaaaaatagaacaaacttcaaaaaggatatagatatatgatactggaaatgtaatgaatggcctcctgaaagaattattaaatactatgggcaagccacctgggcagaagatggaatgtggggatatcataccctcatttacatgatcagccatgtcataaggttacaagctgttcttgaaattataaccaaggaaacatcaagggctttaggtttggtggccgtgcaagccacacagaggagataaactatttatcaaaataggttggtactagattaactcctggcctcagaaaggacagtatgtgggaagttcagtttaacaaatgtctggaaattgatgataatgaacaacttgtcataaagattactgcaaagatgtgaaagctggctcatgttccagtgcaaatcaggaaaggctggtctccagactccttcttcggaggatgtttttcatctttttgtggatttaaaaccataacagactgctttgtagttatcttaagtgggtgtctaatactcccttctctcctgcctcttttgatcagaagcattcagtcaagtataaaagcaattgtgacaaggcaaaccaccacccaaatgatggcaaaacatgtttttccaaagatgtaagacacgtcataatgtgactgactgctttttgttctcacttctgtaagcctgcttcctgcctcgtgtactgcctgccttaagatgcataaaaggcacttgccttgtttgtttggtgctcacactttttctggatgctagtccacagagttggggtacaccctaaataataaatccttctgtgaccc

SEQ ID NO: 1713 - DNA, 3012 bp, Homo sapiens
agtctcatttcctgtcgggttttgcatttccctcccccgcccctcccagcctatgacatactttctctccttttttctctcctgcctcctctggccttcggactcctgcccgcgccgcccgcagccccctcccggccctgcagcccctgggcgggcggcgcccctcggaggacggctccgggcccggggggacggagggcctggtcgcctggaggaagccggaggcctgcgtggaggaggcgccccgcgcagctggctggcggagcatgagcgccccaggtaggcgcagcggggatgggggagctggcggagggggagcacgaggcggggagttgggggaagagaagagggcacggggaggagatggggggcatcagtgagatgacacggtggcggggggggcgtcgggggatgggagtggctcccgctggtcccgcgatgctgggggtatccttccctctccatctctgtccccctgccccccttctctctctcactctcctctcccctttttcccttccaaccctttttctccctcactttccacctcgtgtgcctctcctccgtgtctctttgagcgtctctgagtatcaccgcccagcaaagcccccacctcctcctactggacaggaaaaaatcgggggtcaggaggctgcagccccttggtgcacctgccccagagggaggaagagaaacttttctgacacctgaaaggcccggaagtttgcagaccacagcccagcctgactcagaggctcctgggaaggtggggcctggctcagggaggaagggcagccgcaccaaaagtgggtgtggagctgggagatgggagaggacagccccccgcggggactgtactagaaagggggtggcgggggcacaggagagggcccaggttcccgactgaaacccggagcaggtcctagcggcctcaggcctgaaagccacctcccccaggaggcccctccaggcccgatggggccaccaggccttctgctgagccccctctgcagataggggcagggagggtgtttctgtccctcgggggctctgagcaccgctggaggctgtcacggggacccaggttcatggacagtggtctcagctgtgagcttcggggctgcccacacaaacttggtcttggaccaaactgacctctctctgcctggcctgctctcaaagcctttgatttgtagttcaaaacattttctcctaatatttatgactcgtcttgaaggtataaggttaccaacctaccagaaaggggagaaaaatagtcgatcgttcattccacatttattgagcgctcagcctgtgcataatgcgtgccggaaatcccgggagccgggaattgatatgaggacaggaatttctccgtaagtgtccacttctgcgctttcgcggaaactccggttctctccccagcaaggcatctgtaaagagatgacacccctgcctcaggccagggctgccctgaggagcgcaacagtgaccaggactcagcgtaattcaaggccagggaatgcttggacccgtgtggatgttacttgcctgggtatcagataggcaggccgtggctccactggccccagcagtcttctgttaatgcatgaatggtccttgatgtgatttttttaaaaatcgtggtgaaatacatgtgacataaaatgagctcgctgaaccactttgaagcgcagagttgagtgctgttaagcccgtccatgttatcttgcggccatcaccaccatccagctcttcccaaactgaaactgtgtcccccgttaaacagcagcttcctggccccctccgtagcccctggcagccacccttccccgttctgtctctaggaatctgatgactttcgggaccccatataagggggctcatataacctatgtccttcctgtgcctggcttatttctctgagcctcacgtcctcacggttcatctgtgttgtagtctgtgactgaatctccttcccttttcaggatgaataatattctattgtgcagatagaccatattttgtgtatccgctcatcctttatgtgattttaaaaaatgacttctggacgggcgcggtggctcatgcctgtaatcccagcactttgggaggccaaggcgggcagatcacccgaggacaggagttccagaccagcctggctaaagtggagaaacactatctctactaaaaatacccacaaaaaattagcccggcgtggtggcgcacacctgtggtcccagctacttaggaggctgaggcaggagaatcggtttgaactggggaggcggaggttgcagtgagctgagatcgtaccactgcactccagcctgggtgacagagcgtgactctgtctcaaaaaaaagacttctaaaccaagctcttctaaagatgacatgcttgtttaaatccatcagtgggcgtgtgtgagtggctttgtacttggtgccgcagggggctcaggagggatgtgagaagcagcgctccaccctgagtaggttcatcacacagtctgtgtataccgtggtcagagtgtggctgagacacacatgagatggtaaagaattaggaggagtgggaagggcagcagggagtgagcttgggtgatggtaggactcagaaggtccagggattcctggaaggttccaggccgagatggtgctgaaaatctcagggaggaagggcatccccaccaaaagggggtgtggagctgggagatgggacaggacagccacctgtggacactgtactaggaaggggttggcagggtcacaagagggcgcccaggttctaggagtccaggggttcgagaccagcctgggcaacatggcgggaccttgtctctacaaaaaataccaaaaaattagccagacatggtggtgtgcagctgtagtcccagctacttgggaggctgaggcaggaggatcatttgagcctgggatgcggaagttgccgtgagctaagatggcgccactgcagtccagcttgggctacagagcaaggccctgtatc

SEQ ID NO: 1714 - DNA, 3460 bp, Homo sapiens
actttgcatgcgcgccgcgggtaggactggacggtcggatttgtaggcaattctgacaccgagctcccgggctcggttggtagaagatcgctttgggaatcctcctactctacgaggaccaaaaaccaaggacgccaagccatacaaattcagcacagctgactcagagaggtggaaaggaaatcaggacaaaaagccaaaatgtcttctggaggaggatattgccagccagaataactgtgagagatgcaagcatagtcctggaaacaaacagcacaattcctttaaagccctaaaggatgaagatcttcctgtagagaagtatttaatggaaaggcagcctgtaggtgagccagctgccgaccaggtagctatggatgtgatgcacagccccatcctccaactggaaaggaaacacaaagtctcaagtgacagcaaccagacagagactactgcagagaagttgccagaggactctttcctaaaaaacaagcaaaaacaggtttatatagggctacatcctaagaaacaccatttgatgcaccttagagaacagtaggagcagcaggtgttggcagcagagaacaaacctagtctgcaaggcaggaaggaagtgacccagacagtccagcctgaggtcactgcctgggattgtgatatcatgaaagagaaactcagcaagaaaagggcagaggtcaaaggcaacagaagctggttggaagaatttcttaaacccagtgacaacgaagaaggccctccaccgaagaataaggttttatccaacaatgcaagcagccaaaagccgactcactcaagctgcataccattgttgaggctgcctgataagcagcagaaagttaatgagagcattaagacagacatgctgtgcacagacaaggaagaggagtgccctgctgcctccctgctgcagaaatacaccaataacagtgagaagccatctgggaagagacaatgcaaaaccaagcacttgatatctcaggacctgaggcaggggttcctgctaacagggaagtgctacgttgagaatgctgatggcaagatacctcttggcacttgttttctccttgggcttatatagaggctatttcccctcaccccaacattccccacctacctgcttttctcaaggatgtaaagcctttcttttactggactcctaacttccctgtcttagaggggaagtcttccttgatggtgataaaattggaaactattaaaatttaagttcataccccagtctgtaacacttttcctttgatattccacctcccaggaaggaaaggaaactgccttccccatgcaggtttgtcttacaggaaggaggaggggaagcagtggatgtggaaaggatgtagtcttaatcttaactgtgtatactaattcgttttgtcttagtcaactgtcccaagattcagaaagcaacttgaacccagttccaactatgatctgacttcatccaagcaggagatgaagcccttcaactgcttgcaagagttgctaccagcttcccagtccatgaagctgccacactcatgttcccctcaggaaaccaaccaatctcgcccagtgcagctgagagcaaggagaattattgtcgataggcatgctggtgagactctcctgcagcaggcagcatggcttggctatgaggcaaggtcttgctctgtcacctaggctagagtgcagtggtgcgatctcagcttattacaacctctgcctcctgggctcaagtgatccttctacttcagattcctgagtagctgggaccacagattacttaaatgacctacagggttgcagtgacagtaagctgaatagctcttgggagttctacggcagctctgtctgtgaaccagataatggaggggaatccaatgttttggcagaccccccaggaccagaggaccaggatgatgacaatgaggcttgcagtgatgtgtttgaatttaaattttcagataccccctcttaccttgttaaaacattcaagtttcatctttgcagggaccacaaaactggttattgctttcagatgtacttaagaaagtgaaaatgtcatcctgcatatttcgctggagttttccacatctgaaaattgtcccaattgcagaggcagagttttacagacaggtttcagcaagtatcttgttctcttcctccaaagacttggaagccttcaatctggaaagcaacaaactactagatttactagaatgtacaaatgaactccagattctccttggctcctctctggaatgcttaaatcccagggatgtggccttggagaaggaccactgatgagaagtcaaatcccactgtatactgtgtgttctagtgttcatccttgtttatatttatcaaagtacaactacttctgtggaggagggacattattacatatgaaaatatttcagctttatataagataaaccctctagctagaagatttagaaagatgtctttttattttaaacttttgttatgaaattgctgaaatgtttctttaattttcaatgtatagaaactgctttgaataaatttgttttcatttggaacgtcttttaaaaggaaaatataatgaggaaaaagagcctcacctacctacctattgacttttttccacacaaagctctgatgacagagatcattgacatttataaataatgtcatcaaaattgagtgtttgggagaataaatttggtaaaagcatttgatattgtaacttctttgttttgtttgctgcgtatcttcttatgccaggtatatgctattgggtatatttcaacttaaaattacactgaaacacaactaattgtatgagatttataacctaacttaaaggttgtaaattagtttctatgaaccaatctcaaatattttatgatcttctaatgaagaaactttaatttattttcctcctcctccttcttcttctccttttttcttttctttctttctttctttctttttttttttttttgaggcaatgtctcactgttatccaggctggagtgcagaggcacagtcagaactcactgcagcctctacatccctgggctcagtggtcctcccacaatcagcctctggagaagctaggactataggcctgtgtaaacatgcttcgttaattttttttttttttttttttttgtagagacagtgtttagccatgttgcccaggctgttctaaaccacctgggctcaagtgatccgcctgcctctacctcccaaagtgctgggattacagacatgagcagccatgcccagcctgtttttctgttcactataaaatattgaaaattaaggacagttgagtttgcttgaaaatgtaaatattttaattctgtgcttataatttctttcaactttgttagatttatgcttctgtaacacttttacagaaattttctgaagatgcaataaaactgttgaggaaagg

SEQ ID NO: 1715 - DNA, 1621 bp, Homo sapiens
agaaacatcctgcagcatctccgtctccggaggaaaaatacatttgtctgggcgaactccggtggaaaagcgccccaggctgccacagcctagagatcttggggctgcagccctcgcggcctgccgagggagcagggggcgcccgtggaactggctccctgcagctctgcggctacacgcggacctcggctgtgtgcgaggtggcggaggaggctggccgggtgcgaatccgtacccagccccagcatcttccacctgctgaggaccaccgctcagccatgggctaccagaggcaggagcctgtcatcccgccgcaggattgccttattcaatgaagcaagctgggtttcctttgggaatattgcttttattctgggtttcatatgttacagacttttcccttgttttattgataaaaggaggggccctctctggaacagatacctaccagtctttggtcaataaaactttcggctttccagggtatctgctcctctctgttcttcagtttttgtatccttttatagttgatcctgaaaacgtgtttatcggtcgccacttcattattggactttccacagttacctttactctgcctttatccttgtaccgaaatatagcaaagcttggaaaggtctccctcatctctacaggtttaacaactctgattcttggaattgtaatggcaagggcaatttcactgggtccacacataccaaaaacagaagacgcttgggtatttgcaaagcccaatgccattcaagcggtcggggttatgtcttttgcatttatttgccaccataactccttcttagtttacagttctctagaagaacccacagtagctaagtggtcccgccttatccatatgtccatcgtgatttctgtatttatctgtatattctttgctacatgtggatacttgacatttactggcttcacccaaggggacttatttgaaaattactgcagaaatgatgacctggtaacatttggaagattttgttatggtgtcactgtcattttgacataccctatggaatgctttgtgacaagagaggtaattgccaatgtgttttttggtgggaatctttcatcggttttccacattgttgtaacagtgatggtcatcactgtagccacgcttgtgtcattgctgattgattgcctcgggatagttctagaactcaatggtgtgctctgtgcaactcccctcatttttatcattccatcagcctgttatctgaaactgtctgaagaaccaaggacacactccgataagattatgtcttgtgtcatgcttcccattggtgctgtggtgatggtttttggattcgtcatggctattacaaatactcaagactgcacccatgggcaggaaatgttctactgctttcctgacaatttctctctcacaaatacctcagagtctcatgttcagcagacaacacaactttctactttaaatattagtatctttcaatgagttgactgctttaaaaatatgtatgttttcatagactttaaaacacataacatttacgcttgctttagtctgtatttatgttatataaaattattattttggcttttatcaagacttggcttttatgagtagtgc

SEQ ID NO: 1716 - DNA, 2110 bp, Homo sapiens
agttttccagcgtttatctttctcccgcgctggatgcttcctgcctttgaacatcagactccaagttctttggcttctggactcttggacttacaccagtggtttgtcggggctctcaggtcttctgccacagactgaaggctatactgtcagcttccctacttttgaggttttgggactcggactgagccactgctggcttcctcgctcctcagcttgcacgcggcctatcgggggacttcaccttgtgagcgtaatgctgacttggtttatgtatctatctctttcccacaccatctatgcctcagagaaatcttcacaaactcagcttcaaggatgggtcagagccttggaaactgcatctgcctggctgtcattttctgcaagtgctggtgtaatttcaagatttgcttgccaaatgcattatagcatactggacaaaaacaaggactgctggaaatacaaactaccatcagagaatactacaaacacctctacgcaaataaactagaaaatctagaagaaatggataaattccttgacacatacactctcccaagactaaaccaggaagaagttgaatctctgaatagaccaataacaggagctgaaattgtggcaataatcaatagtttaccaaccaaaaagagtccaggaccagatggattcacagccgaattctaccagaggtacaaggaggaactggtaccattccttctgaaactattccaatcaacagaaaaagagggaatcctccctaactcattttatgaggacagcatcattctgataccaaagccgggcagagacacaaccaaaaaagataattttagaccaatatccttgatgaacattgatgcaaaaatcctcaataaaatactggcaaaacgaatccagcagcacatcaaaaagcttatccaccatgatcaagtgggcttcatccctgggatgcaaggctggttcaatataggcaaatcaataaatgtaatccagcatataaacagagccaaagacaaaaaccacatgattatctcaatagatgcagaaaaagcctttgacaaaattcaacaacccttcatgctaaaaactctcaataaattaggtattgatgggacgtatttcaaaataataagagctatctatgacaaacccacagccaatatcatactgaatgggcaaaaactggaagcattccctttgaaaactggcacaagacagggatgccctctctcaccactcctattcaacatagtgttggaagttctggccagggcaattaggcaggagaaggaaataaagggtattcaattaggaaaagaggaagtcaaattgtccctgtttgcagacgacatgattgtttatctagaaaaccccattgtctcagcccaaaatctccttaagctgataagcaacttcagcaaagtctcaggatacaaaatcaatgtacaaaaatcacaagcattcttatacaccaacaacagacaaacagagagccaaatcatgagtgaactcccattcacaattgcttcaaagagaataaaatacctaggaatccaacttacaagggatgtgaaggacctcttcaaggagaactggagtttcttccttctggtggggttcgtggtctcggtggctcaggagtgaagctgcggaccttcccgagtctcgctctgtcacccagactggaatacagtggcgcaatctcagctcactgcaacctctgcctcctgggttcaactgattctcctgcctcagcctcccaagtagctgggattacaggtgtgtgccaccatgcctcgttattctagtatttttagtagagatgggatttcaccatgttagccaggctggtctcgaacacctggcctcgtgatccaccagcctcggcctcccaaagtgctgggattacaggcatgagccgccgcgccaggaccatttgactatttcatatgccatttcttttgatacataagggcattcattgttaatttttaggtaatgatttatcccaaaattgttagtaagttatttatactcatttaatcctagaccaagtgctttccggctaatttcctggatactgctgtcaaaataaaatcaatcaatggat

SEQ ID NO: 1717 - DNA, 2040 bp, Homo sapiens
agtagagaaaaggggcctctggtgaccgcccctacctggcatccctctaacccaggaggagcgtggggaaaggggctgtgggcctctcggggagcgagctgcgggtagcggcgcactgggtacaggcgcgcgcttggctgtcgcctctgccgctgtgtttgggaggactcgaactggcgccaggaaatattaggaagctgtgattttcaaagctaattatgaaaacatttatcattggaatcagtggacatgagccccaggttaaaacacgctttcaataaatgactgaatcgagaagtgcctccctcccgtgtgatctcctcgatgctgcaaaactagatctaaagaggagtaactcagtgccccttctcctggacttcacagtccggtcagaagagacaaataactggcctgttgtgataagctacagcagacctcccagctggcccccaggtggagagagatggggaaaaggaggcatcgcagaggaaatgtgatttcatgtgtgacaaacagtggcaaaacaacactggctaagaatttgcagaaacacctcccaaattgcagtgtcatatctcaggatgatttcttcaagccagagtctgagatagagacagataaaaatggatttttgcagtacgatgtgcttgaagcacttaacatggaaaaaatgatgtcagccatttcctgctggatggaaagcgcaagacactctgtggtatcaacagaccaggaaagtgctgaggaaattcccattttaatcatcgaaggttttcttctttttaattataagccccttgacactatatggaatagaagctatttcctgactattccatatgaagaatgtaaaaggaggaggagtacaagggtctatcagcctccagactctccgggatactttgatggccatgtgtggcccatgtatctaaagtacagacaagaaatgcaggacatcacatgggaagttgtgtacctggatggaacaaaatctgaagaggacctctttttgcaagtatgaagatctaatacaagaactagcaaagcaaaagtgtttgcaagtgacagcataaagacggaacacaacaaatccttcctgaagtgaattaggaaactccaaggagtaatttaagaaccttcaccaagatacaatgtatactgtggtacaatgacagccattgtttcatatgtttgatttttattgcacatggttttcccaacatgtggaacagtaaatatccatgccaatggacaggactgtaccttagcaagttgctccctctccagggagcgcatagatacagcagagctcacagtgagtcagaaagtctccactttctgaacatagctctataacaatgattgtcaaacttttctaactggagctcagagtaagaaataaagattacatcacaatccaatatctgtggaattcattgtgtatgtttgtgtatttgtgtgtaggtgtgtatgtgtgtgtgtgatacatacatacatcaagtatcacaagacattgaccttatatattatgcactgtgatgtttttccgtctttaattttaaaaaacatattgatcacaaccacaatttggaaaatgttgctccataccatcccataccaacactcaccacctgcaaataatagcattactaggagctgcagtcacaatgaataaatcaacaattcgctacaagatctaggattatttgtgtattttgttgagtgtgtgtgtgtgtgtgtgtgtgtgtgtgttggcgtgtatctaataccattgtatctcattgttgagactttgttacaaatagggtttctggtttctttctcccccctcgtggttcattttgtttttgtcaaaccagtggtctaaaatcacagaaataagcaattacttcaatcatgtggaatccaggggacctatctttggaaagcacagaaggagatctgaattgtgtgatctcttgaggctgctttcaatgctggaatttaaattatgtactgaacaatcttttgcttattaataaaaagattacacacaaccat

SEQ ID NO: 1718 - DNA, 3685 bp, Homo sapiens
atgggggagctacccaaagcctggggaaggggagtcagtgctggaggtgactggagccgcggcgacggcggcagcagctgcggtggcggcgctctcagccgtggcagccgaggctgcagcccggcccagggcggctcagcggacaataaccgggctaggaacctgaccgggctggaccccactgtgatgcttcctgactgataatgttataacagtgcctggaagcctgaggctgcatttccagctggacgtacctcagttgtccccatcatcatggagacccaaaaggatgaagctgctcaggccaagggagctgcagcctctgggagtacccgtgaacaaacagcagaaaaaggagccaagaacaaggcagctgaggcgacagaaggaccaacctcagagccatcctcatccggcccaggtaggctgaagaaaactgccatgaaactctttggtggcaagaagggtatctgtactctgcctagtttctttggagggggacggagcaaaggttctgggaaaggcagctccaagaaaggtctcagcaagagcaagacccacgatggcctgagtgaagcagcccatggccctgaagatgttgtcagtgaaggaactggcttctccctgcctttgcctgagttaccctgccaatttcccagctctcagagtgcccatggggctttggagacaggctccagatgtaagacatctgtggctggagccacagagaaagctgtggctgagaagtttccctctatgcccaagccaaagaaaggcctaaaaggcttttttagcagtatccgccgtcaccggaagagcaaggtcactggggctgagcaaagtgagccaggggccaaggggcctgagagggtcagagccaggcctcatgagcacgtgagctcagcccctcaggtgccctgctttgaggagaccttccaagcccctagaaaggaaaatgctaacccccaagatgcccctgggccaaaagtttctccaacaccagaaccttctccaccagctactgagaaaatggcctgtaaagatccagaaaaacccatggaggcctgtgcctcagcacatgtgcaacccaagcctgcccctgaagccagtagcctagaggagccccatagcccagaaacaggggagaaggtagtagcaggagaggtaaacccacccaatggccctgtgggggacccactgagcctcttgtttggggatgtgacatccctgaaaagctttgattcattgacaggttgtggtgacataatagcagaacaggacatggacagtatgacagacagcatggcctctgggggccagagagcaaaccgagatgggaccaagcgaagttcctgcctggtgacctaccaaggaggtggggaggagatggccttgccagatgatgatgacgaggaggaagaagaggaagaagaggtggaattagaggaggaagaagaggaggttaaggaggaggaagaagatgatgacttagaatatctgtgggaaactgcccaaatgtatccacggcccaatatgaacctgggctaccatcccaccacatccccaggccaccacggctacatgctccttgacccagttaggtcttatcctggcctagcccctggggaacttttgactcctcagagtgaccagcaagaatccgcccccaatagtgatgaaggttattatgactccaccacacctggatttgaggatgattcaggtgaggccctggggcttgtccgcagggattgtctaccccgagacagctacagtggagatgccctatatgagttctatgagccagatgacagccttgagaactctccacctggagatgactgcctttatgacctccatggtcgaagctctgagatgtttgaccccttcttaaactttgagccctttttgtcctcccggccacctggggcaatggagacagaggaagaacggctagtgaccatccagaaacagttgttgtattgggagcttcggcgggagcagcttgaggcccaggaggcacgtgcccgagaagctcatgccagggaggcccacgccagggaggcctatactcgagaggcttatggcagggaagcctatgccagggaggcccacacttgggaagctcatggcagggaggccagaacccgagaagcccaggcccgagaggttcgttgtagagagactcaagtccgagagacccaggcccggcaggagaagcccgtcttagagtatcagatgaggcccttaggcccatcagtgatgggcctggcagcaggggtatcagggacctctcagatttcccaccggggaattacctcagctttccccaccactgcaagcagcgagccagactggagggacttccgtcctctggagaagcgttatgaaggaacctgctccaagaaagatcaaagtacctgcctgatgcagctcttccagagtgatgccatgtttgagccagacatgcaagaagcaaattttggaggatctcccaggagggcctaccctacttattcaccccctgaagatccagaggaagaggaggttgagaaggaagggaatgccactgtgagtttctcacaggccctggtagagttcaccagcaatgggaacctcttttccagcagaagatgcccaggtactgaagacaaacgccaagtgactcaggcgtgtgggacctggtagacagcttgtcattttctggctttattttatgtttttctttcttttgaacccttcttccccatgtctagaccctctgagagtactcatgtgtcttattttttttcctcgttatgttttgtgctttagttttgaaatcagagtgcccatgttgtgctttgtcttgttgagtttctccaaaggagcattttgggaacattctccacccaatggggaaggaagggggtttcaaccatgtcccctttccccaagaagctgtgggagacagatgacaatgatgcttgcactatcaggaatttaccatctcgttgaggaaacccttgcataggacttcctaggagctcagttgattgtgacattttcccagaagagaggctttggggaactccttcacccctcttgctgctttgggggaatctcctcccctaccaccattccccctcccctgccctgctccagctcacacgtggatggtactttggggaacagtgactttcagggtgatggcttgctggcctgatccctgactttccaatcctatagtcactccaaagaagaaaatccacatggtatgtatatgtgtgagggttgggtctattgagaggtgggactttaattattgttattattattggtgcttatttttcctgctgtatatgggggtgggggtgggggggaataaaacaggaatgtatatttaggtcatgttaaataaaatggctggaggaaggagggaagaaattaggaactgcagtacatcatcaccccaggtgtaagagttatttctctcccagtgcagaaaggggagtgtggcccctggctgtacctgagcttcctcttctccatccctgagacatcacagaatcacccgggttctgacctctccacttctagctctcactgacatctggatatcttgatgcactgcctgtttgtaacaacatatacttctttgctgaatgctaataaacttctgggttcaagagggaactcctcagtc

SEQ ID NO: 1719 - DNA, 1888 bp, Homo sapiens
agtagtgcttggtttccaacagctgctgctggctcttcctcttgcggccttttcctgaaacggattcttctttcggggaacagaaagcgccagccatgcagccttggcacggaaaggccatgcagagagcttccgaggccggagccactgcccccaaggcttccgcacggaatgccaggggcgccccgatggatcccaacgagtctccggctgcccccgaggccgccctgcctaaggcgggaaagttcggccccgccaggaagtcgggatcccggcagaaaaagagcgccccggacacccaggagaggccgcccgtccgcgcaactggggcccgcgccaaaaaggcccctcagcgcgcccaggacacgcagccgtctgacgccaccagcgcccctggggcagaggggctggagcctcctgcggctcgggagccggctctttccagggctggttcttgccgccagaggggcgcgcgctgctccacgaagccaagacccccgcccgggccctgggacgtgcccagccccggcctgccggtctcggcccccattctcgtacggagggatgcggcgcctggggcctcgaagctccgggcggttttggagaagttgaagctcagccgcgatgatatctccacggcggcggggatggtgaaaggggttgtggaccacctgctgctcagactgaagtgcgactccgcgttcagaggcgtcgggctgctgaacaccgggagctactatgagcacgtgaagatttctgcacctaatgaatttgatgtcatgtttaaactggaagtccccagaattcaactagaagaatattccaacactcgtgcatattactttgtgaaatttaaaagaaatccgaaagaaaatcctctgagtcagtttttagaaggtgaaatattatcagcttctaagatgctgtcaaagtttaggaaaatcattaaggaagaaattaacgacattaaagatacagatgtcatcatgaagaggaaaagaggagggagccctgctgtaacacttcttattagtgaaaaaatatctgtggatataaccctggctttggaatcaaaaagtagctggcctgctagcacccaagaaggcctgcgcattcaaaactggctttcagcaaaagttaggaagcaactacgactaaagccattttaccttgtacccaagcatgcaaaggaaggaaatggtttccaagaagaaacatggcggctatccttctctcacatcgaaaaggaaattttgaacaatcatggaaaatctaaaacgtgctgtgaaaacaaagaagagaaatgttgcaggaaagattgtttaaaactaatgaaataccttttagaacagctgaaagaaaggtttaaagacaaaaaacatctggataaattctcttcttatcatgtgaaaactgccttctttcacgtatgtacccagaaccctcaagacagtcagtgggaccgcaaagacctgggcctctgctttgataactgcgtgacatactttcttcagtgcctcaggacagaaaaacttgagaattattttattcctgaattcaatctattctctagcaacttaattgacaaaagaagtaaggaatttctgacaaagcaaattgaatatgaaagaaacaatgagtttccagtttttgatgaattttgagattgtatttttagaaagatctaagaactagagtcaccctaaatcctggagaatacaagaaaaatttgaaaaggggccagacgctgtggctcacgcctgtggtcccagctactcgggaggcttagacatgagaatcacttgggcccgggaggtggaggttgcagtgagtcaagatggcaccactgcactccatcctgggtgacagagcaagacttcctctcaat

SEQ ID NO: 1720 - DNA, 2489 bp, Homo sapiens
aaacagggcgcacttctccgggcaggaggcagccgggggcagtccggcgctgaacgggtagccggctgcctgctcgtaggcgccgagcgccgggtgcagggcagcagctgctgccgctgcagccgccgagctgggcagggaggcagccgagatggcctggccctggttgagaacagtctaaaaagtaaaaacaaagtttggcaaaaatgacaactttgcttgagaacagctctggaaaagcgaatccactgagagccgtgggaattctccgccagctgtgcttccccaaccgaggaagaatccaacccggaatatcgtttctggaccccaccgcggagaccccagctggaccctctcctgaaaactgcccggggaggggggtgcggtctcagcgccctccactgcggggtccaaggcgcagtagcggggcgcgaccccagcgctccaagcccagcattcttggcagctctccaggccccagtcagaggcacattgaccttgaagttgcacttgactcgcccactcggggctgcctggtggcgcctgggtcagcttgaaacccacgcagctgagggagctaggtgtggggttcaccatactgcgcccccgccggatttgggagcgcgggatctactcggaggcagagagattagccccagaggtcaagcctttcggcgtcgttttgtcatctgtattttctcgtccccttcgccgccgagtcctacaaagctcacttcagagagactgggtccacatgtgtgggctcatgaggaggaggacagcgagggtgacgacgctgggggactagcgcgagctggcgcattcctggcagtgagccaagggccccccgtcttgctagtctttccaagttgcttggcaattccaaaaatttcgactgtgggaaagttgaaacttgttcgtatagcgttctttcgaaaagattttccttgtctgtatctattttacagaaaacatactggtcctcactactgtttggggacgagttagcctaaatttgaacagaccttgaagacaaaccctgagccccgggaggcagccttctcagcgcgaggtgcacacacaagtccccgagcccaccgcgagggtctcacctggctcctgcgtggtctttccccactttggcgactttgaaggccagggggaccgtacagtgagcgaataacttagcgcctgcattatcactgctgaaacctcagagaacaatgtaggacatgcgggtgcaggtagagcaaaactagtgaaaagagtttatgaggaattcataccgcctcgcctacttgggacaactccttcattcagttgtcctccctagggggctgttatgcttatttgtgtcagacccttctttcccctggaatcttatcatcacagaatattaaacatttgaaaaaattttaaagattaaacttgttcgaggaaaaaatggtaaacactgttagggattgcctggcgtgcacaaattaaggaaagaaagaaactgaaaatttcagcgcggctttgggaatttttagctttgcgatttaaaacccacagcgccatctcctggtaatgaggagaatatagcgatggatgacaatactgaaatgctgactatgaaatactcaaatatgagaaacgcctcaaaaattatttcagtgataggttgattatgattacaaaatatgatctgacatggacatttattatcattaaaagttatcagacacaatcctggaagctaattatttgtaaatagaagtttgtatatttatacatacatgtattttatagattcagacgcttatgctgtgaatttacaagatatgattctataatttatcataaatacataattttacaaaacagttccctgttttactttttgtgaatgattttaccatatatggtagaaaaagaataataggatgtggtgatctatggagacataaaatcttctagatcctcattgtattttactagtcaacattaataaatactttagccccattgtctcaataacttctcactttatctatgtcttctcatcatgcaatcttacagaatgtcttactgtcttaatgttaagacatcatgacaaaaatgtgttaacattattcagacattctgatcctgaaatatcatctgaagttaaattattttccaaaagtttaatgcacataatagaatcataaatacttaatacttttctattaaaatgtttctgaagtattctttcaagcttttctcccttttataaataagattgaaacacactaaaatttagagatgatatccctattaaaaacatttctcctctatgattgtatacacaggccagctgcttgaaataaaaataaaagtagatatgctttttgtagtgtacaaaatattatgaatatccttcaaaattgtagatcaaacagacaaatgtaaacttcagttgaaagattcattttatttgattaattaaagtgaagatctattaagcc

SEQ ID NO: 1721 - DNA, 2492 bp, Homo sapiens
agtctgaactcgcgatcccgggcaggctccgtggtcctcgcctcgcttcacggtctttaccgctcagcttcccggagtccgcgcaggagcgcgtctgaataggaagcgttttcggacgtggatgcggcgttttgtcgctgccagtggtgtctggagaggttcgggctcggtcctcaggtcctggctcccagaagcaaaataactcaagtgaagcaatgaaggaagaagaaggaggttgctggccttggatatcataatttctggggacaactttaagtggacactaatatttctgactaggaaaacttcaaaaacttcatggcaaatgcagaagagacaaagacgtatagtccatgttatccactattttctgagcacagaagaaaatgatcaagacccaggaatcactgaccctggaggatgtggctgtggaattcagctgggaggagtggcagctcctggacactgctcagaagaacctgtaccgggatgtgatggtggagaactataaccacctagtatcactggggtatcaaactagcaaaccagatgtactctccaagttggcacatggacaagaaccatggacaacagatgctaaaattcagaataaaaattgtccaggaatcgggaaagttgacagtcatctgcaagagcactctccaaaccaaagacttctgaagagcgtgcagcaatgcaatggacagaatacacttagaaatattgtacatctcagcaagacacattttcctatagtgcaaaatcatgatacatttgacttgtacagaaaaaatttgaaatcaagtttaagtttaatcaaccagaagagaagacatggaataaataaccctgttgagtttattggaggtgagaaaacacttctacatggtaagcatgaacgtacgcatactaaaactagattttctgaaaatgcaaaatgtatccatactaaattccaagtcttcaagcatcagaggactcagaaaattgagaaaccccatgcatgcattgaatgtgagcaaaccttccttaggaagtctcagctcatttaccatgagaacatttgtatacaagagaatcctggaagtggtcaatgtgagaaattatccagaagtgtcctgttcactaagcatccgaaaactaatacaacagacaaaatctgtatacccaatgaatatagaaaaggctctactgtgaagagtagtctcattacacatcaacaaacccatacagaagagaaatcctatatgtgcagtgagtgtggaaagggctttacaatgaagcgctatctaattgctcatcagcgaactcatagtggagagaaaccttatgtgtgcaaagaatgtggaaaaggtttcactgtgaagagcaatctcattgtacatcagcgaactcatacaggggagaaaccctatatatgcagtgaatgtggaaaaggcttcaccatgaagcgctatcttgttgtacatcagcgaactcatactggagagaaaccctatatgtgcagtgaatgtggaaaaggctttaccgtgaagagcaatctcattgtacatcagcgctcccacacaggagaaaaatcttacatatgcagcgaatgtggaaaaggcttcactgtcaaacgcactctcgttatacatcagcgaactcatacaggagagaaatcttacatatgcaatgaatgtggtaaaggcttcaccacaaagcgcactcttattatacatcagcgaactcatacaggagaaaaaccctatgaatgcaatgaatgtggtaaagccttcagccagaaaatatgcctcatacaacatgagagatgtcatacaggaaagactccctttgtatgtaccgagtgcggaaaatcctattcacacaaatatggcctcattacccatcagagaattcacacaggagagaaaccttatgagtgcaatgaatgtggaaaagccttcaccacaaagtcagtactcaatgtacatcaaagaacgcatacaggagagaggccgtatggatgcagtgattgtgagaaagccttctcccacttatcaaaccttgtcaaacataagaaaatgcacacaagagaaatgggtagaatcagtcaagttgaaaactcctgtaatggagagtcacagctccttccttataagtgaactcatgcagaagaaaaccctactagtgccgtgactatggaaatgccttttgtggcaactcagacttcattaaacatcagtgtgtttctagccaattggaacataaacatggtgctgcctgttgacagatgtgtgtctgtcctcaggaggtgaaataatttgccctagagatcaatttgatgaatacagtaaataaggtagtgcctttagtggtcttttacctcatattttctgtcaatgaaaatacgttgaataaactatattaatgtggagatgttttgagcaataatttctgctcatatgtctgaaaagtatacagagataaattctgtgaatacaaagactaag

SEQ ID NO: 1722 - DNA, 1945 bp, Homo sapiens
cttttcagtggccctcgtggaacggtaggaagctgagctggactctctgccacatcgttcggttcccacaacagcctgatgaagcagcagcagaaaaaatggaagccattttggttaacgggtcacatcttagcagttggcagcgtaagaagcggaaggatccactggtcagaaatggagattgaggagaagctgagagcacggagggcttcaggggagagcctgtcctttggaaaagcgggcagtttgcactcgtggtagatgagtggggaggccgctcagtctctctgcccctttgcacatgctgcacccgtttagtttgacgtcgtggagagctcctccaggcacgggctgtgtgaaagggtttaaaagtttgggggcatggctgggggtccccgcatgaggggtgctgtgtaggctcccatcttttctgccggtcatgctgggagccaacagcaccggctcctgacgtggggacttgccctgtgccatgacgtggggactcgccctgtgccctgcgccccggttcctgctggttctgtgccttctggactcatttcctttccagggtccgcaaccgcttccgacacaatcactattttggctgcggccacggcttcattcgcttcagctgcgagcttttctcagcgcagagagcacagggaagctgggaggagtccgcctagatggaatcttccagaagcaacatgactcttttaggcctttgctgccagctaagaaggtgaagaaaagtcaccactgcaataaaaagagggcactttgtcttacttggcaataaaccaccaccagcagcagcagcaatagcagcacccccacccccaccaaacccaaaacaaacaagaaaagcaaaaggaaaccttcgttttcagtgagaggattggcatgaagaatccttgggacacaggaatcaatcaagacctttggatgcccctgcctgctctgtctctagaagcctcaagcccagcatccccatgccgacgtgctcatctctagcaaaacaccagcctctcagccctctctccataaaggccactagaaagtactgtgatgccaggctgctccacatccaggcagcctgggtgaccactgccctttatgagaatcagaaaaagctgtctcccgagtagttggaattacgggtgcatgccaccatgcctggctaatttttgtatttttagtggggatggagtttcactatgttggccaggctgctcttgaactcctgacctcaaatgatccacccgactcggcctcccaaagagctggaattacaggagaagctaaacgttttaaaataagtatattatttctgaattactataacagacatggactccatttgaacaagatacttaattccatcaaaaacttgtcaaaatatacaaatttagtcacaagacactttactaccatctaccaaagctgtagtaaacacacacattttccatctttgaaatgaaataacgtataataatgttttccaaaataacaaagatgtctgcagtgaatagcactccctttgatgtggcaactgggtcaatcgtgttaacaactgtgaattcatctttttaagaaattcttttattgtttcttttcttttccgcgacagtctcactcgtgttgccccggctggagtgcagtggcgctatcttggctcactgcagcctccgcctcccgggttcaagcaattctcatgcctcagcctcctgagtagctgggattataggcacgtgccaccacacccagctaatttttttgtatttttagtagagacggggtttgaccatgttggtcagggtggtctcgaattcctgacctcagttgagccgccggcctcggcctcccaggaagtgctgggattacaggcatgagccaccaggcccggccttattgtttctatttgtaataaatctgttccccttgc

SEQ ID NO: 1723 - DNA, 3198 bp, Homo sapiens
tttggttaggttttcatggtatatctccatccctttacacatctctctacagagagtttccttatacctctctctacccacccccaccctgccaatttcccctaatagtaacatcttgcattagtatggtacgtgtgttacaactggtgaatgaatacattattattaactaaagtcacatcttacattaaggttcactctttgtgttgttcagttctatgggttttgtcaaatgcataaaaatccaccattactgtttcatacagaatagtcttaccgccctaaaaatcccctgtgctttgctttttcatccctttttcactctctcctggcaagtactgatctttttactatctctatagttttgccttttctagaatgtcatatagttggaatcatatagtatgtagccttttcagactggcttctttcaaatagcaatatgcgtttaagtttcctccatgtccatggcttgatagcccatttctttttattgctgaataatattccattgtggatcactttgtttatccattcacctattgaaggacatcttggttgcttccagtttggggccattatgaatgaagctgctataaacatcacgtgcaggcttttctgtagacataagttttcaactcattgtggttcatttccttttgaagtttgtaattttttttttactgtgaactccttttcagtgagagttattttccatggaaattctgtgtaccctaagctatgaaagcatcactgcagaactatttggattgccactgctggggcccactggtttcactaatgcaggaacaatttataggtgaatttatcaacttcgggggttttgtattatacttcaaatgtccatttggaatgcactcctacatgtggtacaggactgtggttctgacttcttgtaagtaacccctgattcttcttaacattttcattagccagtgggtgacatctttctagttcctattttacacacagagatgtcctttgtgactcccagctttaagcaggtagctcaattctaattctctgcacatttgtgccctgtggcctagaattcacctcacactcatgattagagccttaatcccccaactgcaaagccacacagcttcaatttctgttcactccctcactttaaatttcttcttcatttttgtcacataataaatttattttctggtttgagcttggctgcatattaaattatttttgttaaatttgagccagcatttctctgtacttgcactcaggggaggtggtggtggtgggacatggggagggtccatccacatcagctcaagtcatgttgataggagttcactgcttgggcatttagggattaatgttattccataacattctagtggaaagacttaacaagtttgatgattcattcattttcttctagaagtctggcaagttgatgagcagatagatcactacaaggaaagccaagacaaacttccttggcaagctgcattcataggcaaggaaacactgaaggatgaaagcggtcaagaatccagaacatgtagaaaaagcatttatctgagcacagaatttgattctgtaaggcaaagactccctaaatattattcgtgggaaaaggcattcaaaacatcatttaaactttcttggtcaaaatggaagctatgtaagaaagaaagatgatggatgtaaagcatattggaaagtatgcttccattataatcttcataaagctcaacctgcggagagattttttgaccctaatcaacgagggaaagccctccaccaaaagcaagcccttagaaaaagtcagagaagtcaaactggggagaaactctacaaatgtactgaatgtggaaaagtgtttatccagaaagcaaacttagttgtacatcaaagaactcacaccggagagaaaccttatgaatgctgcgaatgtgcaaaagccttcagccagaagtcaaccctcatagcacaccagagaactcacacaggggagaagccctatgaatgcagtgaatgtggaaaaacctttatccagaagtcaactctgattaaacataaggaaattcatatggagagagaccctataaatgcagtgtctgtgagaaagccttcagtaggaagtcaactctcattaaacatcagataattcatatgggagaaaccttatgaatgtaataaatgtgggaaatcttttagtgttaaatcaactctcattgtatgtcacagaacataaatgcataagttgcatgctattgtgaatagtgtgatgaaattttgcactgtcctgctctttcctgctcaggatgcaaatcagtgaatctttttttttttttgagacagagtcttgctctgtcatccagactggagtgcagtggcacaatcttggctcactgcaacctccgcctcttgggttcaaccgattctcctgcctcaacctcccaaatagttgggattacaggcacatgccaccatacgcagctaatttgtatttttagtagagacagggtttcaccatgttggccagcctggtcttgaactcctgacctcaagtgatccgcctgcctcagcctcccaaagtgctgggattacaggcatgagccactgcacccggcttgaatcatccttttgtccagtattatatccatgctgtatatgctacccgcccactagtcccttagctgtctcagttgtcagattgactgtcatgggattgcagtgcttgcattaaagctacccttattgtataatgaccccaaagtgcaagagtagtgatgttggcaatttgcatacaccaaaaataagttataaagtgcttccttaaagtgaaatggttaaagttcttgacttaataaagaaaaaaaatgtatgctgaggttgttaagatttacagtaagaatgaatcttctatccaagaaattgtgaaggaggaaaaagaaacttgtgctagttttgctgtcacatctgaaactgcaaaagttgtggccacagtgcatcataagtgctaagacgaaaaagacattaaatttgcggatggaaggcgtgaatagaaatgggttctgacagcaatcaggttcggtactattcacagtttcaggcatccgctagggatcttggaacatatcccccatggataagggaggggtactgtaccttgtcatattgtgcattaaagaattcattgagtgt

SEQ ID NO: 1724 - DNA, 1891 bp, Homo sapiens
attattttaactaccccctgggagggtgagcaccttctgtgctctgtccccaaccttccacttcccctcaacgcgctgctcagggatgaccttcggcactgtgcttcttctgaggtcctggcttcttatcatggattcaacctggatgtggaggagcctacgatcttccaggaggatgcaggcggctttgggcagagcgtggtgcagttcggtggatctcgactcgtggtgggagcacccctggaggtggtggcggccaaccagacgggacggctgtatgactgcgcagctgccaccggcatgtgccagcctccaccaacggctcccggctcctggcctgtggcccgaccctgcacagagtctgtggggagaactcatactcaaagggttcctgcctcctgctgggctcgcgctgggagatcatccagacagtccccgacgccacgccagtttgcactgatgcagtactcaaacctcctgaagatccacttcaccttcacccaattccggaccagcccgagccagcagagcctggtggatcccatcgtccaactgaaaggcctgacgttcacggccacgggcatcctgacagtggtgacacagctatttcatcataagaatggggcccgaaaaagtgccaagaagatcctcattgtcatcacagatgggcagaagtacaaagaccccctggaatacagtgatgtcatcccccaggcagagaaggctggcatcatccgctacgctatcggggtgcgcctcttcttcacccctgccccaggctcagcctgcatctccttcaggtgcagtgctgctgggctcatcctcctcggctgtctctctgctgcaggtgggacacgctttccagggacccactgccaggcaggagctgaataccatcagctcagcgcctccgcaggaccacgtgttcaaggtggacaactttgcagcccttggcagcatccagaagcagctgcaggagaagatctatgcagttgagggaacccagtccagggcaagcagctccttccagcacgagatgtcccaagaaggcttcagcacagccctcacaatggtgggtagagcctgccctcaatccatagctcttggataccaactctgcacccaccctgggctgggggctgggagccagacataaacaagagcagaccccatcctcaatcgccagggagaggcccccacgcgtgtgttaggggccaggagcacagcagggaggagggtagcctgggttcctgctctcaaggatcatgtattctagtggaggagacagtaagcaagagcctctcagatagcactaagcatcagggtagagagagagatagccagaggagcctcagtaatggaaaaggccagccctggacaaatcagaggagactgttctgggcacaggacaaagcaagtgccaaggtcctgaggcaggacccaggtcctcggcgggagagatccgggcttgccagagcccagggagcccaggcagcctggaaggagagggctggaggttgagaaggaccaggtgggatcaaagatgtggtttggaagtgcgtgtgtgttcaaaggatccagatggggccggtcactgtggctcatgcctgtaatcccagcactttgggaggctgagacgggcggatcacttgaggtcaggagtttgagaccaactggccaacgtggcgaaaccccacctctactaaaaatacaaaaaaattagccaggtgtggtggctcatgcctgtaatcctagctacttgggaggccaaggcaggagaattgcttgaacccaggaggcagaggttgcactgagccgagattgtgccactgcacttcagcctaggtgacagaacgagtctctgtctcaaaacaacaacaacaacaacaac

SEQ ID NO: 1725 - DNA, 2454 bp, Homo sapiens
tggtgaatttcaggccaacagggcttcctgggatacaagagcgttctccatggatctgccttactaccatggacgtctgaccaagcaagactgtgagaccttgctgctcaaggaaggggtggatggcaactttcttttaagagacagcgagtcgataccaggagtcctgtgcctctgtgtctcgtttaaaaatattgtctacacataccgaatcttcagagagaaacacgggtattacaggatacagactgcagaaggttctccaaaacaggtctttccaagcctaaaggaactgatctccaaatttgaaaaaccaaatcaggggatggtggttcaccttttaaagccaataaagagaaccagccccagcttgagatggagaggattgaaattagagttggaaacatttgtgaacagtaacagcgattatgtggatgtcttgccttaaagataaggctgccggacaaagcaagttgaagagatgagtaacagttctcactgatgacccacttctgcaggcataggtccagagcaccaaactctagtggacaattcagactctcctggttgtgtaactgaagatgttctgcccaccagcaccagaggtcactctccacatccccgcctcccagacatataccaggagcaatttcaaaaccctctccagtttcactcttctttcttggaatgggacagcctgaacattttccctttgacttgttaaaggtaccaccctacatcatggttgacaccctcctttggaccatgcagtcagaggggcagctttatacagaggaggggcacacttgtctgtgagtttgaagccctgagttccagtcctgtggctgtgtgactttgaacacgtttctgcccatctccaggtcttagtttctttgtctctgtggttgggtgggatgataaacattgccccagtctctctgttgagcctgcttgtgtcaggtgaaggtgagggatcgggagtgatggagatgcatacagatcagcaccttctctgtacctgctggacccccatgtgcacccttctccctccagcctgggctactctcctcctggttctttctaatcttaaacttcctggtgagcattgccccagccacactttctccctggttttgcttaattccacttatgcatcagtcatttcaacagcatgaatgtggttctgtacagtgatgtatgtggagatttctaaaatattctatgtgtgatttctgttcccaactaggttctaagtgccatcaaagcacggttgggtctcccttgtatcttccacagtgtgtagaaatttgtgctgcccagagctgtgcctagttcatagaaactgactggaagcacattgctgagggaggtttgttgaattggtttttaaggtttattgaaattgatttgctgaatttttctgctagttcaaaatgtgaattaggacctggtcagtttgaaatataccaaattctatgccctttctcttacctatcatcaaattgtagtaatgtatttcaccccactggacttatcttcagagttttaaaagagaggagctctcgacttagaggtaatatgaacagatgaacagacactgtggctggagccccgaagtgtggagcattgtgagatttggggtcacagcaatttatggctactattccctgggtctggtaggtaggacaaatgtcctcttttacttttcaaaactggcttaggtattcatggaccttgattcttctatatacattttataataaatacgtgaaattgcttaaaacctctttttggaatttttaatgaacttgcaacaaatttgtaaataggagagaactgacgttcttgtgatgttttcccatgcataaacatgccacatccatgttcttgggtcatcttttttgccctttcatggagtcataaattttcccaactgaagtcttgtatattctgttagattaattcctatttctagttgctgtaaatgatatcttatgttttattacatttctaataggatatggtgttggtgaaatgttaaccctctcattagatctactagtttacctgttgattctattgtgttttctatgtaaatgattttgtcagctataaataataacattttattttctctttccttgcaatacctatgctcatttattttttatgtttacccattggttagggcctcctgtatacattaaacagttcatagtcatgatagtgagtattcttacactgttcccagtattacagggaatgcttagaaattttctttatttaaacattatgtttgttgtagccttgttaaaggctattttataatttttactagaaatattttgacatttattgtgatttttttctatctctaatctattgagatagtcacattccttttgtcttcactccattataaaggtaagttaccttaataaaattgttgatatc

SEQ ID NO: 1726 - DNA, 3095 bp, Homo sapiens
ttttgctttgctataaaggaatatctgaaactgggtaatttattcaggaaagaggtttatttggctcatggttctgcaggctgtgtgagcatggcaaaagcatctgcttggcttctggtgagacctcaggaagcttttactcgtgaaagctaagggggatggcaaggcatgtcatatgacgagagggagcaagagagagaggagggaataccaggcttcttttaataaccagctcttgcgtgaacttaatatcacagggagggcaccaagccatgcatgtgggatctgccctaacggtccaaacacctcccactaggcctcacctccaacactggggatcacatttcagtatgagatttggaggggacagatatccaaactatatccaaccctttgatatgttgtacagcttcaggttctcatgttgtttttctgtaaccatattccagctatccatattggttaactggaatatagttagagaaaacaacttttcctaattgttcaggccaacatgcagcattatgggactggtcttaactttagataatagacttctgataactgatgcagtcttaaaggagagcaggtatttatgttgttgtttttttgtttacattgatgctatactttggattctttgatgttactagccactgaaagctggatgttttgtccacatatgcaattgctaagccacatctgcctattataaacttggcagtttggggagtgtctttttttttttgtttttcttaatatccaagtataggtccttacaaatgtattcttaaaattcaacctgtttttctctctttatatgtattctgccaacttacctggtgtttctagcttcatttcacctgttttgataattatatcctttatttctttttcaaataattgatgaaaatttttaataagactgaactctctgagaacagacatctgaatcatacttctggccaggcccttttaggtttatctcattctgttcatcagaccttcttggtactttgtatttctttatcttgttcacaaggatgtcatgaaaaacctttccagatcctctactgaagcctaggtatgctatcttttgcattttcctgagttgctaagttagtcatagtagccaaatgaggctactccaacatgatttgtctagtaaccagtcatgctcaatcatagtgatcaatgtttccaatctagttatagtttccttttttagaattttgcccaagatcattaccaggttcaccagaatgagctttgtcttctttttgaaaatctgccatttctctcctgtgattatttccttacatttactgatctagtaatgtcattttaaaattccatttatacttactccttgttgccctctgcattctccctacacggacctgctttgtgttccttgaacacaccaagttcttctgtaccttagagctttaatactcccgagttcctacgccggggatggtgtttccttggatcccctcaggctggctcctcatctcttaggtgtctgcttaaccagttttcctaatcattcaacctaaaatgacttctgagccattcaccattctattttttttggtaattgctcagaactgattaatggtagcctcattctcctatgcaaagaatatttcacacttaaactatcttacatccttgccccaggaccaggaccattgccattgctgtttacaaacagctttttcttcaggtaattgcatggctggatctctctcatggcttaggtttcagctcaagttatcacctctccaaggaggccttccctgaccattctctctaatggactgcatccatcattctcagtctaacacatacctcattttcttcatagaactcttcaatatctgaggtgttccaagtatttacttttgtgttatctcccctatcaaaatgaaatcactatacgagcagatactttttttcattgttactatgcacaacacctagaacagtgtctggagcatgtgttacacatatttgctaattgttagaattaacaaacgaattcagtgtgttctaaccagaaactgtaaactccccattttaatatgtagtctcatccatccttctttaccttttaccagggcttggtgtgtactttctaggctggtgaatgagggcctcaacaaggagtacagaaggagaattggaagtgaagttgcacaagccagtggttctatctattctatgatttttccccttgttctcagtataacagaaggttgcctttctgcccactctagctttttttggtcgaagggcaggggtatgggtggcaggggttggagaaagaggggagtcctcatcattttggcaatgttcttactgggcagtgtctcttacacgcttcactgtttgtgtctaccacttcctcctttcagtacatcctgctacatgtggttcagtggagagcttccagtttaaccatcatgcagtttatctctttttaaatttcctcttctccaaaactatagagaatcatatggtcacagtcaactttttaaaaaagctttccagccttcgtaactgtctttctttcatgtcttcttagctacttgctgtttttccttaagtttttgaaacctgactatacttggagtcttgggaacacatcttacagtgtttcctcacactgtgagataaaatggctactttttcttgaagtttttgtcttctaaaatgaacaattcaaatatagttataaaatggagtatttattttgtacttttaaaaaatggtttaaggtgaggctttatttattcctaatatgtgaataatactgatgtgaaaaatgtgagtcccagcactttgggaggccagggcgggcggatcacaaggtcaggatatcgagaccatcgtggctaacacggtgaaaccccatctctactaaaaatacaaaaaattagccaggcgtggtggcgggcccctgtagtcccagctacttgggaggctgaggcaggagaatggcgtgaacccagaaggcggagcttgcagtgagccgagatcagatcacgacactgcactccagcctgggcgacagagcgagactctgtctc

SEQ ID NO: 1727 - DNA, 1939 bp, Homo sapiens
cacttcatgattcctcgcaagctgggcccagtcctctcatcccaagagcagagccaccgtagccggagtcctagcctcccaaattcggaaatccaatccaacggtctcaggaatgttttccatcccgccacgcgcctcccgaagctcccagaccggaggctcagcccccatctcgtaaagcactgcctccctagaccaattctctgggatccctggaagacatctggcatccagcaagtcttgacccctctttagaaagccatggagaaactggaggtaaaatacctgttttctgacaagactaggactcttacatagactgccatgaactacaagaagtatagcattgctcaaatgacctgtggttagagttacttgttattggtaaatagccactgtggagactaaggaccaaaagaaacacagaaagaaattttacagaagaaaaacagtgggcccaaagctgaaaagaaaaagaagcagcatctgcaggatctccagctaggggatgaagaagatgtctggaagagaaatcccaaagcttttgcaattcagtctgctgtgggaatggcttgatcctttcacaggactcaggatttgaagacaaaaaagcatcatattccagtggttgatcagactccactagagccgccaccaatagtgatagtggtgacggggcctccaaaagttggaaagagcactttgatataatgcctcattgggaacttcacccagcagaagttgaccgagatcagaggccctgtgatgatcgtgtcaggtaaaaagctccgactcaccattattgaatgtgggtgtgacattaacatgatgattgatctggctgaagtagcagatctggttgccaagctgttctacctttctggaatggtgcatggagaatatcaagaccaagaaatccacaatctgggccattttattacagttatgaagtttaggcctctcacatggcagacgtctcatccttatatcctggcagacaggatggaagatttgaaaaacccagaggatatctgaacaaaatgtgactggcaggtgtcactttatggttatttaagaggagcacacttgaaaaataaaagccaaattcacatgccaggtatctactgagcgtttcagtcaacaatacagctcgtgttcgacaatattccttgatggcagcacagccagccagcattatcttataatgacaataatatctgtgaccttggagatacatcatcatatcacggaaagagatgcagatagatctttgaccatacttgatgaacagttatactcatttgcgttttccaccgtgcacattacgaagaaaagaaatggaggtgggagtttaaataactattcctcctccattccattgactcccagcaccagccaggaggacctttatttcagtgttcctcccactgccaacacacccacgcccgtttgcaagcagtccatgggctggtccaacctgtttacatctgagaaagggagtgacccagacaaagggaggaaagccctggagagtcacgctgacaccatcgggagcggcagagccatccctattaaacagggcatgctcttaaagcgaagtgggaaatggctgaagacatggaaaaagaaatatgtcaccctgtgttccaatggcgtgctcacctattattcaagcttaggtgattatatgaagaatattcataaaaaagagattgaccttcggacatctaccatcaaagtcccaggaaagtggccatccctagccacatcggcctgcgcacccatctccagctctaaaagcaatggcctatccaaggacatggaagctctgcatatgtcagccaattcagatatcgggctgggtgactccatatgcttcagccccagtatctccagcaccaccagccccaagctcaacctgcccccctcccctcatgcc

SEQ ID NO: 1728 - DNA, 2952 bp, Homo sapiens
ctactaaaaatacaaaaaattagccgggcatggtggcgggtgcctgtaatcccagctacttgggaggctgaggcaggagaatcatttgaacccaggaggcagaggttgcagtgagccgagatcacaccattgcactccagcctgggcaacaagagcaaaactccatctaaaaaaaacccacattttcatgaatatcagccatcaacaatgcagaaagtaatagactagtcttctgaattattaaccctagcaattgtcaccaagtgaaaacctcggtcactaaaacttcttggaatagcattcaaggtcttgctttaacacaaaaccccaaaacttggcggtacaaaacaaccattttctgatggatcgggaatccatgtctgaagtctcagctaagaagactccaaggctgggttccaggctggaactgcctggggcatctccccacacacacactggtacttggctggaccaccagcaggttctactccccgtgtttcttcacagtttgtcagttgggctgatttgggtttgctcacagagtatcagccaagatcccaagatcaagtatccaaagagaacccggtgggacttatatttccttttatggcctagccctggaatatgtggcatctctctgtccatagtcacagagggaagaaacagatggcatctctcagtggggaaccagaatcatatggttaaaagaacacatgggatggacaggttgccaccattgttggcatacattaataaagtctgccatgggccgggtgcggtggctcacgcctgtaatcccagcactttgggtggccgaggcgggcggatcacgaggtcaggagatcgagaccatcctggctaacacagtgaaaccccgtctctactaaaaatacaaaaaaattagccgggcgtggtagcgggcgcctgtagtcccagctactcgggaggctgaggcaggagaatggcgtgaacccaggaggcggagcttgcagtgagccgagatcgcgccactgcactccagcctgggcaacagagcgagactctgtctcaaaaaaaataaaaaaataaaaaaataaagtctgccatggcaccccatagcatttagacacccacctttctagccctacctcccacttagtgattgtctgtaaatacgcacggccttaccttggcactgagagagatgcatggctgagtaggtgtcatctcatctgtaagaagcaatagcagaggggatgcagaaggagctgctctgttctgctcattgtcacctgctcctctgcacaccttccttcatgctcttccctcagcctctccccagctcacacccctttatttgaaactctgctcatttttcaggccctgcttcaatgccaccacctccgtgcagcctcctctgatgtttgtcattagcttagctcttccgtgtgtgctcctgcaccactgatcccttccacaacatggactgtctgtgatgcacgtgtgcaggatgctgggaatgcccaggtggaaagacacacgtgctgcccccaggaactgactgactggtaggcacagtacagataccagtggtgaggacagtgaggattcttcccttctgaccctttgcagatggtaaaggaaggaactcgtcacctaattcccccgactgcccgttaagaacaaaatcccttgaaaaattccaaaagctttaactctgataactgttaaggtactaaacaagaggataatggggcagggaaaatgggggcagtgtagtgcagaagtctgaccctcaagagcagaggagcttggtcctagccagtttggtttcaggtctacagtggcatttggtattttgagctcacctctctttttctcttggagtgactgcttcctgcatctgctgcatctccgtgggctcccctcagaccctcttctgaaggcctggggtgtctctcctgccaccatgcctgtgtctgcaggtgcctgccaccagccccagtctgctgcacgggccctggcaagtagaaagcacttgccttctgaccacacggggagctgagggtcagagacggaaccagggctcgaccctccaccttgaaaccttgagatggggatgctcctcattctagccagttcctcctcagctctcaaaacaaggaacagatgctgaggaaaccagatctggacaaaagtcatctgagcctggtgtgaggcagattccagaagtttagttacagacatcctttataaggagacttcatcgggaattcaagacaacctggtgattcattgaaatttgcctgtgaaagagaatctacatagacttcctgccacctcttgagatgtgacagttgctgaccctcccgccaccacacagggcgagcccctagccctgagcttgaaccatgttgcttgcacaaatagctgggtgatttagaagtgaggtcagctgtgccagcagttacagggtggtggttgtctgtaactttaatccactgactgttgtactagggcagtttgggctagacactttggaggagctcctgtgaagggcatgaaggctcactgtagcagcagctcagttgtctttcagagttctgcccttagagctggtttgcagtgctcatccttcttgctgatattttaaaataggtagaaacaggctgggcgcggtgactcatgcctttaatcccagtactttgggaggcctaggtgggcagatcacctgaggtcaggagttcgggaccggcctgaccaacatgttggaaccccgtctctactggaaatgcaggaattggccaggcgtggtggcgcgcacctgtagtccagctactcaggaggctgagacaggagaatcgtttgaagacaggagaatcgtttgaacccaggaggtggaggttgcagtggcagtgagccaagataccgccactgcactctagcctgggcaacagagcaagactccatctc

SEQ ID NO: 1729 - DNA, 2782 bp, Homo sapiens
gcttgtccatcagtctctgcccatttcttctgtctcccacagacatggtctgtgtagttgttctgcacactacccgtcctcgccccttctcatttccctcactccacggacagctacaggagggcttccatcatttgtcctcttacttccttgttagaactttgtgctgctgaccaccactctgaaccaaaacttctttcttggttcttgaaagttgctgtctttctcctccagagggtctgtgtcttccttccaactcttaaacatttttgtttcccagaatccatcattggccattgctttttcacttgccatgagctctgtgaatgagatggttcctgctgaagacatttactttcaatgatctacagaatttcccaaatctatgtctccagactggatgtttctcacgtctgtggcccactgggcatcttctgcactttctctgcatttgtaaacactgagcctgtatgcgtgtctatgtggccatggccctggccgtggggatgcacccataattataatgagagcaggcaaatgtcatgtggctatgtatgagacattgttgtgaatgttttacatgcatcagctctttcaacatttacagcatctgtgtgtggtaggtaatgttgtttccttcattttgcagagcagaatatagataggctcaggttaagaatttgcccaaggttacacagttatgaagtttggatttaggaatgggaggccacgtagactggcttcagaattcatgtctttaaccactttattgcttctcatgttggggggtttgttttctggtcactatttttactaaagttgattcaacaatgctataatctgttactctcattcgacaatacatcttgactgtttcttcaacttgaggaaggtaaaccaaagccactctttaatgggtgcaaatatctgttgtaactatgtagaagatacagtgtctgggtttgaggacaggggagtgggaaaactgagtagggaagcggtaagacatgcatctggctttaggagtgtttgaagtgcctaaagatcagggtgaatttcccaaatttgaatcttgttgcccaagccacattgcaaccacctctttttctcttacctcgtccccacatccaggcactgccccattctgttcattccacctttttttttagtagaccctccatatatgtgtgtgttttggtgaatggccacacacagcaaagttatttttattgcaattttgttgttgttgtttgagacacagagtctcacactctgccacccagactgaagtgcagtggtgcgatctcggttcactgcaacctccatccccccatgttcaggcaattctcctgcctcagcctcccaagtagctgggattacaggcatgggccaccatgcccggctaatttttgtattttttgtagacacggggtttcaccatgttggccaggctggtctcacactcctgacctcaggtgatccacccgcctcggcctcccgaagtgctggcattacaggcatgagccaccacacccagcctttattgcaatttttggttccctcacagaatgtttaccatgaagctgtgcgtataggtggtaccatgtatgacataccttgacctcaaagataatctacctgggctttttttgtttgtttgttttgagatggagtctcactctgtcacccatgctggtgtgcagtggcgtgatcttggctcacagcagcctctgcctcccgggttcaagcgattctcctgcctcagcctcctgagtagctgggactacaggcgcctgcgaccacacccagctaatttttgtatttttagtagtagtgggatttcaccatgttggccaggatggtctccacctcctgacttcatgatccacccgcctcggcctcccaaagtgctgggattacaggcgtgagccaccgcacctggcctacctgggcttttttggacagatgtacatgattttagaaattgttatgaatgactgtcttgggatcctcaagaacacccccaggtttgacgatttgctgagaagactcaggtctcagcattctgtcatactcaacagctatgatttactgcagcaaaaaaatacaaagcaaatagtaaagggaaaaaagccaaaattcagagaaaaccaggcacaatcttctgagtcttgtttcagtgaagtcacaggatgtgccttatttaagttccatctggtacttatgacaacacatgctatatgtccactgggaagcttattagagactcagtgccagggtttttattgggcatgttttctagcacatcccacaattctggacttccagaaggttagcaggggttcagcttttcagctgaaaacgttatccccctttcagctgggggggaaaaaaggcaccgaaaaacagggcactgagctactcctgttttgggtgggtggagcagtagtaagcctcccaaaatctaaggtcccacactccagcaagggtgaaccttgcaaactcaaaaggatagcagtctccaacctgctgttttatacagtgacttaagtggtactaaaatgctatataagtcaaatttacgtaacattaagcaaataattttttttcagcaaaaaaataatggtcatgactttgtggtgaaggcttatgtaatgattgtaataaattcaggtggctcacgcctgtgataccagcacttttgggaggctgaggcgggtggatcacttgaggtcaggagtttgagaccagcctagccaacatggtgaaatcccatctctac

SEQ ID NO: 1730 - DNA, 2702 bp, Homo sapiens
tagctgcctgatttctgctgaagacctcgtggatgttcaagtcaaacacatttttgctggaacatatgccaactttgtgacaactcatcaggatactagttccacacgtgctcccgggaaaaccctgccagaaataagccgaattagccagtccatggcagaaaaatggatagcagtgaaaagaagaagtactgaacatgaaatggctaaaagtgaaattagaatgatattttcatctcctgcttgtctgactgcaagttttttaaagaaaagaggaactggagaacgacttccattgatgtggacttagaaatggcaagagataccttcaagaagttaacaaaaaaggaatggatttcttccatgataactacgtgtctcgaggatgatctgctcagagctcttccatgccattctccacaccaagaagctttatcagttttcctcctgctcccagaatgtcctgtgatgcatgattctaagaactggaagaacctggtggttccatttgcaaaggctgtgtgtgaaatgagtaaacaatctttgcaagtcctaaagaagtgttgggcatttttgcaagaatcttctctgaatccgctgatccagatgcttaaagcagccatcatctctcagctgcttcatcagactaaaaccgaacaggatcactgtaatgttaaagctcttttaggaatgatgaaagaactgcataaggtaaacaaagctaactgtcgactaccagaaaatactttcaacataaatgaactctccaacttattaaacttttatatagatagaggaagacagctctttcgggataaccacctgatacctgcagaaacccccagtcctgttattttcagtgattttccatttatctttaattcgctatccaaaattaaattattgcaagctgattcacatataaagatgcagatgtcagaaaagaaagcatacatgcttatgcatgaaacaattctgcaaaaaaaggatgaatttcctccatcacccagatttatacttagagtcagacgaagtcgcctggttaaagatgctctgcgtcaattaagtcaagctgaagctactgacttctgcaaagtattagtggttgaatttattaatgaaatttgtcctgagtctggaggggttagttcagagttcttccactgtatgtttgaagagatgaccaagccagaatatggaatgttcatgtatcctgaaatgggttcctgcatgtggtttcctgccaagcctaaacctgagaagaaaagatatttcctctttggaatgctgtgtggactctccttattcaatttaaatgttgctaaccttcctttcccactggctctgtataaaaaacttctggaccaaaagccatcattggaagatttaaaagaactcagtcctcggttggggaagagtttgcaagaagttctagatgatgctgccgatgacattggagatgcgctctgcatacgcttttctatacactgggaccaaaatgatgttgacttaattccaaatgggatctccatacctgtggaccaaaccaacaagagagactatgtttctaagtatattgattacattttcaacgtctctgtaaaagcagtttatgaggaatttcagagaggattttatagagtctgtgagaaggagatacttagacatttctaccctgaagaactaatgacagcaatcattggaaatactgattatgactggaaacagtttgaacagaattcaaagtatgagcaaggataccaaaaatcacatcctactatacagttgttttggaaggctttccacaaactaaccttggatgaaaagaaaaaattcctctttttccttacaggacgtgataggctgcatgcaagaggcatacagaaaatggaaatagtatttcgctgtcctgaaactttcagtgaaagagatcacccaacatcaataacttgtcataatattctctccctccctaagtattctacaatggaaagaatggaggaagcacttcaagtagccatcaacaacaacagaggatttgtctcacccatgctcacacagtcataatcacctctgagagactcagggtgggctttctcacacttggatccttctgttcttccttacacctaaataatacaagagattaatgaatagtggttagaagtagttgagggagagattgggggaatggggagatgatgatgatggtcaaagggtgcaaaatctcacacaagactgaggcaggagaatagggtacagagatagggatctaaggatgacttggacacactccctggcactgaagagtctgaacactggcctgtgattggtccattccaggaccttcatttgcataaggtatcaaaccacatcagcctctgattggccatgggccagacctgcactctggccaatgattggttcattccaggacattcatttgcataaggagtcaaaccacaccagtcttggattggctgtgagccaattcacctcagtctctaattggctgtgagtcagtctttcatttacatagggtgtaaccatcaagaaacctctacagggtacttaagccccagaagattttgctaccagggctcttgagccacttgctctagcccactcccaccctgtggaatgtactttcacttttgctgcttcactgccttgtgctccaataaatccactccttcaccacc

SEQ ID NO: 1731 - DNA, 1830 bp, Homo sapiens
aacttccaaagcccgaagcggtctcatttcccgccggccccccattcgggtccgggttttagttcctcggggagcccctggtgccccggatacggctgattttgtcgtgtgggacctgttctggctgctccagccccaggaaggacccaggacacccggaagccggaaatggactcagtggcctttgaggatgtggctgtgaacttcacccaggaggagtgggctttgctgagtccttcccagaagaatctctacagagatgtgacgctggaaaccttcaggaacctggcctcggtcggaatccaatggaaagaccaggacattgagaatctgtaccaaaacctggggattaagctaagaagtctggtggagagactctgtggacgtaaagaagggaatgaacacagagaaactttcagccagattcctgattgtcacctgaacaagaaaagtcaaactggagtgaaaccatgcaaatgcagcgtgtgtgggaaagtcttcctccgtcattcattcctggacaggcacatgagagctcatgctggacacaaacgatctgagtgtggtggggaatggagagagacgccccgtaaacagaaacaacatgggaaagcctccatttcccccagtagtggtgcacggcgcacagtaacaccaactcgaaagagaccttatgaatgcaaggtgtgcgggaaagcctttaattctcccaatttatttcaaatccatcaaagaactcacactggaaagaggtcctataaatgtagggaaatagtgagagccctcacagtttccagtttctttcgaaaacatggaaaaatgcatactggagaaaaacgctatgaatgtaaatactgtggaaaacctatcgattatcccagtttatttcaaattcatgttagaactcacactggagaaaaaccttacaaatgtaaacaatgtggtaaagccttcatttccgcaggttaccttcggacacatgaaatcagatctcacgcgctggagaaatcccaccaatgtcaggaatgtgggaaaaaactcagttgttccagttcccttcacagacatgaaagaactcatagtggaggaaaactctacgaatgtcaaaaatgtgccaaagtctttagatgtcccacgtcccttcaagcacatgaaagagctcacactggagaaagaccttatgaatgtaataaatgtggtaaaaccttcaattaccccagttgttttcgaagacataaaaaaactcatagtggagaaaagccatatgaatgtacaaggtgtggtaaagcctttgggtggtgcagttccctccgaagacatgaaatgactcacactggagaaaaaccctttgattgtaaacagtgtggtaaagtctttactttttcaaattaccttagacttcatgaaagaactcatttggccgggcgtagccagtgctttggcaggaggcagggggatcacctgagcccaggagtttgagaccagcctgggcaacataagaaggccccatatcggctgggtacggtggctcgcgcttgtaatcccagcactttgggaggctgaggcgggtggatcacctgaggtcaggagttcaggactagcctggccggcatggtgaagccccgtctctactaaaaatacaggggaattggctgggcatggtggtgggcacctgtaatctcagctactcgggaggccgaggcaggagaatcgcttgggcctgggaggtggaggttgcagtgagccgagatcgcgccattgcactccagcctggtgacagagcgagacttcgtctcaaaacaaacaaaaaaaagaaggccccatatctcc

SEQ ID NO: 1732 - DNA, 2681 bp, Homo sapiens
tatgcgcaggaagaagagcaccaggggagaccaggctccaggccacgacagggaggctgaggctgctgtgaaagagaaggaagaggggccagagcccaggctcaccattgatgaggcccctcaggagaggctcagggagactgagggacctgatttcccatcgccttctgtccccctaaaggcttcagatcctgaggaggcgtcccaggcccaggaagatcctggccaaggagaccaacaggtctgtgccgaggaggctgacccggagctggagcccgcgtcggggggagagcaggagccgcggccccagcaagcccaggtaggcgggagtggcccgtggctgctctcaacatccggagcggactccgggcggggagcgctcctgcccagggctgcgagccgcccgcgacccagggcgctcggggcaggggtggggaaagaaggggcgccccgtcacttgccccctctgcagaccaaggccgcgtcccagatcctggagaatggggaggaggccccggggcccgacccctctctcgaccgcatgctcagcagcagctcctcggtgtccagccttaactcctccacggtgaggcgggagggaggggacccgggcggccggggggtggacccgttccgatgcgtagcccctgcctgcccctccctcgccgcgggacccaccgctgcagccccccagcctgccacctatgacccgggtctgaagcctccgcgctgcccgcggccccgacgtgagccctgcgagcggccctgactcccacccactcccgtccgcagctgagcggcagccagatgagcctgtcaggcgacgcggaggcggtgcaggtccgcggctccgtgcacttcgcgctgcactacgagccgggcgccgccgagctgcgcgtgcacgtgatccagtgccagggcctggccgccgcccggcgccgccgctcggacccgtgagtgccccgccggccaagcggggcgcggctgtcacagcccagcccaccattcacagggtctcggcctcctcgtcctcatcttcaaaatgggaacaacagcgttattgggaggcgtgcgattaagcgagacaatccctgtaaagcgcttagcacgaggcctggcacgtgttcgggatggtggctgggggagcccacaggcaggggagaaggctctgggagggcccctcctcacctcgggttctcacctccccagctacgtcaaaagctacctcctcccggataagcagagcaagcgcaagacggcggtgaagaaacggaatctgaatccggttttcaacgagactctccgggtgaggctgtgaccacgatgcggttccccgttaatgaactggacgcccccttcctgcggggctaggtggcaagggcagccagtaacgtcattgcccggaggatcggcggagggggcccattaactcgttatccagtgttgtcagcctcgtggtgggcgtggtgatagtgcaggtccccattaatgcccttaggggctccccagaattccatcatggtaggaacgcggtaggacctgcctcagccaactcgcgcagcatctacgcgggccaccagcagtgctccactaaagctcacctcctgtcctcagtactccgtcccgcaggccgagcttcagggccgcgtgctgagcctgtctgtgtggcaccgcgaaagcctgggtcgcaacatctttctgggcgaagttgaagtgcccctggacacgtgggactggggctctgagcccacctggctccccctgcagccccgggtgaggcagccaggccgcgtggggagacctgcggcccgggtctcctgcatttaccccaccaggctctcccgcagccccctcacaccccgccttcgacagaacctcccctcaacctcttaacctcatggccccaggcgaagcccggccggccacggccccttccccgagggcgctaggacccctaggttctgcccctgcaggccccgccgtctcttctagccgcaccccatccgggtctgcagaccccaccctcctgaggcccctttccattagcccctgctccacgataagcccgcctctcgcaggtcccaccctctcccgacgaccttccgagccgcgggttactcgccctgtccctcaagtacgtccccgccggctccgagggcgcaggactgcccccgagcggggagctgcacttctgggtgaaggaggctcgggacctcctgccgctgcgggcaggatccctggacacttacgtacaatgcttcgtgctgcctgatgacagccgggccagccgccagcgtacaagggttgtgcgacgcagcctcagccctgtgttcaatcacaccatggtgtacgatggctttgggcctgctgacctgcgccaggcttgtgccgagctctccctctgggaccatggggccctggccaaccgccagctggggggcacacgcctcagcctgggcaccggcagcagctatgggctgcaggtgccctggatggattccacacctgaggagaagcagctgtggcaagccctcctggagcagccgtgcgagtgggtggatggccttctacccctcagaaccaacctggcccccaggacgtagccccaccaagcctctctctctggacccccatctcagggcctgcccttggctaaagtcaataaagtctattctaagagc

SEQ ID NO: 1733 - DNA, 2872 bp, Homo sapiens
acttccacaggggccagacaggcggatgctgtgcaagccggagctgccgggagggtcctgttctgtgcggccgacagcaccgtgcctggaaaagccatgctatttgggaccgtcctgctgggcaagcggccactcttccacactgaaagggaaacagaaaggaagaagcgcccagagcaggaggaacagatgtggcctccacccgagattggggctcagggagggaagagagtgtcgcatcaggatcagtcttccggcaggctccatctctcctgggatgtgctgggatcctctagtgacaggggagaagggaagttcacatgagtggttcgtggtgctggggccgtgctgtcaccacctgtgaagccagggctggtgagtgggagggctttccccagacatcgccttccagaaccctctggggctacgaagccacacaccagccgcccgagccccccgagctcttcccctgccgcccgctatctgcgtaattcagttaccacctccaggaaatctctctggtttggctccacgtattttcatttctgcatgactggaagaaattaatttttctccctacgcgaggatctggagatgctgccagcaggctgggtcactaatccccaagatcccagccctcagggctgcagtggggagggccgggcctcgccgctgccgcctctggggtggcagggagggtgtgaggtgggtgaggcatttccctgccagcttctggaaccatcttggggctctccgctggcctccccccttccctgctgcaccgttagcaggttgactttggggttttctgattcatcctcagcctcccacagtgccagggtggaaggatggtgcttgaattaagtggctctgaatttccttccctggcagggaggaaccagaagcaacttcagcgtgccccagtgccgtgtgtgccacgcgggtgttcagacccagcatggagggactagcagggccttgttattggtgccacaggtgaaggcgctggcgtctccatggggctgctctcccggcccgcacttgctgcactgcctgcctgtggcctgtgtctcctgctcacagggtcgtggagccttcctgggtgggtcttagagcctacaacagcgctggggcttacacgcactgtcgcgtccctgtaacacccacgagggccgtggagcgttccccgtctccgacgccgggagaggtacagtcactccacaggtcatgcagggagccagtctgacggcgggccgcagcgagtgtctccaggcccctgtccagccccgcccagtccctgtccagccctgcccgggcgttcctttgcctgtgctgtcggtccccatccccagcctgccgggccacattcttagagcacctgagcacccccaaggggctgggggatctggtggctgagggctcggtcatgactcggggttagcactgtaggtgcaaaagccctcacctggatacaggccctggggcccatctggggtcagggcacgggtgggagaacttgacctctgccctgcctgggtcatggagccccaaggccagcctcatcccagctgctctaggtctgcacctctggccagccccacctctgcttcctgccctgctgtgcaggggagggaggtcgttgttgctaaagaccctccagaagccactggaacattgcccggctattatcacagacatagcatccactgttcatagaaatccacgtccaggcaaccgatgtcacctcccaggctggccccaggcccctggggacggaaaggacctaaactctacaatttgtcaatgccggagggtggctttgccaccacttcacttacaggacaaaaagtgcctgtcctccagtgctcattccctgggcaagtattgatcgaacacctactccataccaggcgggggcagagtcacatgcagtgagaggcacccaggccctgcattggatcctcacggcagccagccctgagggcaccgctgctgccccactttccagaccgggaagccgaggcccacagaagttcctagctcacagcgcaggagcccgacgcgggtgggtaccacggggctctgtctgtgacacatccagggtggtcaggcccctggaacttcccactgagttctgacacgggagggccagcgtggggacggcagggagtgggccgggagtgtgcagagtccagtgcacactgtgggctgggacccgctgcctcgcaggggcaggagaggggtggaaacacaactgctggggtactggctagggaggtgcaggccgcttgagggcagctcagagggaggctcacgacagcgtcaccatccctggtgtcagggccaggttgggtggacaccacgctgttcgtccacctcgtggctcagtctctctgggaaagcctgcgtcagtgaacgacaccccagatcctttcctgggggttttattctccacctcctgactttcctgggcagagtgagaaggcctggttctgcttctgcgcttccgtaggccgggaccttcctttcagcggagcccaggccgtgctgcgggaaacagcccaccgggcaggcctgggagggccgccttagccgagagcaaatgcaggcaagggctttgcttgtctggaaaaaaaattcctggagtggaaaccgcccttgtagcatcagtggaaaagactcaggcggagacctggcagttgggctggaaactgacgatgaggagagtgagagataactgctccccagtccccacttctgagctcgcagcttgccccgagggtgggagctggggactcaggacccgccgggatccggctttccgcctgtgctgtggcaatgagtttcctgtggcaataaaacagaagttcag

SEQ ID NO: 1734 - DNA, 2996 bp, Homo sapiens
tttgaagtccactgcgtacccctccttgatcccatctctttcccttctcttttaggagttaactatcctgattccttgctatgctttttagtgtgatccctgaagaacgtatcactccattttgcatagctataaatttcatagaaatggaatcgtattgcatgtgttgtgtgatttgctgtttttgctcatcattatattcctgggattatccattttttaggtttatgtgtgactgtaatttattgtttagatgaaagttttcctggtttgacttgctctatcttcatatttttccttaagctaagggttcagcatacgaaggtagtattggtggcacttctttaacagtaccccatctcttctcctagccttgagggctgcacctagatgaacttgtgaggctcatttgaaccttttggaagcaccgaagcctgctgaagtttccagacatctgtatgaatctgttgtagttttttaatgttatatgctgaatataaaaccaagtaactcctgctggaaacatttacaatatcgattaacaaatactatcagtggctttgacatttttgtcagtttcttgatttttttccccgcttttgtctccccttcccccctccacattttggggcattgtgctgttaatagattttttttctgttcgtttgtttatatacctcctgtttccttctgatgttaatagatttctgacagtcagacttgtccacaagaactcaactggcaaggctgcctttctgtgctaaaactggggagctagtgggcaccatgaagatcttctgcagtcgggccaatccgaccacggggtctgtggagtggctggaggaggatgaacactatgattaccaccaggagattgcaaggtcatcttatgcagatatgctacatgacaaagacagaaatgtaaaatactaccaaggtatccgggctgccgtgagcagggtgaaggacagaggacagaaggccttggttctcgacattggcactggcacgggactcttgtcaatgatggcggtcacagcaggtgccgacttctgctatgccatcgaggttttcaagcctatggctgatgctgctgtgaagattgtggagaaaaatggctttagtgataagattaaggttatcaacaagcattccaccgaggtgactgtaggtccagagggtgacatgccatgccgtgccaacatcctggtcacagagttgtttgacacagagctgatcggggagggggcgctgccctcctatgagcacgcacacaggcatctcgtggaggaaaattgtgaggccgtgccccacagagccaccgtctatgcacagctggtggagtccgggaggatgtggtcgtggaacaagctatttcccatccacgtgcagaccagcctcggagagcaggtcatcgtccctcccgttgacgtggagggctgccctggcgcaccctctgtctgtgacattcagctgaaccaggtgtcaccagccgactttacagtcctcagcgatgtgctgctcatgttcagcatagacttcagcaagcaagtcagtagctcagcagcctgccatagcaggcggtttgaacctctgacatctggccgagctcaggtggttctctcgtggtgggacattgaaatggaccctgaggggaagatcaagtgcaccatggcccccttctgggcacactcagacccagaggagatgcagtggcgggaccactggatgcagtgtgtgtacttcctgccacaagaggagcctgtggtgcagggctcagcgctctatctggtagcccaccacgatgactactgcgtatggtacagcctgcagaggaccagccctgaaaagaatgagagagtccgccagatgcgccccgtgtgtgactgccaggctcacctgctctggaaccggcctcggtttggagagatcaatgaccaggacagaactgatcgatacgtccaggctctgaggaccgtgctgaagccagacagcgtgtgcctgtgtgtcagcgatggcagcctgctctccgtgctggcccatcacctgggggtggagcaggtgtttacagtcgagagttcagcagcttctcacaaactgttgagaaaaatcttcaaggctaaccacttggaagataaaattaacatcatagagaaacggccggaattattaacaaatgaggacctacagggcagaaaggtctctctcctcctgggcgagccgttcttcactaccagcctgctgccgtggcacaacctctacttctggtacgtgcggaccgctgtggaccagcacctggggccaggtgccatggtgatgccccaggcagcctcgctgcacgctgtggttgtggagttcagggtgtgcagggaacagcaagatgtgcctcttgttcttgctgccacgcttccctgtgtcctggcgggcgggtgtggatggggctgctccttcctcacaggacctgtggcggatccggagcccctgtggtgactgcgaaggcttcgacgtgcacatcatggacgacatgattaagcgtgccctggacttcagggagagcagggaagctgagccccacccgctgtgggagtacccatgccgcagcctctccgagccctggcagatcctgacctttgacttccagcagccggtgcccctgcagcccctgtgtgccgagggcactgtggagctcagaaggcccgggcagagccacgcagcggtgctatggatggagtaccacctgaccccggagtgcacgctcagcactggcctcctggagcctgcagaccccgaggggggctgctgctggaacccccactgcaagcaggccgtctacttcttcagccctgccccagatcccagagcactgctgggtggcccacggactgtcagctatgcagtggagtttcaccccgacacaggcgacatcatcatggagttcaggcatgcagatacccagactgaccactcttgagcaataaagtggcctgagggctggg

SEQ ID NO: 1735 - DNA, 2557 bp, Homo sapiens
aatattataacggatacagaaaagttcagaaggactgagctagtttgcgaaaccacagcacactttggcaaagagggaatgcacaacaaaacggatggggtggctggacgagagcagctcttggctcagcaaagaatgcacagtatgatcagctcagtggatgtgaagtcagaagttcctgtgggcctggagcccatctcacctttagacctaaggacagacctcaggatgatgatgcccgtggtggaccctgttgtccgtgagaagcaattgcagcaggaattacttcttatccagcagcagcaacaaatccagaagcagcttctgatagcagagtttcagaaacagcatgagaacttgacacggcagcaccaggctcagcttcaggagcatatcaagttgcaacaggaacttctagccataaaacagcaacaagaactcctagaaaaggagcagaaactggagcagcagaggcaagaacaggaagtagagaggcatcgcagagaacagcagcttcctcctctcagaggcgaagatagaggacgagaaagggcagtggcaagtacagaagtaaagcagaagcttcaagagttcctactgagtaaatcagcaacgaaagacactccaactaatggaaaaaatcattccgtgagccgccatcccaagctctggtacacggctgcccaccacacatcattggatcaaagctctccaccccttagtggaacatctccatcctacaagtacacattaccaggagcacaagatgcaaaggatgatttcccccttcgaaaaactgaatcctcagtcagtagcagttctccaggctctggtcccagttcaccaaacaatgggccaactggaagtgttactgaaaatgagacttcggttttgccccctacccctcatgccgagcaaatggtttcacagcaacgcattctaattcatgaagattccatgaacctgctaagtctttatacctctccttctttgcccaacattaccttggggcttcccgcagtgccatcccagctcaatgcttcgaattcactcaaagaaaagcagaagtgtgagacgcagacgcttaggcaaggtgttcctctgcctgggcagtatggaggcagcatcccggcatcttccagccaccctcatgttactttagagggaaagccacccaacagcagccaccaggctctcctgcagcatttattattgaaagaacaaatgcgacagcaaaagcttcttgtagctggtggagttcccttacatcctcagtctcccttggcaacaaaagagagaatttcacctggcattagaggtacccacaaattgccccgtcacagacccctgaaccgaacccagtctgcacctttgcctcagagcacgttggctcagctggtcattcaacagcaacaccagcaattcttggagaagcagaagcaataccagcagcagatccacatgaacaaactgctttcgaaatctattgaacaactgaagcaaccaggcagtcaccttgaggaagcagaggaagagcttcagggggaccaggcgatgcaggaagacagagcgccctctagtggcaacagcactaggagcgacagcagtgcttgtgtggatgacacactgggacaagttggggctgtgaaggtcaaggaggaaccagtggacagtgatgaagatgctcagatccaggaaatggaatctggggagcaggctgcttttatgcaacagcctttcctggaacccacgcacacacgtgcgctctctgtgcgccaagctccgctggctgcggttggcatggatggattagagaaacaccgtctcgtctccaggactcactcttcccctgctgcctctgttttacctcacccagcaatggaccgccccctccagcctggctctgcaactggaattgcctatgaccccttgatgctgaaacaccagtgcgtttgtggcaattccaccacccaccctgagcatgctggacgaatacagagtatctggtcacgactgcaagaaactgggctgctaaataaatgtgagcgaattcaaggtcgaaaagccagcctggaggaaatacagcttgttcattctgaacatcactcactgttgtatggcaccaaccccctggacggacaggagctggaccccaggatactcctaggtgatgactctcaaaagtttttttcctcattaccttgtggtggacttggggtggacagtgacaccatttggaatgagctacactcgtccggtgctgcacgcatggctgttggctgtgtcatcgagctggcttccaaagtggcctcaggagagctgaagaatgggtttgctgttgtgaggccccctggccatcacgctgaagaatccacagccatgtaagtaccagggactgttgcccatctccaagcaccacggttcctggcggtcacctgccccgtgcatgtttctgaagcctctaattgttagcagatggactgaaaaatcttgcgaggtactcccagaagcagatttatggcttcagagatcatatagcatttaaaaaaatgctctg

SEQ ID NO: 1736 - DNA, 3008 bp, Homo sapiens
gtgatctgggaggtgctgagcacccacctgcgacccatggcgggggaggaccgagtaacgacagcatggcggtgcccccgagagggaggggcatagaccccgcccggacaaaccctgacacgttccctccttcaggggcgcgatgtatggaacccagtcctgagaggcctgcatgcagtcagcaggagccgaccctgggaatggacgcgatggcctcggaacacagggatgtccttgtgctgctgcccagccgggagcaactgcggctggccgtgggggtgaaggctactggccgcgagcttttccagcaagtgtgcaacgtggcgagcatcagagacgcgcagttctttggcctctgtgtggtcagaaacaatgagtatatatttatggatttggagcaaaagctcagcaagtacttctcaaaagattggaagaaagaaagaaatgaaggaaatgagaaacccagagcccccttcgtggccttcctccgagtgcagcactacgtggaaaacggaagggtcataagcgaccacagggcacggcacctgtactactgccacttgaaggagcgcgtgctgaggtcacagtgcgctcaccgggaggaagcctacttcctgctggctgcctgcgcgctgcaggctgacctgggcgagcaccgggagtcggcccatgccgggaggtacttcgagccacactcctacttcccacagtggatcatcaccaagagggggattgactacatcctccggcacatgcctaccctgcaccgtgagcgccagggcctgagccccaaggaggccatgctgtgcttcatccaggaggcctgccggctggaggacgtgcccgtgcacttcttcaggctgcacaaggataagaaggaaggtcgtcccaccgtgatcctgggactggccctcaggggagtgcacatctaccagggaaagaagctggagatccagctggatgggctgcccgcagcacagaagctggtttactacacggggtgcacctggcggtccaggcacctgctgcacctgctgcgcgccagccaccagctccacctccgcgtgcggcccactctgcaacagctgcggcagcgggaggaggcagaagagaagcagcactaccgggagtcctatatcagcgatgagctggagctggacctggccagcaggagcttcccgggcagtggggtcagcagccagcactgcccccactgcctctcacgccactccgccgacagccacggcagttcctacacgtcaggcatcaaggccaactcctggctcagggaatccagagagatgtctgtggacgtgcccttggaggtccacgggctccatgagaaggagccgtcctccagccccaggaccagccgcagccaccccagcacacgtggtgacagccaagccactcgtcaggagccctgcaccgaggtcaggaccagaggccagagcgccgaggccgtgcaccagatccaggaaatgacagccggggtcagtgaggagcagcacagccatggcctggatgacatgcagctgcaccagctggccctgcacccagcgcccacctcactcagccataccttccaccgcgccctggactgcaggctggcaggcccctgcgagaccagggccactctccccagcaagaggtccagcaactgtctcgccctggacctgttcggagaggccccaccacaggagtttgtggtgtaggcaccacccacccagcagtaccgtccgcaccgccaggctcagcccctgcccaccccacttccacatggccctcgtcccttcctgcccgccagatgctgcctgcacttccgcagccagcacgctccacaggttcacctgtaagaggtgtggagctggctctgacatcaacctgggaggtaacaaacaggtcccgcacctcatgcctgtctgccatacacccgggagctctttccctcagggtctcagggagccagttcaaggtctggctgtcaagtgtccagagagccatggtgttggcccctgaggcagcctgtcacccatcctaatctgggagagaaggtgacacagctgggcccagaccctggagagacagctctgcagtttcccacactgtcagctccccaagagacagtcctgatgggcacaggctgccagagctcccaagccggagttcacagttatcatcactgtgcaggacccaggttcctcccagacctgaatccctctctgcaactcctgtttgcaagcgctgggcctgccagacagaggcccctcttgtggtgcaagcccagctctgtcacctgagatccagccagagaccctcctccaccatccacagtcaatggctgtgctttcccttccaagccagggcttccaaagaccccactgccccggagctgaagccgactctgctcccatctcagccatgaggcctcaggacccactctgctcacaggtggcttccttaagccattgccctggctggggttgggctggtgcagcccagctggcggaggggcgaagctttggtgacagacggagagtgggggactagctgtgcatggcacctgctctgatccggtgggctccacgggtagtgcgacctcggttctgtgggctctggaaggccaccagggtagggtctccccagggctcctccccctgcacaacactcctgcacacgtgcaaacctgctgtcctctgcatttacaggaatggcccgtgcatccctgctagtctcaggcccatcccagagcactgagaggccacaatcgttcagccctgtgccctgaacaccactgcccccttcactgtctgtgtgtggtgaagaccacgccacaccaccctccagctcactggagacaagcatgagcttgagccccatggcctggtgcagggctgcgtgcattgaggccgcctctttgacgggtccatccagggggaccctctcctttctgtgaaagggaatcgtgtgtgtgccccaggcacgtgtaataaagaacccgagcagat

SEQ ID NO: 1737 - DNA, 2219 bp, Homo sapiens
ttagtaggtcatgaaaacaatttaacgtgggtcacgatctacattaaaaaaatgaatagaaaatatcatactgcattgtatgcggccagactaagcattgttttgagatgctgccccctattttatacacacgcatttgtgcactgggacatgatacaaggctttttcttttttctttttctttttttttttgcctagggctgtagctataaaagcttgaaaaccattactctgagaatctctctgttgggaaaatgagtcccttcaactctagttgttgccactgggatgctaacagaaagcaaagtctcagaggaaagatgtggcattcctgagtgtcttccatgtaccaggacttctatttgctagccactttatgttcctcatcccatccttctgtgagggacatacttttcagatgagaaacgtaagctccgcgaagctaaggggccggactgaggtcccacagcgagagtgtggaggagccaggatccgaaccccatcgccagcccttgccagttccatgattccggtgccagcgctcgcctgacctccagggctgtcatggtgggaagggactggagggcatctgctgggcaaaggaaagagacaaacatcatcccagagcctgtcttccctgggcaatacccgggccactccagacatggcgtctttagcccttccttggtcactggcccccaggtgaagagagcatttttctctgactcaagttcttgcctctggatttgccaagctcctatgacagtcttcgcccttctgaagctctctcaggctccccttccagaaatcccgcaggttccaccgacctctctgagagcacaggcgagtggttgaacggtgggctttagagacggcgcggcaccagagtcctgtactggctgtgtgatcctgaacctcctcactgagattctcatctgcaagatggagacagacctgcctcatagcgagggggaatctgaaaaagatgtctagagagtgcccggtgctcattagagtgtcctgccctttttatccacttcgatttgttggaggcacatttccctgggggcgcttcgagaccatctttgtactaggccagcctgatgctggcctatcagggtacttggtctctaaggcaggcaacctcttccttggaaccttcccagtgcaggtgacactccttcctaacggagctgccctgtccgatgtcaactataagcactccctgcagtctccaaccggggtcctagttctagtcttccggacagctctaggactcagttcatttaaagatcattggtgttggacacaactctcacccaataaacaactcagcaccagctcctcctggcttaggggagcagctcctctgcttccccacatgctctccagaagggtcaagagcgcccctcccagaagagttctaaatgtcccagctgatggcctcccatagacattccatgctggccacagttgcaggcctcagatgggcagccaagcccagtgctgacccatgagcttctccacctctctgcgtcaggagtcaggtgggggtgctgaacagaccctgtagcatggctcctctagcagtctgggccccaggacatccctttagccccagtggatccctgggacagaggcaagggcggagggaaggggagggaagacccaagagcaatacaagtgatagtctctcctgtcccatgccttcacacatgcagggaccttgccacaagtccccttcctcacctgcatatctggggaattcctttccatctctgaagtcatagtttatgctgcacccctatgtggtctttcctgacgaccaggctctaccaccaactcaaaataatcagtcccttgctccttcctccaccctcaaggatccacatccacaaagaaaatgtgctacatatacactgatatggtttggctgtgtccccacccaaatcgcctcttgaattgtactcccataattcccgcgtgttgtgggagggagataatttgaatcatgggggcagtttcccccatactattgttgtggtagtgaataagtctcacaagatctgatggttttatcagggatttctgcttttgcatcttcctcattttctcttgccgccaccatgtaagaagtgcctttcacctcctgccatgattctgaggcctccccagccatgtggaactataagtccaattaaacctctttttcttcccgg

SEQ ID NO: 1738 - DNA, 2878 bp, Homo sapiens
attgcccatatgccaaggacttccaaagctctgtctcttgtcttcccccctgagcccaactattgcttctggaactggggcaggcttaggacaaaccactttatactccgtctcctttaatcctcacagtagactgtgagagaggaggagtgctgtggcacctgcatttctcacccgaggaaactgtggcttagacaggcccgatatcaggtccagggtcccatgtccgatatgcttgctggacagacctgcttggacatcctttaggcatctccaagtcaacatgtccacaattaaatatcccatctttccccttgacctgctcctcctcccattttcccggtcagaactggtcttgccgttgttcagtcacctggccaccattctagacttttctttctcctttacctctttccccacctcagttgattgccaagtcatgccagattggcttggtaaatactttctgactcaatttcttcttttccccacaattaccacactcgtttgtatcatacatatggattattgtgatggccttggaactggtttccatgaatctagttgtattccctcaaatccatcctccataaactgcctggatgagctgtctaaaactcagccctaacctccctcctgccagaagtcgtttaaaggcttcctgtgccctataaagttcaggctcctggggagggttcccaatcggctggccctgccttccccattccatcttccacctctccttgccttccagtttatgagctaagtactaatggacagactaggttttcttgcctctgctcatgtctaattcaccttatttacaataaatgttggaggaggaaggaagatactcctttgtaatttgtacagaaggacttgtataacattagaaaagatagggttgaataagttacatagaaaaaatatgtcactctccatgtaactacaaagacatccataaacaggcctgagcatgccacatgcacatgtcagcacagttcacagcattcactgagcacctgctgtggccagagaccacagtagatgctgggggtgaaaagctcaaggagctctccctgtagtgagggaggcagcagaaacccacagtttcatcatagggtagttgagtttaggaataggaatgggtacgggatagtaggggattgtgagcctgagtattcagggaggacttcttggaggaggtgatgcacaagttctgtcttcagggaaagtcagtagtaaccaggtcgaaggtagtgtaaattccttttctcctttttcctctttgggatttgtatttttcccatggaattttacctgtacaggtcattttacactggactaacaatgcttaagtgctttttaaaagcaaactgtgccagatttatcccattggtaggaactttcttcatgagttcagaggctttgtcttggttcccgttgtattgccagtgcacggcccctggtaggtgctgagtaaatgttggttgaattggatgccttgaggtgaggcatgagaaagggttctcctcctccccctgaaggtggtgaagatagttgtgacagttgagacttgcatggggctgaccttgtgaggtcctaagcctggtgaccagcctctgcagtgtaactgggctgtctcatgggaagggcagagcctttcctacgtggccaactctgtgttctgaacaggagtgccaaactcatttggaggggaagggagcgcccttttaaagcctcaactactaattaaattcaagcagaagatggtgaaggtggagctaactcatttattagcatataatatgatcaacctaactcatataaatgtagattaccttggtttgtcttttcctggctgcagaaaaggcttggagaggtgccttggattgtgagttagtcagtgagcagctgcttaaagatttgaaaaatcctagaatatgtcatctctgtaggctttatcctttaattaattatggatttttatctgcatatatgtgaagctaatgattgacttggttcggacactgaattgtcggcttaaacctgccattccactgggcttcatcactatgttctatgggtgtgaagcctttgttttttcagagacccatttccaccagcgggtttgcactgtaagtgtttccacaggaactctgccctttgccagtgtcactgttgtggctatgcagcagaacccacagggcggaggtgtttcagccctcactgaaaatgcaacagatcttaacatctcttgctgcaaattttccagtgtgttctggtctaccttggtatcttaaaaccaggctcactgactaccacatgagaaatgacagtggggtgtcttaaatgatctgttgaagaccagcagccaaaaagattgcccttagtgtttctctctaccggctaacattagacaatgccatgtagaagctgctgttagggtttgagaactgtgtcgcctcattctcaagatagccaaggaagtgtcatctctggagaaggcagttctgtctctttcagtttctccatggatccgatattgttctgaaagaggtggttttaccaattcgtctcacacagacttcttgcctttacttttatctgactgctgacagggtgggctggaatataatcgctacttaactggacttgactttcaaggcctgattggcgtttccagtatagcagttgcctgagtcatctagttttggaactgataaatcaaaggactggcttggaggctagtgtcctgtctggagaatgggcttaatgtaacttcagttaagaaattaatgaatctgaaatagttataacccaaggaagagattttcctaaagaatgtccctttagagaaataatgaccagttccctc

SEQ ID NO: 1739 - DNA, 2287 bp, Homo sapiens
gttctgggcccagatccccataagtcagcgatgaggggggccgagcaggggctgcccgttagacggccgcagagtcccagcccccagccctgctcacctttcttacctctctggccccgtcggcatttgagcctgggaccccagacgaaaggatacgcttccttttagaacccctgccaatctgaggacggggccaccccacagacgccgtggctcagcaagcagaccaatggccgaggagtctggcaaggggcgcttggcagatgagagtggaggttgtaaatcaccctccatgcaatggttcatcataaaggatatggagcaaaattagaggaggcacgagaaggaaagccggtgatgaacaaggaaagtgcctggttgaagctagcttgcaatcccaaagtcagaaggttgcctgggaagccatgaaacaaagccaaatcaaggcaaagcagacacatggagattttgagactgagaagaggaaaactgaggacattcatgtgagatggtttcaagtttcccttagaaggagaagttatcttcagaaggtcaggttggtgaggtgggagttcaaaaacaacaaagtatgtagctaccattgtgaggaagaccatggaaaatggacgaatcagaatgaaaggctttctgaacaagagggagtttccctgcacaagctccctcctgcctgctgccatgtgagacctgcgttttgccttccaccatgactgtgaggcctcttccccggccacgtggaactcccagagacagaagcagataatgcaagtgtcatctacatctggcaaaagccaaaggtttggaagatggaaaaaggaatccaggcaaaaaggagcccaagattgaagtgaatgaccaggtgcaccagttcaaatgcaatcaggagggacaggggtagagggagaagcctagagcagcgcttctcaaactgactattcaagtcacctggagatcttggtgaaatgcagactctggtgcagtaggtcctggcgggaacttgaaattctgcattttgaccaaggtccaaggtgaatgtccagtgctgttgtccttggcctgcagcaggaggagcagggatctaagacttggagagcaaatgtcaagctcagaagaaagactggaagtttggggacaaaacccaaatatggctaaagaaagcctgtaggatgaagttggaagttccagagccttctcttcacataatgggacatgcaagggggaaaccaaatcaaaagtgtagaatgcgtcgctggatgtctttgacattttattgttctgatagaatatcagcggggagctactgaggacctcctcactaccctcccttggaagagtttgtctgcaatggagccaacacagtggaaagcagagctgagaaatggacaaacaactcctgatgcctcatttgagcacctggatttagccatgtctgaagctattatatccttgaacttttgaatcatgtaggttaccataattccttttttgttaaagctaatttgagttgggtttccatcacttgcaatcaacaattgaccaggtgcttagtacataatgaatgagtgaatgaacaaattcaattctgtaagtatttatcatctccttacacggcaggcactgttttaagtcccaaagaaagaggcagaggagcgacagagatgacttcctcccttgaaaacgaagcatgtggcctgacaacctaaaattggggtcaatccatccaattatggtgactgcttagaaatatcccttttcctcccaacgttttcctttccttctcccataaacataataatgtctcctgccagtactaaggcatggcccatggacccactaacacctatgctcacgttagctcttgaggccgagtggcttggttctatctggttatcagatgcaaacttcatcacagcagggatttgggctagacattagaggaatagtgtggtaccagatggtgtttctgaagaaggttgtcctatttttgcagtttaaggatttgataataaatctgcctggcagccctcagatgtgatttggccttgaaatcgtctctgttaatccttgatgctgtgtgtatctgtcaaggtccaaccagaaaaaacagaacctgctctaagtatctgaacaaagggaaatttaatgtaaggagctgattgcacagatgaaggaaggggctgggaggcaaacaagagggaactgtgaggtaacccagggatttgccacagtaggaagacatgaccactactaggatagagaggtaaaaaat

SEQ ID NO: 1740 - DNA, 2139 bp, Homo sapiens
acatctgcttcctgtaggccctctgggcagaagcatgcgctggtgtctcctcctgatctgggcccaggggctgaggcaggctcccctcgcctcaggaatgatgacaggcacaatagaaacaacggggaacatttctgcagagaaaggtggctctatcatcttacaatgtcacctctcctccaccacggcacaagtgacccaggtcaactgggagcagcaggaccagcttctggccatttgtaatgctgacttggggtggcacatctccccatccttcaaggatcgagtggccccaggtcccggcctgggccttaccctccagtcgctgaccgtgaacgatacaggggagtacttctgcatctatcacacctaccctgatggggcgtacactgggagaatcttcctggaggtcctagaaagctcagtggctgagcacggtgccaggttccagattccattgcttggagccatggccgcgacgctggtggtcatctgcacagcagtcatcgtggtggtcgcgttgactagaaagaagaaagccctcagaatccattctgtggaaggtgacctcaggagaaaatcagctggacaggaggaatggagccccagtgctccctcacccccaggaagctgtgtccaggcagaagctgcacctgctgggctctgtggagagcagcggggagaggactgtgccgagctgcatgactacttcaatgtcctgagttacagaagcctgggtaactgcagcttcttcacagagactggttagcaaccagaggcatcttctggaagatacacttttgtctttgctattatagatgaatatataagcagctgcactctccatcagtgctgcgtgtgtgtgtgtgtgtgtatgtgtgtgtgtgttcagttgagtgaataaatgtcatcctcttctccatcttcatttccttggccttttcgttctattccattttgcattatggcaggcctagggtgagtaacgtggatcttgatcataaatgcaaaattaaaaaatatcttgacctggttttaaatctggcagtttgagcagatcctatgtctctgagagacacattcctcataatggccagcattttgggctacaaggttttgtggttgatgatgaggatggcatgactgcagagccatcctcatctcattttttcacgtcattttcagtaactttcactcattcaaaggcaggttataagtaagtcctggtagcagcctctatggggagatttgagagtgactaaatcttggtatctgccctcaagaacttacagttaaatggggagacaatgttgtcatgaaaaggtattatagtaaggagagaaggagacatacacaggccttcaggaagagacgacagtttggggtgaggtagttggcataggcttatctgtgatgaagtggcctgggagcaccaaggggatgttgaggctagtctgggaggagcaggagttttgtctagggaacttgtaggaaattcttggagctgaaagtcccacaaagaaggccctggcaccaagggagtcagcaaacttcagattttattctctgggcaggcatttcaagtttccttttgctgtgacatactcatccattagacagcctgatacaggcctgtagcctcttccggccgtgtgtgctggggaagccccaggaaacgcacatgcccacacagggagccaagtcgtagcatttgggccttgatctaccttttctgcatcaatacactcttgagcctttgaaaaaagaacgtttcccactaaaaagaaaatgtggatttttaaaatagggactcttcctaggggaaaaaggggggctgggagtgatagagggtttaaaaaataaacaccttcaaactaacttcttcgaacccttttattcactccctgacgactttgtgctggggttggggtaactgaactgcttatttctgtttaattgcattcaggctggatcttagaagacttttatccttccaccatctctctcagaggaatgagcggggaggttggatttactggtgactgattttctttcatgggccaaggaactgaaagagaatgtgaagcaaggttgtgtcttgcgcatggttaaaaataaagcattgtcctgcttcctaag

SEQ ID NO: 1741 - DNA, 3158 bp, Homo sapiens
ctatgtggctcccgccccagagaagtccaggaaacatttagccctctactcactggccatcttcgtggtgatcactgtgcactttggggcccaggacatcttaaccctttatgaactaagcacacccctctgctgggactccaaactaatcggctatggttctgcagctcagcatctcccctacctcaccagcctgctggccctgaagctcctgcagtactgcctggccgatgcctgggtagctgagatcggcctggccttcaacatcctggggatggtggtctttgcctttgccactatcacgcctctcatgttcacaggtaaagtgtgtgggctcagggacagcttgtcccagaggcactgggtaagaactgggggccggccactcactgcccccagatgtggttcattcctgtgtctttggaaacatagttatgcccccagcctgcactggagaacagacaactaagaaatccctcaaaaatgccatctttgatacatggaaaatatagaccttcagtagctaaagtaattaacccactgttatcaaccattaatattgttagtaatatagagcaaaagacaaaagtgtggctcatacactaattgctttaccccttggcctcccaccgcctattcatatgttcttaaacaaagtccatgccattaatgcctggtactcacttctctgataagaatcacaggacctacctcaaatacccttagtcagcttctttgggttttttaaaaaccagtcttctcggaccacagatatgaaattcctgcttcagttcctcttctcctctttctccttctcctttccctcctcacttcctccccttctttttttgatgggagagggtcaacaggccagtaaatgaggaagttaactttttaaaatttttatttgattgatgtatttagagacagggtctcgctttgttacccaggctagagtgcagtggcacgatcatggctcactgcagcctcatcccccgggcccagatgatcctcccaccttggcctctctagtagctgggaccactggtgcacattaccacaccttgctaatttttgtattttttatagagatggggtcctcaccattttgcccagtccaggtctctaactcctgagctcaaggatccgcctgcctcagcctcccaaagtgttgggattacaggcatgagccaccgtgcccggctttagttaactttttttaaagggacagatttattttgatagagccctaaaatgtgctgtgtatagtcaacaatacaataatcacagatttcttaactcaactgcttgtctgacaattaagcagaagggaacctttccctcctgctgatggccctgggggatgcagagatgataaagatgctgtcattgctctgggtcggggggaggtctcaacagagtgggatttgaggggcctgacactgctagggtccctggatgcctcatcgtataccttctttggaggatccactgtcctgtaggagtttgcagttttgctgaggagtcagcagtcgcacagggagagaaatggttatgaagaaaacaggaagcctgtaagtaactgaatgcaaagggaaaaggaactcccatttgctgtgtccctatgccatgctcttcatagatgttacctttttacctcatgtattggttccctgagattgctgtaatgacataccacaaacttgggggcttaacacaacagaaacatattctctcacagttctggaggccagaagtccaaagtcagtaccaccgggctgaatggaagcagtcagcaggcagtgctcccttgcaagcctccaggagagaacgtgtttctcatttcttccagcttctggggctgctggcattccttggcttggggcggccatcaccagtctctgcctctgtgctcacattgactctcctcctctttgtgccttctcaattctgtcggtgccaaatctccgtctgctttcctcttataaagatatgtgtgacggcatttagggcccaacctaatccaggataactctgctctctcaggaggcttaactgcacacctgcatagactcactttccaaataaggtagtatttacaggttccagggctatgaatctgatgccattgggcaccattattcagcctcctatgcctcagaaccatcctgtgatgaaggccttattatcttcctcatacagggagtcagggtcagagagggtaagtaccccaggccacacagataatatgtaatggcatcaggttttgaactcagggctgactccaaagcccatgcttgttttctgtgccctgccatatccctactaagtgccaagtgggtgggtgatgcctgtgtgaatagcctggccatgctgacggcctccggcatcttcaactcactctacccagccactctgaactttatgaaggggttccccttcctcctgggagctggcctcctgctcatcccggctgttctgattgggatgctggaaaaggctgatcctcacctcgagttccagcagtttccccagagcccctgatctgcctggaccagaagacagagggcaagaggagcaaagtgaacaccaagcaactggaggtctgcagctggaagcccagcccacagcaggacaagcaactcttgtctaagggcagtgctctctttggacgaggtagtcaagagagaccaaggcaccaccccatccacagctgacccagcctctgtctaggatctagaatcataacccacacaggcccactgcaggacaggtggcagaggagctatttgggacaggagtcagttctccctttctgctatccatcacttataaccccacaggccagaggagaggtcctgagagaggtgacacttcagggaccagaggcagcacgagggctggcatctctccttccagcccaaactgcacagccccaaccaggttcccaacacgtgtagcagtcatcagccattccttaacaatgaatgtggtacctggttagtgccagccttgggaaggagggagggaggtaagaggggcttggtgatctctggaggaagagtgttgcctttgctgtggttggggaatcgatccttggctatggcctacccactcccctggctgaagagtgccaatcattacaaatcagcttcagc

SEQ ID NO: 1742 - DNA, 3402 bp, Homo sapiens
ttgtaagactttaaaaatggtggttttctaacaggtgtcttgttgggttttgctgtctcagcctttgagaattcttattaatgatattgacaggtgttttctcaggccctgaagtcttcatgagctttaagatagcactttgacaaggagcatgttataatctcattagttaaagatcataatcaaatctgtttttacttgtagtctaaatatatcttcacagtttttgttcttttttttttcttttttttggcacaatctcggcccgctgcagcctcagcctcctgggctcaagcagtccaccgggctcagcctgcagggtggctgggactgcaggcgcgtgccaccacgcctgactaaatttttttgtataatttttgtagagatggggttttgtcatgttgctgtcaaattcctgggctcaagcggtccgcctgcttcggcctcccagggtgctgagattacaggcatgagccaccatgcctggcctctctgttcattattaaataccatgctgataattaagtctaaaatttagtctaagagtttccctttttcataatttctttaaaaacaaaggaggccagattaagtactatctatgtagatacttcttcagttctctggtttagcagtttaggtaatggctcatttaagttgaaatccactcaaatatctaagtcagaacactgtagacccaggcaagaatggcccttggactgggccctgtgttttcaagtaacttcttgaccctcccgcagccatggccctctctacagagtaaggaatcagagagaccaaggagacagggccactggaatctacactctttgttctgaagcatgctgccagtcagtactcgagatcctgggttactcttcccaagtgggcccaagcctgctcacaggatctgcctggaccactttcctgtatacatcatcttgaagatgaacaacactgccagttttcacacccatccgctggaagggtgggagtggaggcgatgcttaggtgtgcaggctggaatgtccacatttgtgtgtgcaaggccccttacaatgtgggatggagccagagataggaaaagacagtattcagacatatggtgtgtgaaccccaaaaatctgagacaggtctcagataacttagaaagtttattttgccaaggttgaggacgtgcacccgtgacacagcctcagaaggtctgatgacatgtgcccaaggtggtggggcacagcttggttttgtacattttagggagacatgagacatcaatccatttgtgtaaggtgaatatcagttcagtccagaaaggtgggactactggaggcaaaggcggacaactgggagcgaggagggggcttccaggtcttaggcagataaaagacagatggttgtattcttttgagtttctgattagcctctccaaatgagacagtcagatatgcatttatctcagtgagcagaggggtgactttgaatagaatgggagccaggtttgccctaagcagttcccagcttgacttttcccttcagcttagtgatttgggggccccaagatttattttcctttaacagatgtatggacctacatttgtactcttgctctaggctctgaattattgggggttggtctgccctaaacctgtaccatccagtcacagtgcacaaatgaagaaccttatatatttgtaactcataaaatttcatgttttcttaagaggtttgattttcaaaaaaggtttatgtttatgttacaacttaagagtcttgtcaggagatagtatataaagcgggaatagctccaccatttcccaactgtagatagaccttgggcaagtccctgaaactccttatcctcatctataaaacgaagcacataatagcaactaacttaaagggtgattctgatgttaaatgaggtagtgcatggtgagaaaccccattcagtgcatggtaagcactcaatgagtgttggctattactgaccttgaggagttcagaaatctttcccttgtaaaggagcttaatccattgcgtccttactgctcatccatttacgttcctggtcagtgatgtgttgaaggaatgattttttaatagaggcttcaaattttctttgcttataactgcagaaagtttagaaaaacaatgaattacctctgtgaaaatacaccttatttctgcatgccaccaagacctgccagatacacttcacccctatatttgtccaagataatatttctgaactataaagatatttgttttggaataaattagaaaagctactttagagaagaaaagttacagaattttactttttcttcacttacgtaattagaattcctatgcatggttttgaacaggaaattttccttgaccccttcacaggccttgcaacaggggtgcctcactttctcagcctgaagctctgaacccctcgggggagggagagcatgcaggtgagcaggtgcaggagctagagcaagcacttttggccaccggcaggatcaaaactccatgcagtcccacagcagtgcctagggtagtacccatgacccctggagccccagagggcatgcgttacaatgctcttttagctttgcagtccaaggacggcttaagtatttaacagctcaatagaccttctactttttcatgaaggcagagggtcaatgtgacacttttctgtatcctgagctcttgtccagcatccatgaaaaatcaggtcatatgaacaaattgaaggatagtaaacgcgggggattttattgccattgaaagtggctctcagcgggagggagagagctggaaaatggggatggagtgggaacgtattcttcccctgaagtactgccatcaagcagtcccgctaaagtcaagctgctgctctccgactcagactgcagtctccgacgtgcagctgcttctcctcttctctgctctgtgccagtggagcctgggatttttatgggtacaggatacggggtggggtaggccaggggtggttttggaaaaggcaatatttgagcaggaaaacaggaatgtaaagttctcactttgggcttgagagtgggtcttggccagggaccctgccctttttctgtgtacaatttctgtgcctcctgtccctctcagtctctacagaatgtctcagaaatctccatagtagaggatcatcattactctgcccctggcttctgttttattctgctatagtttaagcatctttatgaattttatttgacccagtttttgaattgtctgtcttacacttctgtaacctctctttcaatatcattttcttccagttccatttacaaaacagtccactattcttttaggattaataattttatctgcctgacctcatcttcatgttttctgattcttctggtgtat

SEQ ID NO: 1743 - DNA, 3103 bp, Homo sapiens
cccgcagctgctggagctgctcaaccagctggacgagcgcaggcgtaggtgcccgcgccacggggcctcggctcaggggcagccaggtgttgtgagcgccatcctgggccagggcctcccctgagggtgctgagctcttgtgagtccttcattggggccgtggcttcctccagagagtgtcaacaggaggtggtctcagtgatgaccatgccctgccctgccctgccctgccctgccctgcccaggaccctctgcctgcctcccccagagcccagcaccttcagagccctctgcagaaggttgggcacagggcggcccatctgcgtgtccgttccacccaggagcttctcggcactgtgccggagtggtcagggttgctctgtcatctgcccacagtgtactatgaggggctgcaggacaagctggcacagatccgcgatgcccggggggcgctgagtgccctgcgcgaagagcaccgggagaagcttcgccgggcagccgaggaggcagagcgccagcgccagatccagctggcccagaagctggagataatgcggcagaagaagcaggtgcagtggctgcccagccacaggccggggccggctgggggacctcgcagcataaccagcatgtttttgccgcacaggagtacctggaggtgcagaggcagctggccatccagcgcctgcaggagcaggagaaggagcggcagatgcggctggagcagcagaagcagacggtccagatgcgcgcgcagatgcccgccttccccctgccctacgcccaggcatgtgccatcctcccgccacccagaggcttgtgggctgaggaccaactctcaccgctgtctcttttgtccccagctccaggccatgcccgcagccggaggcgtgctctaccagccctcgggaccagccagcttccccagcaccttcagccccgccggctcggtggagggctccccaatgcacggcgtgtacatgagccagccggcccctgccgctggcccctaccccagcatgcccagcactgcggctggtaaggacgggtcggggcagagaccatgccttttatccctcgtctttattttagccgaatttacagaaaagcagtaagaatggtgcgaagggttttcccagttgccccgatgtgaatgttgtccctgctttttcctgtttccatgcaaacgcactcacacaggctttcctgctggagccgtgtttcagtccgtgcgtggcaggtactgccctctcccctgaatgcgacagcgagcatttcctgaaaccagcaggtgctgggctgccgatcctcgtctgtagcaggctcagccctcatggactgtcccagtggtgtcctgtaaacagcacgccccctgctgcgtggcatttgccccccctccgcctttaatctagagtgttccccagtcagcttttgtgttttgtgacatcgactgtcccaagagcactggcctgtcattcggcagaccgtcctcagctcaggtttgtctggtgtctccacgcggtgaccataaggctgtgcttttctcagagtggcagccgaggtgacgtgcatcccgtcagtcccattgttggccgttcggctgagacggggtctgccaggggttttcactgtgaagtgactgttttgccctttatcagatgtctcttgggggaggccttccaaataccctgggactcctcaaggtctagcattttttgctaatgttgcctgtgtttattacggtgtttgccaaatagcgccttctaattctgctgttgtctttccactggcgggaggtactcttccccactctcctgcttatcgtcagtcacagcagcgtggagacgtgtttattttttctttcaaaggtgacactcctctgtcatcactctttatttttagagtctcgctgtcatccaggctggagtgcagtgccatgatcatggttcactgcagcctcgacctcctgggctcaagcaatcctcccatctcagcctcttgagtagctgggactacaggattgcaccaccatgcctggctaattaaaaaaaaaagggctgggtgcggtggctcacgcctgtagtcccagcacattgggaggctgaggcaggtgggtcatgaggtcaggagttcaagaccagcctgccaggatggtgagaccctgtctctactaaacatacaaacattaggtgggcgtggtggcacgtgcctgtagtcccagctattcgggaggcagaggcagagaatgaattgagcccgggaggtggaggttgcagtgagccgaggttgcgccaccacactctagcctgagcaacagagtgaaactccatctcaaaaaaaatgtagaaatgaggtctttctgtgttgcccaagctgacctcaaactcctgacctcgagtgatccgcccttctcggcctcccaaagtgctgggattacaggtgtgaaccaccgtgcccagccccgttactttgatgctcaaagtttcccaggtgtggccatgggaggcgtcagtggcttctctgttgtgtagggccattggtttgggttgctcctgagtttctgttgctagatactctgtgctcgtcttgtatgttctcaaccctggaagcagccatttctccaaggagcccttgttccctttagtggagggtggtctggatcttggttagaagccaagatcaagattctgggtgtgctcacagctctaggttgttagcagacagagctggaaagtgtgtatgtgaatacaagtgcacagttgtgggtgcgtctgtgtatgtgcgaatacatgcgtctttgtatatgataaaaaccgtgagtgcagccaggtgcggtggctcatgcctgtaatcccaacactttgggaggccaaggcgcgtggctcacctgaggtcgggagttggagactggcctggccaacatggtgaaaccccgtctactaaaaatacaaaaattagccgggcgtgatggtgcacacctgtggtcccagctacttgggaggctgaggcaggagaatcactggaacctgggaggtggaacttgcagtgagccaagatcatgccattgccctccagcctgggtgacagagcgagactccgtctc

SEQ ID NO: 1744 - DNA, 2200 bp, Homo sapiens
actttcggatgagggaagcagatagcccaccagcgagcacagggacgtgccagatttcgctcttgtcgcccaggctggagtgcaacggtatgatctcatgtcacggcaacctccgcctcccaggttcaagcaattctcccgcctcagcctcccgagtagctgggactacaggcgcctgccaccaagctcagctaatttttgtatctttagtagagacggggtttcactatgctggccaggctcgtctcgaactcctgacctcaagtgatccgcgcgcctcggcctcccaaagtgctgggattacaggcgtgagccaccacgtctggccttcttgtccgtttatttattcattcaacaaatattcatgaaatgtatgttgtaagctgaatactttgccaggctctgaggaccagtcaggcactttgatgccttcaagcagcctaggacctagaggtttcaatgcctctgctttcctatttataaatgggcagactggacctgaagtcctgaaggctcacccgcctggaagccacctctcctctggagttctgatgacgctgcagaagcctgggaaaataacaagaaagctctatttacagaaaaacaccagctaaaaaatgtagaaggaatctaaaaggtatcgaaagttaccaccttgcaagtggaatattggttttggccaaagatgctaaaatgatcaacagaagggtcgtcctttctgttgggaaccaggatgctcacaaggcattgcccacaagggacactaattgcaaaagggacagtgtgcctccacaggggaacagctggtgtcaccatcttaacaagggatctgacagcatcaccgtggggggagaaagccaacatcatgcacctccaggagctctcagaggatggaggaacacgtgaaccaacaccaggaggatacagcccgagagatcagccatgggacatttcacaagaccacggccaagtctcttcacaaagtcaacgtcaaacacaccaaacaaaggaaaaaaagataaaagagaagaaaaagagcaaaagggaagggactgctctagccaaaaaaggactacacagatacaatgaccggatgtaatatgtgacctccagagggataccgattcaaaagatgcagccatggaaaatgtcttataagcaccagggccatttaaatgtggactagatgtcagatggtcttattgaactatgattgactttcttagatgtgatcatgacagtctatgtgagagaatgtccattttcttaggaggtgcctgtggatacacttaggactgcagtgtcgggatgtctgcaaattgccttcagggtctcagccagaaggcaggcaggaagagacagagatggatggagccatgcagacaccaaggtgaagagctactgaatcttggtggagggtccctgagtcttcattataattttaactttcttgaagttttgaagttttcataataaaaagttaggagggaaacattttaaagtagagaaactagatcttcccacagaacactggggacccttattattattattttaaaccctgctctttgctttttcaaagtgagttttgctaaaataatggtatctagcatttctgagaaattagcacaaatgtacagctacattagcaacaggaaattcagcacatctgagtcatctatgtaaacggcaataatgaaaatgagggctttcgctgcatgtctaagaaatgtcctcttttggagactcttccttttgtttcacacccagaactgtctcagaggaggttcaacagcagggcctcaagggaccaggagtaggtggcagacatgagggagctcaaagagaccacagcacctgcagggatgtgggtctttagggccaaaataccacggacatgctagtgcagagtggaaccatctccctgggaaatattgatcaacaggccagtgttgcctttcttcaaacaatttaacttaaggagctcatgcccctcaaggtgacaaagacggtaaaatgtgaattaaatgagcagatgttacgtgtttagaacagtgccctaagttttccctgttgttactcccaatgagcactgtaggagttcatttcaaaagctaagaactgtccggcaggctatactaaatggaaaaggtggcatgctaaacagcaaccttgatctgtataagccagcagttgtgtt

SEQ ID NO: 1745 - DNA, 2679 bp, Homo sapiens
ttataaggtgtggcagtccaggtcagtatgcaagagatgtagtagctgcagtcagctctgcagcaggtagaacttggaagatcgttcatctaactaaagtgacatgaaacttgtcttctcaagatgctaaatggcacagggctcattactagcctgctcctcagaccatccttggagatgaaagaggagccactaccctggcacagtgccaggggcaggggctacaaagatgaaagcacatggggcgattcaatgagtgcttctttttcctggcacttagtagcgcccagtctagcagggccaacagacatgtccagagccccagtacacacacacacacacagagatgtacaaattcatacactgcatgtaagaatcaatgtgtgcacaggaggagagagtggctacctccacagcgagtggggcaggagtgcgggaaggtctcccagcaggtaaaagtcaccttacctgaggtggaaaaatgagtggcaatttgacaaatgaagaggggcaggcgcaggatgtggtagcagcggaccataggcatgggactcaacctatgcggagccccaggggtagagaaaggatggctattcgggatctataaatacccacaagagccaggcaggtgacgcatgtcagacactttggtgtattattcatttctatttttaaaaatgtcctccttcctgcttttcttgacttatacccacttatcctttatttttccatctttgattgaaacttaaatctttccctactcgaagaaaactagcagtccaaatccaatcgctgtatcagttcataagtgctacatggctcctgctgggaagtcaggtgggagtggcaaggactggggcaaactggagagcaaattctcctgctgaagaggacagccattcttcaactccagttgttcagaagctccaaatcttgcaatttctcagaaaaagcaagcaagcaacctgaattttgatacatgagtcaaatttttaaacagtgccttaatggaaaaaaaaaattctgcagaacaaacagatggaacataccctcatgctaagccttattcatggaccatgcttgcaagctttcatttacaggctctcgagattccaagagcattttcaggatccttcaccaaatcgttgctctgcttatagtttctcctaaccatccttttccccttgctttccagaaagaaatgacgagcaggatgtgtcactaatgctccacctcaccctttggaagaaaggaaagctgtttcctcctggtgccctgagcgggcaggaggtggaccaccctggctgaaatgacacacctactcccaggaacagcagaggtggaggcaagcagtgactcctgagagacattccccactcactttgtgtgctcttaaccttctgagtgctgctagcccagacctgtggacgaggcagaccacaacgtgaaagaaggaccagccccttgaccgttctggctggggaattgtccacgaggaagcctctgcacttccacacatggcacagttctgcctgtgacctgccgcctaagctttactggaattcaggttttgagactgagatgcgtgttcgtatttttccacttatctgtcttgtcagctggccgacttctctgtgattggttttttaagtgccgggtgaattttggacctctggatgtgcagcaagtttttatgcaataagccttcctttcaggtctctaaaagctcctgctctgatctgtggtttaacactgtgcagggctgtggagctctgagagacctgaacccctacccatcccctgcacctccctactctccctgccgaggcgtccatagcatttccctaataaatagttttatcagggacactccatggggtggcttgtctctgccccaaacagggtcttcacgttctaactgcagggaagagactggttactagcgtaaagctgacaagttaccagttcacctgatcagaatgtattttttataaccaccatcattccttgtctcttcagtggaagatattctttcctgtttcccagaagagagaaataaaagtcctaaataactaagaatgatcagcgggagcgttgggcatgattactgcagtgtttgttctttattaaagacagggagtcgtggctgtctctacataatactaacatttcagtgaaaaaagtacagttggttatttggtacgtgtagatttaacacccagacggctgacttgtaaccctccccactagccttctgagcatttaaacccagccgtcattctctccccactccacgctccccactcctctgccacgttatgttacggcacaaaattaatttctgcccctgtgattgggccacggttgccaaggtaacagtggagctggagctaacttccttctttcatcctttccaatttttctattccagaagacagtcagaataatgcattctgtactacatcctgccttttgaaacctaaatgagttttcgttgatgaaatgttgccttctctgattcattcacaaaactgtggtggttctgaccacctgtgacgaggggggtcataatacttccagtgatccttttaatttagcaaaatatttgtcggtggagggaagtagataagaatgtattagtgtattttaaagtaataatgattaaagaataactaaatg

SEQ ID NO: 1746 - DNA, 3394 bp, Homo sapiens
gctgcctcctctgactgttatgcagcaggccggcaggtcaataaacttgcttgcctgactttgagtatactcgtcttttctcttggccaaccttacggtagctgtaccagtttgcatttccaccagcaatgaatgagagttcctgttgctctgcatcctcaccagcatttggtgtggtcagtattttggattttcaccattctaatagagattcacggatccatccgggtggtccgggcaccactggcgcccctctgcggctattccccagttccattttctgaagccacaggtcagaagccgctgtacaacactttgccgaactccagaatcttgaaggagacgtaaggagcagccacctgccgcgcaggcgcaagcctttctttcggcacaaagaccgtgggaggaggggtcggcgcaagcgctcggtgtctctctgaaaagaacatcatactgcctcctggctgacggagcgcagcgcaacgcatgcgccttgaagacttatggaacttattccacgctcagggcggcggtgacgtgtgaacgagaaggaggtggtcaaggaacggaagccgggagggaacgagggcggaagcggaccagggccaggcttgtgttcgcagccttgccgtggctggggttccgatgtggtccccggagcgggaggccgaggccccagccgggggagacccggcgggccttctgccccccgagtgggaggaggacgaggagcgcatgtccttcctgttctccgctttcaagaggagtcgcgaggtgaacagcaccgactgggacagcaagatgggcttctgggcgccgttggtgctgagccacagccgccgccagggggtggtgcgcctgcgtctgcgggacttgcaggaggcctttcagcgcaaggggagcgtcccgctggggctggccacggtgctgcaggacctgctgcgtcgaggggagctgcagcgggagtcagacttcatggccagtgtagacagcagctggatctcctggggggttggggtcttcctgctgaagcctctcaagtggactctttctaacatgctgggagataataaggttccagctgaggaggtccttgtcgctgtggagctgttgaaggaaaaggctgaggaggtgtatcgtctgtatcagaactcgcccctctcctcccaccccgtggtggccctgtcagagctcagcaccctctgtgctaactcctgcccagatgagaggaccttctacttggtgttgctgcagctgcagaaggagaagagggtcacagtcctcgagcagaacggggagaagattgtgaagtttgcccgagggccacgtgccaaggtctctccagtcaatgacgtagatgttggggtgtaccagctgatgcagagtgaacagcttctctcacgcaaagtggagtccttatcccaggaagcagagaggtgtaaagaagaagcccgccgggcatgccgagcaggaaagaagcagctggcactgaggtctctcaaggccaagcaacggacagagaagcgcatcgaggccttgcatgccaagctggacactgttcaaggcatcctggaccggatctatgcctcccagacagatcagatggtttttaacgcctaccaggctggggtaggagcactcaaactctccatgagggatgtcacagtggagaaggcagagagcctcgtggatcagatccaagagctctgtgacacccaggatgaagtttctcagactctggctggtggggtaacaaatggcttagattttgacagtgaagaactggagaaggagttggacatcctccttcaggataccaccaaagaacctttggatctgcctgacaacccccgcaataggcattttaccaacagcgtgcctaaccctaggatctcagatgctgaacttgaagctgaacttgagaaactgtccttatcagagggaggtttggtcccaagcagtaaatctccaaaaaggcaattggaaccgactctaaagccattgtaggaccctcaagtgaaggaccctcatgtaaaagagagaccaggcctgctgggtgtgtacatagttatttaaacaagaaactctcagaatgtgtttggaagaggagaaaggagaaccactgattttatctggatgctactacttactacaggacagatagaatttctggaagcgatgctccaaaggcttgctcccagctgtatcatggacctgccttctcatctttatagtgccacgatttatacagtcctgtgtctgacctgtcatttcatagcctgcagttcttgccattggcacacttagatttgtcttcacccaccagcttcgttccagcccatgaaggggaaagatttgcagctttgccaaatctgaatcagttcccactcccccctgtggttttttagaggggtttatcctgtcgctaatgtcagttaaatagcttattcctgtcccacttgatttcactggtaagaatgagaatgaaaaaggttttatttgaggggacttagctgccattttatggaaaaacatgtagtataaaaggtttttctccagggtcatttgacagaattctccaggtgttcagagaaagaggtcgccccaagtggcccagagtcgtgacagtccggaggggctggtgtggccggtgggcgctgcctcttcatctgatggagccaggaggtccgccggtgggggaaaggcttcttccgaggcttctgcactcgcctgggaagaggcccagtcactacaggaccctgagatgtccagaccccttatgcaaagaggcaaaattgttgccttggccccatcatggagtaacttaaaaatacatatctatcttccagaacaagccacacaataacacacctcccctccttgagcctggcacacagcaccgggctctctgaatttggaaagtgtttcatcttgtggcctactgctcggggcaggggggctgagccaggatgtgcaatagaagcaggggttgtcccctctgccagatctgtggggagctgcccaggccacccgtgcacctgtcctgcttcctgcagtccccactccctgcctcctttgagggactgggggacttggggtagggggacagacgggaaagggtctgaatgctctggcaatggcgagaagaagcgatcgccacactgccactctgctgcccagccaccaggatttctgcctggagccctttgccctgtccctgctgcctgaggtggcgtagagcagaggagaagaatttgctccaggccaggagcacaaatcgttgttcaatgaatttctctccaactcgaccttggtaaacggaaatgttgggggtgaagagaaacaatcactatttttttcttttttatctggtaaataattaaaagaaaaaccg

SEQ ID NO: 1747 - DNA, 2485 bp, Homo sapiens
tttcttccaaggaacaaaggcttttggtgccaaactgaaggaaattgaaaagcagcacaagaactgtgaaaacttttattccttcatgatcatgaaaagcaattttgatgaaacatatatagaaaatgtagtcaggaatatcctaaaaggacaggatgttgacagcaaggaagcacaactcatttccttcctggctttactcagctcttatgttactgactctacaatttcagtttcacagtgtgaaatatttttgggaatcatatacactagtacaccctgggaacctgaaagcttagaagacaagatgggaacttattctacacttctaataaaaacagaagttgcagaatatgggagatacacaggtgtgcgtatcattcaccctctgattgccctgtactgtctaaaagaactggaaagaagctatcacttggataaatgtcaaattgcattgaatatattagaagagaatttattctatgattctggaataggaagagacaaatttcaacatgatgttcaaactcttctgcttacaagacagcgcaaggtgtatggagatgaaacagacactctgttttccccattaatggaagctttacagaataaagacattgaaaaggtcttgagtgcaggaagtagacgattcccacaaaatgcattcatttgtcaagccttagcaagacatttctacattaaagagaaggactttaacacagctctggactgggcacgtcaggccaaaatgaaagcacctaaaaattcctatatttcagatacactaggtcaagtctacaaaagtgaaatcaaatggtggttggatgggaacaaaaactgtaggagcattactgttaatgacctaacacatctcctagaagctgcggaaaaagcctcaagagctttcaaagaatcccaaaggcaaactgatagtaaaaactatgaaaccgagaactggtcaccacagaagtcccagagacgatatgacatgtataacacagcttgtttcttgggtgaaatagaagttggtctttacactatccagattcttcagctcactccctttttccacaaagaaaatgaattatccaaaaaacatatggtgcaatttttatcaggaaagtggaccattcctcctgatcccagaaatgaatgttatttggctcttagcaagttcacatcccacctaaaaaatttacaatcagatctgaaaaggtgctttgacttttttattgattatatggttcttctgaaaatgaggtatacccaaaaagaaattgcagaaatcatgttaagcaagaaagtcagtcgttgtttcaggaaatacacagaacttttctgtcatttggatccatgtctattacaaagtaaagagagtcaattactccaggaggagaattgcaggaaaaagctagaagctctgagagcagataggtttgctggactcttggaatatcttaatccaaactacaaagatgctaccaccatggaaagtatagtgaatgaatatgccttcctactgcagcaaaactcaaaaaagcccatgacaaatgagaaacaaaattccattttggccaacattattctgagttgtctaaagcccaactccaagttaattcaaccacttaccacgctaaaaaaacaactccgagaggtcttgcaatttgtaggactaagtcatcaatatccaggtccttatttcttggcctgcctcctgttctggccagaaaatcaagagctagatcaagattccaaactaatagaaaagtatgtttcatccttaaatagatccttcaggggacagtacaagcgcatgtgcaggtccaagcaggcaagcacacttttctatctgggcaaaaggaagggtctaaacagtattgttcacaaggccaaaatagagcagtactttgataaagcacaaaatacaaattccctctggcacagtggggatgtgtggaaaaaaaatgaagtcaaagacctcctgcgtcgtctaactggtcaggctgaaggcaagctaatctctgtagaatatggaacagaggaaaaaataaaaataccagtaatatctgtttattcaggtccactcagaagtggtaggaacatagaaagagtgtctttctacctaggattttccattgaaggccctctggcatatgatatagaagtaatttaagacaatacatcacctgtagttcaaatacgtttatttatatctttatgattttattctctctctctattctcatggcactttcataacattatggctaacctctaattacagattttgcttttgcctccctgaatgaattacaagcctttttaagatatgaaatatgcctacccgcagagcttggcacaaagtggagtcaatcttttaatgttttaaatatgcattttcagactcaaataattaagaagtttcattgatatccactggtcacatcataactgtctatagggcaataaaatctgtgttaaactc

SEQ ID NO: 1748 - DNA, 1624 bp, Homo sapiens
agctctcagagaggtgccttagccctggattccaaggcatttccacctggtgatcagcactgaacacagaggactcaacatggagttggggctgtgctgggttttccttgtcgctatcttagaaggtgtccagtgtgaggtgcgcttggaggagtctgggggagacttcgtacagcctggagggtccctgcgactctcctgtgcagtctctgggttcgccttcagtcgatatgaaataagttgggtccgccaggccccagggaaggggcccgagtggatttcatacatgactagcgatgattataccatatactacgcagactccgtgaagggccgattctccatgtccagagacgccgccacgaggtccgtctttctgcaaatggacagcctgagagtcgacgatacggctgtttattattgtgcgagagggggccatactactcgaaacaaagggggggactactggggccggggaaccctggtcatcgtgtcctcagcctccaccaagggcccatcggtcttccccctggcaccctcctccaagagcacctctgggggcacagcggccctgggctgcctggtcaaggactacttccccgaaccggtgacggtgtcgtggaactcaggcgccctgaccagcggcgtgcacaccttcccggctgtcctacagtcctcaggactctactccctcagcagcgtggtgaccgtgccctccagcagcttgggcacccagacctacatctgcaacgtgaatcacaagcccagcaacaccaaggtggacaagagagttgagcccaaatcttgtgacaaaactcacacatgcccaccgtgcccagcacctgaactcctggggggaccgtcagtcttcctcttccccccaaaacccaaggacaccctcatgatctcccggacccctgaggtcacatgcgtggtggtggacgtgagccacgaagaccctgaggtcaagttcaactggtacgtggacggcgtggaggtgcataatgccaagacaaagccgcgggaggagcagtacaacagcacgtaccgtgtggtcagcgtcctcaccgtcctgcaccaggactggctgaatggcaaggagtacaagtgcaaggtctccaacaaagccctcccagcccccatcgagaaaaccatctccaaagccaaagggcagccccgagaaccacaggtgtacaccctgcccccatcccgggaggagatgaccaagaaccaggtcagcctgacctgcctggtcaaaggcttctatcccagcgacatcgccgtggagtgggagagcaatgggcagccggagaacaactacaagaccacgcctcccgtgctggactccgacggctccttcttcctccatagcaagctcaccgtggacaagagcaggtggcagcaggggaacgtcttctcatgctccgtgatgcatgaggctctgcacaaccactacacgcagaagagcctctccctgtccccgggtaaatgagtgcgacggccggcaagcccccgctccccgggctctcgcggtcgcacgaggatgcttggcacgtaccccgtctacatacttcccaggcacccagcatggaaataaagcacccaccactgccctgggcccctg

SEQ ID NO: 1749 - DNA, 2130 bp, Homo sapiens
taaattgcccagtctaagatattttgttatagcagcagaaacaggctaagacacagtcctttactaaatacaattctcaagaataggggccaggcacagtgattcatgcctgtaatcccagcactttgagaggctaagaagggtggattgcttgagtccagaagcttgagaccagcctgggtgatgtggtgaaaccccgtctctacaaaaaaataaaaaaattagccgggagcggtggtgcatgcctgtagttccagctacttgggaggctgaggtgggagtatcacttgagcctggaggtggaggctgtagtaagttaagatcacaccactgcactctagcctgggtgacagagtgagaccccgtatcaaagtaaaataaaagatagaatggactttaggcagaaaacagtgatcctaaatggaagaactgagattcaaaaaagaatgcaaagcaaatatgtgagcaaattcaaattagcattggaggggtgcagtggctcctgcctgtaattccagcactttgggagggtcacttgagcccaggagtttgagaccagcctgggccacatagggagaccttgtctctacaaataataaaaaaattagctgggcatggtggcacattcctgtagtcccagatacttaggaggctgagatgggaggatcacgtgagccttggaagttgacattgccgtgatcacaccaccatactccagcctgggtggcagaccgaaaccctgtcccctccaaaaaaccccactaattgtttagtaatataataatatctatggggtaaaatcaaggtagaatttcataatacatgaaaatagtaacaaataagtcatgaaggagagtaaatgaagttaaaacattccagtctttgtagtagctgtgtcttggtccatttgtgttgctataaaggaataccagagggtgggtaatttataaggaaaagaggtttgacacagttctggttctggtaagagtttcaggctgcttccgctcatggcaaaagttcaaggggagccaaagggaagctagcttgtagagaccccgtggtgatagagaggaagagagagaaagagaaggtgccagtctttttcttttttttttttggtatttttagtagagatggggttttaccgtgttggccaggacggtctcgatctcctgacctcgtggtccacccgcctcagcctccatctcaaaaaaaaaaaaaaaaaaattagctgggcgaggcaggagaatcacttggacctgggaggtggatgttgcagtgagccaagatcacgccattgcactccagcctgggtgacaggaatgaaactttgtctcaaaaaaaaaaaaaaaaagagaactcagttactccctcaagaatggcaccaaaccatttacgagggatcttccccgacaaccagaacccctcctaccaggccccacctcagcatggggcaccacacgggccccacctcagcatcacacgggcctcacctcagcaccacacgggccccacctcagcaccacacgggccccacctcagcatcacacgggcctcacctcagcatcacacgggccccacctcagcaccacacgggccccacctcagcatcacacgggccccacctcagcaccacacgggccccacctcagcatcacacgggccccacctcagcaccacacgggccccacttcagcaccacacgggccccacctcagcatgaggcatcccagtttaacatcaggcttggtggggccaaagaaaccatatccaaattacagcaaactaggatagggattaactgtagattttaataagtgcagtttacaagttctaaggaattattgtaggaatagaaactggccaggcgtggtggctcacgcctgtaatcccagcactttgggaggccgaggcgggtggatcacgagatcaggagattgagaccacggtgaaaccccgtctctactaaaaatacaaaaaattagccgggcacggtggcgggctcccgtagtcccagctactcaggaggctgagacaggagaatggcgtgaacccgggaggcggagcttgcagtgtgctgagatcacaccactgcactccagcccgggtgacagagcgagactccgtctc

SEQ ID NO: 1750 - DNA, 2206 bp, Homo sapiens
tttggcgggttctttagctgcacagttgggaaccccctggtagatcctgctatatccagagatttaggggcaccgtctctgaaaaagtgccccgggggcttcagccagcacccagccctcatcagcgatggatgccaagtgtcctattgcgtcaaatccgggctcttcacaggagggtccctgccccctgccaggctcccacctttcacccggccacccctcatgagtcaggctgccaccaatactgtcatagtgaccaattctgagaatgcgagatcctggattaaagactcccagacccaccagtggaggctgggagaaccgatagagctgcggagggccatgaatgtcatccatggggatggtggtggtctgtcaggaggggctgcagctggggtcacagtgggggtcaccaccattctggctgttgttatcaccttggccatctacggcacccggaagttcaagaagaaagcatatcaggcaattgaggaaaggcagagtttggttccaggcactgcagcaactggagacaccacttaccaagagcaggggcagagtccagcttaaatctctccccgaaaatggtttctctcatctccagtgtggtcattgctgaccactctgttttcctaagcattgaaatggcaagtgcaaccaaaagtaggtatattcgtgacttcttgtttaggtctctgggccaggaaattcatactgttacatggataaggttgggattggggagagggaacagttgggactagaagcaaaagtgattctgggactaaaataggaagcagatgtcctttcccaatgtgtgttgctgtcttcacctgaatgcatttgtgtaaaaatagcggagggacaatgtgaacatttgtatttggaagctatgaatttactctgaagtttgcagttgtttccaatttgtgagctctaagagtttctgcctgtaagaactactctccttttattttgatttttaaaaacctgtctgaatttcacactcttagagcctggaagagccctgaaaagacacaagtcttgcctggctactgctttttaactttgagggctctatgttgacagactgttatctcctctgggcgacctcaaacatctgaaaagaaagatgttgcctgtgccaattccactttttccagctgccccttgatgaacactcccttataccagaccactcttggacttctgactggtgtcatcaagtcctcagaaaatattttaagttattttaagttattaaggaagggatgatttggagacaaggagtaatgaaagatgggtaaaaactggaaaagattctggtgctaagtactaccccttcatcttccatggatggtcattacctttcctgtcctcctgttatatgaacacacacacacacacacacacacacacacacacacgcacacacataccacatttcaataagtcttcattgttctgggtccttacctttcctgtcctcctgttatatgaacacacacacacacacacacacacacacacacgcacaccacatttcaatgtctgcatggttctgggggtaacaaaggcaagaagttaaagtaagaccacatttgagtattacttactctgtagaatcaaaacagagtagttaacaccaattatgcaaactacttttttttccagcagaaagggagctgacatgatcaaatccatgttttcaaatgaactgaaaaaggcatccagcaccacttataacacatttatttcagttccaggctgacagccctggggcatctagcaggatgcataattgtcatctggtgagagttgggactttgctcaattttaataccaatctctcctgattgtaattacctccactactttcatgatccccctacaatatttttttaaatgatatatttattcactgaatcaaatgtcattaatgagttatcttctgtggaggatgactgttctctttgttaatgttcacaatcaagatcttgggctgagaagaggcccttcacccaaggagtttgaagtatcacagtgtgtgggaaggtgggaaccaggatacccattcatttccaaccgagacacagagaagtgagtcacagaatttgagcccgctctcttgactgcccagccagagacactgatttctgtaacctcttcacttgatcctgcctcttaagcattaaaacattctcct

SEQ ID NO: 1751 - DNA, 2215 bp, Homo sapiens
aattgccgtccagggacccagctcttgtcagtcctcaagggccctgccacaggaaaggtgcctcccttggctgtcccttcttctcttccagtgcaagcccacagcactcgacgtgaagcctcctctccccataaatgctggtcacgtgcctttagacagatgcctccctcagagccttgcctattattattattatttttatttttgagttggagtttcactcttgttgcccagactggagtgcagtggcgcaatcttggctcactgcaacctccgcctcctgggttcaagcgattctcctgcctcggcctcccgagtagctgggattacaggcatcaccatgcctggctaatttttgtattgttagcagagatggggttttgccatgttggccaggctggtctcgaactcctgacctcaagtgaaccgcctgcctcggcctcccaaagtgctgggattacaggcatgagccaccacacctggccagccctgccttttttatttgtaaaaatgagaataattatacttgtctaccaggaaaatgatcgtgaggcaccaggaaaacactccatgtaaaactacaggggtaggggacatgggtgacaagtaaggagaacactgtgtcctcaaattattatgtcctactcttacactctcgaccgaggcctcaggtgatggtgaaaggctccttcctgagtcttaaaacatctggctgcccccggcttctcaggtgacaaggatagaatttagaaggtttggctcttggttcaagggggctggtctttaaagacggaaagaacactttgttccttggaaggaggattggaatgcagagcgagagcagggctgagagtgggaatgtgtgcagggaggaggggtggggaggagaaggagagttccagggtcccactgagagaacagcacagggggagaggcatctgccctacccaggagccgggagccttgtcccaggagggatcagcaggcagtctgaaatctgagcccagggaataaggctcccactgtgggagggctttggtcagaagttggccaaagctcttactatgtgagctgtggcaagaatgcgctctacatcataagccagtacacagctacacgtgccacagtagaggaaacaaagatggaattttcacaggacaatgcctattcctactgcatgctttgtgcactgatattttctattctataccccttccccttcccttcccttcccccctctctctctccctccttttccacctgcctggcagccttcttttcttgtatagtttctttcctcttgtgtcatcagcaaagttgatttctagacccactagtagggcttccttcactgttgttcaagtgtggggagaattaaagggctacatcagaggccagctaaggccccgcatacccccactctcctgtttcactcccttcataatcacaaagttccttctcctgcctttccttctcctccttttttaaaacaagcaaacaaacaaacaatttcatcagtgtcaagaatagcaggatttatttcacaagctttttggatgataataaaaatcacgtgggggccggttgatgtcactgagcctcaggcttctcctcagagagtccgttcaggtaggtctaggctgggcctggtgatcagtgtttgcaacaggtacagctaagtaatcatgatgatcaggcccatcagggattccctaatcaggtttaacccctgtattgtgctgataaggaatctggggccaagtgagggcagctgccttgtctgagatcacacagtgggcgccacccttggggccagacattgtagttagactgtctgtgcctgcaggccctgtaccttgtacattaccaggctccctgatgttgcacttgaatgcaggctgtggcaagtggggcaggctaatccctagccctcagacagtgtgcttgggtgccgctcattgttgtagcagcggaaagctgtgtaggctcattcttaggccccaggaaggtgtgcatgagtgactggtgggcaggtctgctttcaggttcccctcatggtgtgtgtgggtgccagtggcagcagctaggaggggcataatgtggcatattttttttttgtctgtggggaataattggcatgtgacttcagaatttcttgtttttttccttttatatgttgaagaactaagtattaaataaacagaaaacaaaaaat

SEQ ID NO: 1752 - DNA, 2821 bp, Homo sapiens
aagtctgaatgctgtgtggacagaggaggaggacccaataagagaccacaccgctgttccagaccctctccatggatgatgtcctgcccctgatgccttgggagaccctgttggcacagggcagtccccagggctcgcctgacctcccagcagggcagcggaagcagcagccacagggtgacagggcccagggcctggcctctgagtcctggaagctcctggaggtgcccatcattcacataacgccatccagtgatggggagtcccccacctgcaccccaaccccccgacgccggcagcagcagaggatgccagacccgcagagtctgtcccaggacagcaccacaccccactctggccggagcacgccaagcagctccccatcgctccggaaacggctgcagctcctgcccccaagccggcccccacctgagccagaaccaggcaccatggtggagaagggatcagatagctcctcagagaagggtggggtgcctgggacccccagcacccagagcctaggcagccggaacttcatccgcaacagcaagaagatgcagagctggtacagtatgctgagccccacttataagcagcgtaatgaggacttccggaaactgttcagcaaactccccgaagcagaacgcctcattgtggattactcctgcgccctgcagcgtgagatcctgctccagggccgcctctacctctctgagaactggatctgcttctacagcaacatcttccgctgggagaccacgatctccatccagctgaaggaagtgacatgtctgaagaaggaaaagacggccaagctgatccccaacgccatccagatctgcacggagagcgagaagcatttcttcacttcctttggggcccgtgaccgctgcttcctcctcatcttccgcctctggcagaatgcactgcttgaaaagacgctgagtccccgcgagctctggcacctggtgcatcagtgctacggctcagagctgggcctcaccagtgaggatgaggactatgtctcccccttgcagctgaacggtctggggacccccaaggaagtgggagatgtgatcgccctgagcgacatcacctcctcgggggcagctgaccgcagccaggagccaagcccagtgggttcgcgccgtggccatgtcacgcccaacctttcccgagccagcagcgacgcagaccatggggcagaggaggacaaggaggagcaggtagacagccagccagacgcctcctccagccagacagtgaccccggtggctgaacccccgagcacagagcccacccagcctgacgggcccaccaccctgggccccttggatctgctgcccagtgaggagctattgacagacacaagtaactcctcttcatccactggggaggaagacttggctgccctgcttcccgacctctccggccgcctcctcatcaactctgtcttccatgtgggcgctgagcggctccagcagatgctcttctcggactcgcccttcctccagggcttcctacagcagtgcaagttcacagacgtgaccctgagcccctggagtggggacagcaagtgccaccagcgccgggtgctgacgtacaccatccccatcagcaacccactgggccccaagagcgcctccgtggtggagacacaggcgctgttccggcgcggcccccaggccggcgggtgtgtggtggactccgaggtgctgacgcagggcatcccctaccaggactacttctacactgcccaccgctactgcatcctgggtctggcccggaacaaggcgcggctccgagtgtcttctgagatccgctaccgaaagcagccgtggagcctggtgaagtcgctcattgagaagaactcgtggagcggcattgaagactatttccaccatctggagcgagagctcgccaaggctgagaagctgtctctggaggaaggcgggaaggatgcccggggcttgctatccggcctgcggcggcggaagcggcccctgagctggcgggctcacggggacgggccccagcacccagatcctgacccctgtgcccgggccggcattcacacctcgggctccctcagctcccgcttctccgaaccatctgtggaccaaggccccggggcaggcatccccagtgccctggttctcatcagcattgtccttatcatcctcatcgccctcaacgtcctgctcttctaccgcctctggtccctggaaaggacagcccacacctttgagtcctggcacagcctggccctggccaagggcaagttcccccagacggccacagagtgggccgagatcctggcgctgcagaagcaattccacagcgtggaggtgcacaagtggaggcagatcctgcgggcctccgtggagctcctggatgagatgaagttctcgctggagaagctgcaccaaggcatcacagtctcagaccctccctttgacacccagccccggcccgatgacagcttttcctgaggaccccggccacgcagctgttcccccacatggacagatggacacacagagcctcggcgccactgctggcacggtgtgagcgccaggcatctcccacccgcccctcccgacggcccaaccaggggctgtgcagacgtggggaccacggaaccgagatgcactttagaccagggaactggcccggcctctggcaggccccccactaacttattttgcccggctgaggttgtggggggcgcctcctggggtgcacgattccctcagctctgggtttaatgtattatatttatttggggccgacagtgccccaataaagggtcagaagtggc

SEQ ID NO: 1753 - DNA, 2170 bp, Homo sapiens
caacaaagaggaacctcacttaagtgaaataggatcttgctttcttcaaaatcaagagggctttgccatctattccgagtactgcaacaaccacccgggcgcctgcctggagctcgccaacctcatgaagcagggcaagtacagacatttctttgaagcctgccgcctgctgcagcagatgattgacatcgccatcgacgggttcctgctcacaccagtgcagaagatctgcaaatacccgctgcagctggccgagctgctcaagtataccacacaggaacacggtgattacagcaacataaaggcagcatatgaggccatgaagaatgtggcctgtctgatcaacgagcgcaagcgcaagctggagagcatcgacaagatagcccgctggcaggtgtctatcgtgggctgggagggactggatatcttagaccgaagctcagaattgattcattctggggagctgaccaaaatcactaagcaaggcaaaagccagcagcggacgttcttcctgtttgaccaccagctggtgtcctgcaagaaggacctgctgcgcagggacatgctgtactacaagggccggctggacatggatgagatggagcttgtggacctgggggatgggcgcgacaaggactgcaacctcagcgtgaaaaatgccttcaagctcgtcagtaggaccacagacgaggtttatttgttttgtgccaaaaaacaagaagacaaggcgaggtggctgcaggcctgtgcagatgaaaggaggcgggtgcaagaggacaaggagatgggaatggaaatttcagaaaaccagaagaaacttgccatgttaaatgctcaaaaggcaggacatggaaagtcaaaaggctacaacaggtgccctgtggccccaccgcaccagggcctgcaccccatccaccagcgccacatcactatgcccacaagcgtcccccagcagcaggtctttggcctggcggaacccaagaggaagtcctcgctcttctggcacaccttcaacaggctcacccccttccggaaatgaaaacaggaggctgtgcttccatggagctgggtgtcaagagaagaactgtctttgtttcttgtgtgcttcaatccagggaaagtttcttggacccagtgataaaaacttccttttagggatcaatgaaggagagaaggtcttggaatcaccttcagtctttggagacccagctgcctttgtggaagggaggagacggtcatgacacaaagctttatcctacacagaaacacccgtgacccactatgagatggcccagatgtgggacccggtaccatgctctaaagcgagtgattaggcagcagctgaagccacccctgctgatgatgagcaagtgcctgctgcaggtccaaacacagcatccagggctttgcagttcctaaggagtgatgaggttagaggatcacttctgcatttgattttcaaggatgccgtcaagacggggttgacacaatgctgcacgtgtctggtcacacttagaaattgagctcttactctcttctgtaatactgggggacctacagctgccgtggggctgaccacggtgttccctggcatcgtctgtgtccacacagatgctaactggtagtgcaaatgtcatcctgcagggttcctcttcctgcaagcaaagtggagagaaagaagatgcatctgtcaccttcatcagggtcctcagtgcagagcaacttacgcatcctcaagaatccactgcttttcaggcaaggagggagaaatcctgctgcacactggctttgtcccggagtcggattccctcctgcctgcacgccttcagtaactccgagcagaaatcacatcttgcccacatgctgtaacctaagaaactgctatgcaaggctgggtgctgtggctcatgcctgtaatcccagcactttgggaggccaaggcaggtggatcacctgaggtcaggagttcgagacaagcgtggccaatatggcaaagcccagtctctactaataatacaaaaattagctgggcatggtggcgcatgcctgtaatcccagctactgggaaggctgaggtaggagaatcttttgaatctgggaagcggaggttgcagtgagctgagatcgcaccactgcactccagcctgggagatacagcgagactgtctcc

SEQ ID NO: 1754 - DNA, 2475 bp, Homo sapiens
gagcacatgggtgtgcaccgcgcaggggctgaggctgggagccgtagtcaggggcaccgggtgggctttggcggcgggtcgacctgcctttcaggtgccgggggtttgggagcaggggaacgggccctgggcggattcctgaccgcccccttcgcgcccctccccctctcactttcgctttccccgcctgccccaaccctcgcccccgggcgctcggccgctcccacctgtcacccccatgcagaccgaggctctgtcctggaggcggggagcgggctggtggatgctgcctctccgcctccagtgtgctctttggctgagggactggtgggcgctggaaatattagaggcgccggtgcctgtgatgtcgccgcctctgtgacgtccccgccgcgaccccacaggcagggagccgcatttaggtttcgggcgggcggacgggggacggcccgagtgaggcgtcctccgaaggctgcgggcccgaagccagaactccttcctctccgaagacctcgggggtggggctcgcgcttccgcagcgggcctagagcgagaggcaggcggcaggtaagcctggctgtgctggacaggacttgcacccgctctgcacgccagcggctcagggctgccgcccttttcgtggtcccagggcccttccaagaaccggctaaaccaacccaagccgcgcgcacacacacttgtgcacacagggagtgtggagccagattcgataaggcaccccgtgtgccccagctccatgaccaaggaactcagcaccccgtgtgccccagctccatgaccaaggaactcagcaccccgtgtgccccagctccatgaccaaggaactcagcccacaaaggcatccctggccccatgcagggctcaggaggcagcggaaagggttaagagtccaggcctcaaggacaggaggggagggtggagggcctgtggtgtgcatccggcatccctggatggtcagggcccagaacccatccctatttcccttctggtggtagggggctgcctaacttgggcagtggcacaaagcatgcaggctttgttgtcctcctcctccacccctcagcctggcatattttggcgagggacttccctgatgccaccgggcaaggtatcttgcctaactggtctgaatgactagcccagcgttgggactagaagcagccactgggaggagtggtgggaaagcagccccactcaagggctgaaacagtccttgtccaaaacaagggggacttgaaaagatctcagcaagaaggcaaagagaggcagctgttagggtcgtgaggttcagcaggccggcaggcaagagagaggacaccgatggcctggaaacatttgtcatcaccccaaactttattgcttacaaagagttctctacaacccagactctgcagtaccaagactgcagttctttatgtgctgggggccggggctctctccccgggagcagtctgactcaatgtggacagctggacaaaggctgtcttggcaagatgtgggaatgagcttctcccacggagtctcggcgtcccctgccccaggaggttgaggctagcagacaccccctgacgattcacagctgatctaatgctacggagaggctgtcgatgctgaggcacgagagaatttgctcctgctcctccagagaaaatggctgggacaggctgttgaggaataattctgcagggaaaagtggaagatggctgtgaaagactgggaggaggctggctgtgttttcaggggttcttcctgcacagtcggtagaagctgagctgctggggaaggggctggaagaaagcccacaccgcagctgctgcagttcctgctccgggacggttgctttccgctctggtgagctggggtttctggcaggggctggctccagggaggacagaggtaagggttcccacatcccagactcctccttgctcaaagtcaagggaggagacttgtttggctctgggggctctggtgggagaggaggctggagcttaggggctctgcctgttgtctcctcagctggccggggccctggggcccttggcgaaagctctctcggctgggcatggagggtctggtggtaattggcttgatttggcggtggatgtcttggttctttatattctcccctccaagggctcttcagacctcccactagaaaacagagagtacaatggtgaggggaagcgtgctgtgcacagacagcggtccaggcaggagcggcctctcctgagtgcagaagggctagaggcaaacaaaggggaggacactgccccgggccaccatgggaggtggctccagagggcagcatggtggtctccacaggagacttcctcaataaaatggtcccaatatgacagggataggactggatttctgtctttgattctgtttttcttctaggtatcagtagcaaattcaaaaactacagaatcagctccagaggactttgtt

SEQ ID NO: 1755 - DNA, 3550 bp, Homo sapiens
aagtccagactacccatctcagtctgttggggagtacccaatgctggctcagccatttcagcccactgaggtgtccccaagtccaacctacccatctcaggccattagggagtacccaaccctggcacagccatttcagcccactgaggtatctccaagcccagcccacccatatcagctcactgaggtgtccccaagtgcagcctactcatatcagcccactgaggtgtccccaaacccaggctacctatctatggccattgagatgtccctaagcccagaatacccatctgtggccactgaggtgtccccaagcccaacctacccatatcagcccactgagatatccccaagctcaggctacctatctgtggccactggggtgtccccaagcccaggctacccatctcagctcactgaggtgtccccaagctcaggctacctatctgtggccactgaagtgtccccaagcccagactactcatctcagcctactgagatgtccccaagcccaggctacccatttcagcccactgaggtgtccccaagcccagactatccatgtgtggccactggggagtcccctagccttgcccagccatctcagcccactgaggtgtccccaagctcagcctacccatctgtggtcactggggagtctccaagcctggcccagtcatatcagcgcactgaggtgttcccaagcccagcctacccatttatggccactgaggtgtccccaagcccaggcgacccatctgtggtcactggggagtccccaagcccagcctacccatctcagcccactgagatgtccccaagcccagcctacccatctcagcccactggggagtctccaagcctgacccagccatctctgaccatcagagtgtccccaagcctagccatgtcatctcagactattggagtgtccccaagcctagccatgccatctcagaccattggagtgtccccaagcctagccatgccatttcacaccattggagtgtccccaaccctagctcacccatctatggccattcgggagtctccaagcctggcccagcctcctcagtccactggggaatccccaagcttgacctggccatctcaggccactggggtgtccccaagtgtagcccaccaatctgtggccagtagggtttcctcaagcctagcccagccatctcaagccagtgggatgtcccctagacaagattacccaccagtggcctccagggtgtccccaaaccaagctcacgcatctataaccagcaggatgtcccctagcagagctcatgcatctatgacctgtatggtgtccccaagccaggttcatcgatctatgcccagtgaggtgtccccaagccttgcccagctatctcaggccaccactgcagtgcccttaagaccagctcatcaacctatggcctgtggtgtatccccaagcctagcccagccgtctcaagccacagggatgtcttcaaggctagcccaccaacctatgacctgtgtggtgtccttaagcccagcccagccatctcaagccattggtgtgtccccaagcctagcccacccatcaggaccccatgggttgtctccaagtctagctcacccatatgtggccagtggggcgggctccagcctagcccacccatctcagaccactgcagtatccccaaggcaagcccaaccatctgtggcctccagtccaggcaagacagattcatcctgtaccctagcctccagcctagccgagccagctatagcccccagcctattcccaccatctgtggcccacacggaagccctaagcctggctcagtcacccccggacactaggttggccccaagccgatcccagccatctgtggtcagtggtacatgtcatggcctcaatgagccatgctggggctctaggctggattcaaatctgcagtgttcaagggtggactcagtagccccgtgtctgtgtcacccatcagcgtttgtttcagttagcctgggtggaccatatccctctgtggctggaaatatggaccagggtctgaaccagccatccctgggtactggggtgaacctatgtgaagaacctctgatggttagtgagatggtatccagccccccggacttcaagttcaacgacgtgtcccttgggttccatcatccacccagggttggtgggaggcatgtgtgtccaccctctgtggttagtgtttcaacaccaaatctctctcatgctgatgaggaggcctgttgtgtaggccagtgaatcacgcctctgttcaggggtgtggctgtaagccatccccaggagcctttggctgatgctatgctccccagtgggtctcaggggaccacatctcctggccgagctgggaatctcccctggagaaccatagcaactggcatgggccaaagtcaatgtcaggtggccaatggcatggcttcccttgcatcccaggtcttagaggcaggtggccctttgacacatccctctggaaccacagggatggcccccagcccctctctggcttcagtgcccaacagactggccgtgactcagtctaatctttccctgaacagcatggaccccagcagctcccagatcagtgtggttattccaaaaaacatagactgctggcacccttctgaggcatccatggtcccacccagttaccagcagagagatgtgattccgcaggactctctgaagagcagggctggtcgtggtgcggcaggaggttttgtagccagtagaatgagcacgggcgcagtcccaggcactctgcctggtggcataacctccagccttcccccgggctccaccatccgaggcatgggtcacagccttcccgcaggctctgtgtccagttgggtggctcccagtctgatggcagacagaaagaagccaagtctatctgtaagaccctccgctagcttagctgctccaaacttgctcccaggttcagtagtgagtcgggtgagcccagttgtcccccctggttctgtgccaatgatgggggcctctagtgtggctcagagctgctccaaggggcccatggtgattgacatcactgcccctccttacctcaaagccctggctggggagaggtctttagcccccttgcagatgccccacaccaccagtctggctccaggtcactcctcagccccggcagctagtggcacagtgaggagtctacaccgagtgcccacggttctatcaagagccttacaattgagccaagatgctaggataatgccatctggggtcacaggggaccaagccaagctaggagaattggatgaggctgtgttccaagtgtcaggatcaagtggatccaatgacctattcagcaaagccagggtcactggtgcaacccagtggatgtactccagtcctctgggagctgatgggggccatgatcataggtccctgtctgagaaagggtctcttccccaagggaggtggctcccagccatgctagtggcatggtccctgtccctttccaggccccgggtttagccactaagtcctccacagcct

SEQ ID NO: 1756 - DNA, 2418 bp, Homo sapiens
ccaacagaaatgcacaagggttctaatttctcttcatattcaccaacatttgttatttattgcgggatctggccagcagcctgcaatgcaacggggctctctctttgttcccaggcagaccggcaggtcgagaaataatagatacacacaagatagtgaaagctgggtccaggggggtcacagccttctggtcccgtggtgctgccaatgcactggatatgccagcatttattattaagtttagtgagggtgggggaaggttagtgagggatttagggtcgtttgattatgaggtgagatggtcacatggggatgaagtaattctttaacataacatctgtatgcagaagtacagtatacagagataagaatttacaatatagtgtgtgcatcagtaatttctaacagagccttaaaacagaaatgcagtctttcataacctatgattagcaagatattaatcagcagtaacagttgcagcaaaagctggttacaaacaatccatagaaacaagacgtgaagctagacaaccggttagaccagaaattctcagaagggagtatgccttaaccctaaagaggcctagaagagccatggcaagatgaatgcgtttatggccctatcttatccacatggacaggtgccccctctctccacaagggtctcattccattcccagagctatgaacatctgcttttctgggataggaatcttggtgatgtgaaacctccctgactgcacatccattcataggctctctgcagggggaagcacatcacgtcccgttggctcattctggcagtccaacctggcactgtctttgcacaatcctgcatgcaattttgtatttacaataatcaggagcatttcatcttttattccatagcaatagtttcacggggtctccctacagttattttaatttttttttttttttgaggcacagtctcgctctgtcacccaggctggggtgcagtggcacgaccccggctcactgcaacctccacctcccgggttcaagcgattctcctgcctcagcctcccgagtgggtgagattgcaggcacctgccaccatgcatggctcagttttgtatttttagtgtagatggggtttctccatgtttgccaggccggtctcgggctcctgacctcaggtgatccacctgcctcggcctcccaaagtgctgggatttcaggcttgagccactgcacccagcccttttcaatttttttttgatagtcaccatactaatggatgtgaagtagtatctcactatggctttaatttgcattttcctaatgactagtaatgttgagcatcttttcaggtgcttattggccattctttagagaaatgtctattcaagttctttctttactttttaatctgtttgtgttgcattgtaggaattctttatatttgctagacatcaattccttatcagatacacgtttagcaaatgttttcttccattccatgtgttgcctttttattctgttgatagtgtcatttgatgcacaaaagtttttcattttgatgaagtcaaagttatctgtttttccttttactgtctgtttttcccctttgttttctcccatgagttttatagttttagctctaatggttagttctttgatccattttgagttacgttttggattgtgtaagctaacagtccaactttttttttttttttggcatgtgagcatgtgaatatccagttttcccaatgtcatttgttgtagagactcctctttctgcgttgaatgattttagcatccatgttgaaaattttttgactatagatgtgagagttcatttctaggctctctacttcactccattagttgataacagtgtttaagccaataccaaactgtgttgattatcctgattttgtagtaagtttcagaactcagaaactgtgagcctctgactttcttcttcctttttgagattattttgacaatttggggatctcttgaaatttcatatgaaagttagtgtggatatttttgatgtttttatttataaaaaaatcattggaattttgatagggattgcattgaatctgtatgtcacttttacaggatgtctttctaattatttaactcttccttaatttcttttaagaatgtttggccaggcacagtggttcacacctgtgatcccagcactttgagaagctgaggccagcagatcacttgagctcaagaatttgagaccaacttggacaacacggggaaaccccatctctacaaaatatacaaaaattagacaggcctggtgtcacgtgcctgtagtctcagctactcgggaggctgaggtgggagtattgcttgagcctgggaggtcaagactacagtgatcagtgatcacagtctagcctggatgacaccgtgagactctgtctcc

SEQ ID NO: 1757 - DNA, 2241 bp, Homo sapiens
atttcttgtatcagcctcaacagattgagacaaatagtattttgtggggagactctgccaatatcctgttccttgtcagacctccactcaccagccttagcatactttgatgaaaccctcctgaatcaaccacctttatgatggttgccaaatggtggttttctattttcatcatttcttctacttttcttagttggcattctaatggaaggaagaagtttctattctctgccatttatgtgcttgtttatttatttatatcattatgtccatggatttctgttttattcaatggattgaaatttgttactcttactatttatttttacgctcaaattgctccatacttgactgataggagtatgtccccattgttctctgagcacttcctctctggtgcaggatgttccaggcttatcatgtactttctttgccccaattctggaatcaactatttccccaagaacccctgtttccttttagtggaggatgatatttaaaaactaagcacttggtgtgctcattgcttctgtgtgctattactttgagtccgtagtgggcagaactaggaaatatatgtatgtatgcactgtaatattataatttgaaatacatgtttggtctctgcccccaagttcctggcacagagctcctaaagcccttgtagataaggggcactaagagaatcttttgttcctatatttggtctctgaccccagttcctgtcacagggctcctaagacctttctgatttcctgaatgataggagtgtctgacacagagctcctaaatcccttggagtttcctgggtcataggagaatcttgtcttaatgaagtaactcttagtgggctcctgaatagcgtcaggatgggggctggttgccaagggatccaaacatgattaaagggttggaacttttagctccaccccacccacctacttcagagaggagcttaaagggtgacttgatcaccattagccagtggtgtaaccaattatgcccatgaaatgaagcctctatgaaaaacccaggacagggttcggggagcctcctggagggtagcccacccagagagggcatggaagcctcacatgccttcttccataccttgccctatgcatttcttctatctggctgttcatctgttcctttgtaataatgttttataataaatgagtaagtataaataaaatgtttccttgggttctgtgacccactatagcaaactaatcgaccctaagaaaggtgtcataggaacgccaatttttagctggttggtcagaagtacaggtcacaacctgagacttccaattagcatctgaagtggggagcagtcttgtgggttagcagtctgtgacacctgacgctctccaggaagagagtgtcagaattggactggaggatgtccagctggtatctgccagggaattgcttggcatgtgggaaagtccccacacatctgaagtcagaagtattgtgttgagtggtgagtgagggtagaaaaagcacttcagttttttcctatctttattacatatacatacagccagatctgtttctgtatatatctgtgtgtgtgtgtatatatgtatagatatcaattcacattgagatgtctgatggcaggttcaatacttcaagattctttgtagccttccccctttctatgtttgtatgtaaatatcttccttaccattgataaatttggctttcatcatacccaatatattttcttaatctctttgtacactactcatctcctgaccagcctggttacctactcagcctttgatttttccctcccaaacttgctactcttttgatcttcccaatttcagtaatgacaactatattcttggaattactcaagctaaaagtattagtgtcatccttcttgccccactccaaacccctcattcatcccattaataattcctttaaatagaatgattttttggctgggcacagtggctcacacctgtaatcccaacactttgggaggctgaaggggaaggatcgcttgagcccaggagtttgtgatcatcctgggcaatgtgagaccccatctctacaaaaaataaaataattagccaggcatggtggcatgcacctgtggtcccagctactcaggaggctgagttgagagaattgcatgagcccaggtgtttgaggcttgcagtgagccgccatgctgtgccactgcactccagcctgggtgacagagtgagaccctgtctc

SEQ ID NO: 1758 - DNA, 2776 bp, Homo sapiens
gctggccaaaaagcggagcccaggggaagcgtgttctgctcagaccgccttccttctccattgccacccgtgccgaacagccaggctgcccaattgcaactgtagaccaatgaactaatccatcgcccgcagcccgactctcagcagcggttcgtcccggtgcccacccccgcgaagcggagcgcccgggcacctagcctccctgccggccacctagcctccctgccggccacgatgccgaacgtgctgctgccgcccaaggagagcaacctcttcaaacgcatcttgaaatgttatgaacagaagcagtacaaaaatggcctcaagttttgcaagatgattctgtcgaacccaaaatttgctgaacatggagagactttggctatgaaaggattaacactgaactgtttaggaaaaaaagaagaagcttatgagtttgttcgtaaaggacttcgtaatgatgtcaagagtcatgtctgttggcatgtatatggactcttgcagcgttctgataaaaaatatgatgaagctataaaatgttaccgaaatgccctcaaattagataaagataacctgcaaattttgagggatctctcactgttgcagatccaaatgagagaccttgaaggttaccgagagacaagataccagcttcttcagttgcgccccacacagcgtgcctcctggattggatatgctattgcataccatttgctgaaagattatgatatggccctaaaactgttggaagaatttagacaaactcagcaagttcctccaaacaaaatagattatgaatatagtgaattgatattataccagaatcaagtgatgagagaggcagatctgttgcaggaatctttggaacatatagaaatgtatgagaaacaaatatgtgataaacttttggtggaagaaattaaaggggaaatactgttgaaattgggaagattaaaagaagccagtgaagtgttcaaaaacttgattgatcgaaatgcagaaaactggtgttattatgaaggcttggaaaaagctctacaaattagcactttagaagagaggcttcaaatttatgaagaaattagtaagcagcaccccaaagcaattacacccagaagattacctttgactcttgtcccaggtgaaagatttagagaactaatggataagttcctgagggttaacttcagtaaaggctgcccacccttgtttactactttgaaatctttatattacaatacagaaaaggtttctataatccaggaacttgttactaattatgaagcctctcttaaaacgtgtgacttttttagcccatatgagaatggggagaaggaacccccgacaacactactctgggttcagtatttcctggcacagcactttgataaacttggacagtattctttggctttggattatattaatgctgcaattgctagtactccaactctaatagaattattctatatgaaagcaaaaatttacaagcatataggtaatctcaaagaagctgcaaagtggatggatgaagcacagtctttggacacagctgatagattcatcaattccaaatgtgcaaaatacatgcttcgagcaaatatgataaaagaagcagaggaaatgtgctccaagttcacaagggaaggaacatctgccatggaaaatctaaatgaaatgcagtgtatgtggtttcagacagaatgcatttcagcttatcagcgtctggggagatacggggatgccttgaaaaaatgtcatgaagtagaaagggtaagttgttagaatttcgacttcagttttcactgtaaggtgataaaaagcaggtagatttctacacaggatcatctgcctcttctaacttctctgggagcttcattgtgaaaaaaattcttgatctttaacctttacattcagaagttgtaaacaatggattgctttactgatcctcaagtgattatgcttttgacatgtctatatatttttgtctgaaggaaaaagattgttagtaaacaattattgctattaacataaattcaaaatttatgttccctaattaggccattattttgatattcatcaccaccctaagaggacacacagctgatggcaacctctttcccctttaaaacatcaggatctggtccgcagtcagcctctctccagtttgtcttcccaggatatttgctctcacattcagtattctgtataacaatctatggccagtttgcaggcttattttattgcttgcttttaggattatttgtgtgatgtgccttagtgaggggacttttcttttcctttgtgtgaatttttgttttcctgttctttgtcatctctgaagcactctccttccacatggaccacaggaggaaaagagccgcaaatgcacccctgaggcagtcctcagcagccctcagttgtgggggcaatcggcaccactgttcccatcctgacgcagtatagaaccacaggcatcgtagtcagcatttttttgagataactgatgaccaattcgacttccatacatactgcatgagaaagatgacccttcgtgcctatgttgaccttttgagattagaagatatactcagaagacatgccttttatttcaaggctgctagatcagcgattgaaatatacttgaaattgtatgataatcccttaaccaatgaaagcaaacaacaagaaataaactcagaaaacttgtcagccaaagaattgaagaaaatgcttagcaagcagagaagagctcagaaaaaggctaaactagaag

SEQ ID NO: 1759 - DNA, 2223 bp, Homo sapiens
tgtggcccctcaaggacctcacgctgacgagcaatcagaggtactccctggtcagggacaagtgtttcctgtcagccaccgagtgcctgcagaagatcatgaccacggtggacccacgggagaagctggaggtgctggagaggacatacggggaaattgagggcacggtgtcgagggtattgggccgggagtacaagctgcccatggacgacctgctgccacttctcatctacgtggtgtcgcgcgcccgaattcagcacctgggagccgagatccacctgatccgtgacatgatggaccccaaccacacaggaggcctgtatgacttcctgctcacagccctggagtcctgttacgagcacatccagaaagaagacatgaggctgcaccgcttacctggccactggcactccagggagctctggtagcctggcctttcctggacagactgaagagctgagcagggcactgccagcctgtccctcattacccaaggcaaggggcaggacaggccctcagaagcagctcttggaggagatgagcattttgttttgcacaggaagatgctgctgctgccctgactgggatgagggtgaggggtgacgggtgtggccctggatgtggtggttttcccttggccactagcccatcttcaatgaccccttaatctgcagcagctcacaggctgggggtgaggagtccctggcttctcttagcctgagcctttctcccaagttccagagcctctccgggcctcagtgctgccatctgtacaatggtggagtgagtacgctgtaaaggaccttccattcattttgctgaattccagagtccttttggaaaactgactttagtctgctgggctgtattgacctctggcaggctcgaagcctcactgggtatgcagtcaacaggatgggcctggagatccgtgaactgcaggccacgtacccatgacgtaaacggcggcactggagcaagctggggcggggggtgggtaaaccctcactgccagcaggccccaagtggcttgtaaatcattctcctgtgacgtctgtgggcctgcgtggggacaacaggggcacatgacatctacctgggccctgaccaataaaccctcagacccaggacccaggaccctgctgtagttggggagcaggagtacctttgggaggggaggactttatttaaacagtggttctagtgtgggaccaagagaggcaggagctgggtcttggggcagctttattcctgttgggcctcagtttctcttccccacacagtttatcttccgtcacattgtgccgggtgacgtgcacggtctccctctgccctagcaggagatgcatgatgacaggcagtgtgatgtgttctgaaagtgtccagggcaaagcgtagggagagggtggatttgtgcagggtgcagctctggagaagaagctggatcactcttggtcccattccctaggccctgagcaagtcaggctcctggctctgggtgtggctcccccaaacgaagtactgacttcagcctgtgaggggagggttgagggaggctctggaaagcccagccacacctgagtccctggcagtagccttggggcagagggcacccgcagagtcccagagatgatgtgggcagtgggcagagagagccttggcgcctctgtttgccaccacttccccaggaaggagggacagcatttctctggctggttccactaaatgtgccagcccaaatgcagggcatgggctctggttctgccgggagcctgtgacacccccaggaagggggtggaactgaggaagagcgaggatatgcaggcactcatgcttaccgggactggggcagctcactaggattctatcctttccaatcggcatcagccagctcttgtcccctgataagtgaggacagcctgaccctggcctcaaatgcagccatccctgagttcatgcgatgctgacgggaccccagcacacttccctgcctcctttgagatctgcgagcccttgctgcagttcagattcaacaaggccctctgcccaccctctcactaggtctcacccaacaccagtggaactggagcctctggctgggcacagtggctcactttgggaggctgaggcaggaaggctgctggaaactgagagttcaagaccagcctgggcaacatagtgagaccctgtctctacaaatacaaaataaaataattagctggg

SEQ ID NO: 1760 - DNA, 2879 bp, Homo sapiens
atactgaagccagcagggcctgctcaggcccattcatggagcagagaagatccaagggcactaagaacctgaagaaaggtccagtgccctgtgcccaagaccggggcacagacagaagctcagacaactcccaccaggacaggccagaggaacccagcccaggaggctgccccagactggaggaagtgaaaataccccatggagtgaagcttgtgtgctacgttttccagccttctccttcaggaggcacagcaggggaccctgatggcctctctgaccccttctaccctccaagaagcggttccctggcccttggcgaccccagctcggaccctgcatgttcccagagtggcccaatggaggctgaagaggattctcttccggagcagccagaggactcagccttcgggagctcccggacccagtgctgagtgaggaggtggtggagggcattgctgctggcattgaggcagccctctgggacctgacacaaggcaccaatggccggtacaagaccaagtatcgcagcctgctgttcgacctgcgggaccccaggaacctggacttgtttctcaaagtggttcatggagatgtcaccccctacgacctggtgcggatgagctcgatgcagctggccccccaggagctggcccgctggcgggaccaggaggagaaaaggggcctgaatatcattgagcagcaacagaaggagccgtgcagacttccagcctccaaaatgacccacaagggcgaagtggagattcagcgggacatggaccagacactgaccctggaggatctggtggttaagttggagcctgacctggtgctgggcagagcccatgcctgggggtcccacgcctcgcctcaccagcagtgtggtcttgggcatgtcacctgactgctctgaggcccaccttgtttgtgataaaacggggacagcgatccttaacgcataggggaacatggggtgggacagtgctgctggcacaggcctgccagcgccttgtcactgtcggtccccctccttttggcctcaccccaaggcccccacatgagtggtattaagtcccatcatcatagtcatccccaacctggcattctgcccagatctctgctgggaagcagcaggctgcgctgttccaggcagtgactttttcagatggaaggaacgaagacccactgtattcagtggattggtttagggatgctccaggcagggaaccacccggcaccctggcagtccatccagagggcctcctggaacttgtcctcagacctgggaagccaacgggagtgacaatagtctagggctcttggcgctgaggatctgctccatcctcatgtccatcctgctccttcctctcccttggccctggcttgcacatagcctgacatggtggctcagcagccccagaatccatgaagccatcatctcagactcctgcagttgattagaactttcccttggcttccttcggtcactctcagaaggccactctggctgtagttgaatgttctgtgggtcagatgttcacctgagtctcatcagctgcctgttcaggagaggggtgcagggcaggtccctttaactatattcagtcagtcagtatatttatggggcacctaccaggtgccaggcacggttctaggcactggggaagtgacagtgaacgacagaaatccctgctccccactcctaccactaatattcaggccaacgactgggagaacctctacctgtgccaagaggatccctaaggggtgtggccgctcctcagtctaaatcagtttgtattccctgaacaaactgaatggcaatgtaggagaaagacctagatagccccagagaggaagagagagaggaggtgggaggggaggggaggggaggggaaaataacacatgatagctatctttactgtttattgaacacctactgtgtgcaccttttacaagcagtgtctcattcacatctcacaatggcctaggaggttggtgctattccctgcccatttctgggatgaggaacctggcaccaaggtcacatatgtgcagtggggaagctgagatttgaacccaggctggctgactccaaagcctgtgctttgagactgttctggaggtggctgataagagtagagtttcaaaatctctttaaaccttcctaaagcaatgattgttttatgtttaaagctatttctagtatgaggaaaaaaagtgatttggcaatagacgtcaagagtctttaaaatgttccttctccctgattctgtcatctgcttctgaaatcttgtcctaaggacataatttaaagtttaggaaactactttctgcacaaaaaatgtcctcagtgctatttagtaatagtgaaaacctggaaatgacccaaatgtatagcaacagaggtgagacgtccactccagtctcaccccatcacagcagtgtctacggggactatatgatgtgacaaatgcctctgctattattagtgaacaaaaagagaacaccaagttgaatatatgatcccagctgtttcaggaaaaggacccccaaaccctgtgtatagaaaaagattataaagggctgggcacggtggcccacacctttaatcccagcactttgggaggccgaggcgtgtggatcatgaggtcaagagatggagaccatcctggccaaccaacatagtaaaaccccgtctctactaaaaatacaaaaattagctgggcatagtggcacacgcctatagctactcaggaggctgaggcagaagaatcgcttgaaccggggaggtggaggttgcagtgagccgagatcgagccactgcactccagcccaggcaacagagcaagactctgtctcaaaaaacaaacaaacaaac

SEQ ID NO: 1761 - DNA, 2907 bp, Homo sapiens
agacggctccggacgggaccgcgagcacaggccgctccgcgggcgcttcggatcctcgcgggaccccaccctctcccagcctgcccagcccgctgcagccgccagcgcgccccgtcggcagctctccatctgcacgtctctccgtgaaccccgtgagcggtgtgcagccaccatgttcagctggctgaagcggggtggggcacggggccagcagcccgaggccatccgcacggtgacctcggccctcaaggagctgatgcgcgtctacggcgcgctcatgtgggcgctgggcaaggtggtgggcacgcccgaggtgctgcgcgtctacatcggctccttctggtcccagcccctcctcgtgcccgacaaccggcgcctcttcgagctggaggagcaggacctcttccgcgacatccagggcctgccccggcacgcagccttgcgcaagctcaacgacctggtgaagagggcccggctggtgcgagttcacgcttacatcatcagctacctgaagaaggagatgccctctgtgtttgggaaggagaacaagaagaagcagctgatcctcaaactgcccgtcatctttgcgaagattcagctggaacatcacatctcccctggggactttcctgattgccagaaaatgcaggagctgctgatggcgcacgacttcaccaagtttcactcgctgaagccgaagctgctggaggcactggacgagatgctgacgcacgacatcgccaagctcatgcccctgctgcggcaggaggagctggagagcaccgaggtgggcgtgcaggggggcgcttttgagggcacccacatgggcccgtttgtggagcggggacctgacgaggccatggaggacggcgaggagggctcggacggcgaggccgagtgggtggtgaccaaggacaagtccaaatacgacgagatcttctacaacctggcgcctgccgacggcaagctgagcggctccaaggccaagacctggatggtggggaccaagctccccaactcagtgctggggcgcatctggaagctcagcgatgtggaccgcgacggcatgctggatgatgaggagttcgcgctggccagccacctcatcgaggccaagctggaaggccacgggctgcccgccaacctgccccgtcgcctggtgccaccctccaagcgacgccacaagggctccgccgagtgagccgggcccccctcccatggccctgctgtggctccccagctccagtcggctgcacgcacacccctgctccggctcacacacgccctgcctgccctccctgcccagctgtaaggaccgggggtctccctcctcactaccgccagacaccccggtggaagcatttagaggggaccacgggagggacaaggcttctctgtccgcccttcacacctccagcctcacgttcacttaggcacatcacacacacactggcacacgcaggcatccatccatccgtcattcattcaaatatttattgagcacctactatgtgcccagccctgttctaggcactgggcattaccatagagaacaaaatagacaaatacatctgccctcatggaaggcgacgttcccaggagagggcacctacacagtcacgcaaacacacactaattcctggcagggcccccagcccctcccctggctgagcagccctgtagctgaaatgactagcagataaacagacccccttctgctccgcttcctcctgcccagccaggcaacaccctcaaccggctccatcacatcctcaggtctcgggaccatggggggctcagaggggagacacacctactgcttcctcagatgggcccctccgcagccccttcccttgctcggggaaagcccccaattctgcccacacccatttatttccttccttccttccttcttttctttccttccttccttcttttttgtttttgcccccaattctgcccatacccatttctttctttccttccttccttcttttttgtttttgcccccagttctgtccacaccccttccctttcctgtcctgtcctttctttctttcttttttgatagaatcttgctctgtcgcccaggctggagtgcagtggtgagatctcagctcactgcaacctccacctcctgggttgaagtgattctcgtgcctcagcctcctgagtagctgggactgcaggcacgcgccaccacgcccagctaatttttgtatttgagtagagacggggtttcaccatgttggccaggctggtctcgaactccgcatctcaggtgatctgctcgcctcggcctcccaaagtgatgggattacaggcatgagccaccgtgcccggcttcacacccatttctttaaaaaggatcccgtagcaggcagaaaagccccttccatcctgctcctctgatactgtgcccccttggagatatttccgtcctccacccacgtgtctgtggctggaactgcccagcctgctcctggccccctggaagcctccccacagctggtaatctggacttaaggattgctgggccaccgcctctctgcctaccaccattccatatttaagtggagcccctacgtagaaaggccccggggctttattttagtctccttttcagggatgtcgtgggcgggggagggggttcttggtgctacagccctctccccacccctaaagggacgccgacgctgtttgctgccttcaccacatattagtgcttgaccctggcaggggaccccatggaaaagatggggaagagcaaaatacatggagacgacgcaccctccaggatgctcgctgggattcccacgcccaccactgtcccccaccccatggctgggaggggcctctgaacggaacagtgtccccacagagcgaataaagccaaggcttcttccc

SEQ ID NO: 1762 - DNA, 3392 bp, Homo sapiens
tttggagcaaattgacatgctgttttttggtggttctgctgtgtctgggataacctcggctgtttacagtgtggcccggagcgtcttggctgccgccctgctccacgcagtctgcttcagtgcagtggaggaaccgtggagcatgcaacacatcccggcactgttttcggccttctgtggcctcttggtcgccctttcttaccatctgagccgtcagagcagtgacccatctgtactcatgtccttcatccaatgcaggctgtttcctaaatttttacatcaaaatctggcagagtcagctgctgaccctctccccaagaagatgaaagattcagtgacggatgtcttaaaatgggatctcatcgtctgcgcagtggttgctgtcctctcatttgcagtcagcgccagcactgtattcctgtcattgcgaccatttctcagcatcgtgctgtttgccttggctggagccgtggggtttgtaacacattacgtgctccctcagctccgcaagcatcatccctggatgtggatttcacaccccattctcaaaaacaaagagtatcatcaacgggaagtgagagatgttgcccatttaatgtggttcgaaagactctatgtttggcttcagtgttttgaaaaatacatcttgtacccagcgctaattttgaatgccctcactattgatgcatttttaataagcaatcaccggagacttggtacccactgggacatttttctgatgatcattgctggcatgaagctgttgcggacatcattctgcaacccggtttaccagtttattaacttgagcttcactgtcatctttttccactttgactacaaagatatttcagagagcttcttactggatttcttcatggtgtccattttatttagcaagctcggggacctgcttcacaagttacagttcgtcctgacatatgtggctccttggcagatggcttggggttcttcgtttcacgtgtttgctcagctctttgccattcctcattctgccatgcttttctttcagacgattgccacatcaatcttttctaccccattgagcccatttcttgggagtgtcattttcatcacatcatatgtcaggccagtgaaattctgggagaaaaactacaatacaaggcgagtggataattccaacacaagactggcagtccaaattgaaagagatccagggaatgatgacaacaatctcaattccattttttatgaacacttgacaaggaccctccaggagtccctctgtggagacttagttcttggacgttggggcaactacagctctggcgattgctttattttggcttcagatgacctcaatgcctttgttcacctgattgaaattggaaatggtcttgtcacctttcaacttcgaggactggaattccgagagtataatatactatatggtaacgtctcccaaactcctctcctggatcaaaaatgaatcacttctgaagtccctgcagccctttgccaagtggcattacattgagcgtgaccttgcaatgttcaacattaacattgacgatgactacgtcccgtgtctccaggggatcacacgagctagcttctgcaatgtttatgtagaatggattcaacactgtgcacggaaaagacaagagccttcaacgaccctggacagtgacgaggactctcccttggtgactctgtccttcgccctgtgcaccctggggaggagagctctgggaacagccgctcacaatatggccatcagcctggattctttcctgtatggcctccatgtcctcttcaaaggtgacttcagaataacagcacgtgacgagtgggtatttgctgacatggacctactgcataaagttgtagctccagctatcaggatgtccctgaaacttcaccaggaccagttcacttgccctgacgagtatgaagacccagcagtcctctacgaggccatccagtccttcgagaagaaggtggtcatctgccacgagggcgacccggcctggcggggcgcagtgctgtccaacaaggaagagctgctcaccctgcggcacgtggtggacgagggtgccgacgagtacaaggtcatcgtgctccacagaagcttcctgagcttcaaggtgatcaaggttaacaaagaatgcgtccgaggactttgggccgggcagcagcaggagcttatatttcttcgcaaccgcaatccggagcgcggcagtatccagaacaataagcaggtcctgcggaacttgattaactcctcctgcgatcagcccctggggtaccccatgtatgtctccccactaaccacatcctacctagggacgcacaggcagctgaagaacatctggggtggacccatcactttggacagaattaggacctggttctggaccaagtgggtaaggatgcggaaggattgcaatgcccgccagcacagtggcggcaacattgaagacgtggacggaggaggggccccgacgacaggtggcaacaatgccccgagtggtggcagccaggagagcagcgcagaacagcccagaaaaggcggtgctcagcacggggtgtcatcctgtgaagggacacagagaacaggcaggaggaaaggcaggagccagtccgtgcaggcacactcagcgctaagccaaaggccgcccatgctgagctcatctggccccatcttagagagccgccaaacattcctccagacgtcctcctcagtgcacgagctggcccagaggctctcgggcagccggctctccttgcacgcctcggccacgtccctgcactctcagcccccgcccgtcaccaccaccggccacctgagtgtccgtgagcgggccgaggcgctcatcaggtccagcctgggctcctccaccagctccaccctgagcttcctcttcggcaagaggagcttttccagcgcgctcgtcatttccggactctctgctgcggaggggggcaataccagtgacacccagtcatccagcagcgtcaacatcgtgatgggcccctcagccagggctgccagccaggccactcggcacctctccgagccatgtgagccccctgatgccaccgagcaggggcagcttcatgaccgatgtctggctgaggctgtggcggacactctcggggttgtctgcaggagagcaagccaggaggacatgggcctggacgacacggcctcgcagcaaagtgtgtcagacgagcagtgacgggcgtgcggccgggcggggaggctggctcccccacacctcccacctgcattgctctccctcgtgctccccaaatcaccacaaccaaccaataccgcgatccatgagggactcctcctgtggaaaaggagagctgttccagaacacagaactgatctcaggtttttg

SEQ ID NO: 1763 - DNA, 2624 bp, Homo sapiens
aagcggaatgaaaccttcaaggctgcggcccaggggcctgagggagacatccaggagcaggaggtaaatgaagcctttttcatcccttgctggagccaccaacccaaatagagcttgttccctctctgttctgcctataccagctcagagggagagggagtgtcatctgccaggagagactgaagggaccaggggaagccttcccagcgcatcccccgactcagggcctgagcattcccctttagcaaaacttcctttgagagcctgtctgcacagctgtcttggggaagtgtttcacgtctctgcagctccagctgcagggggcagtagggttttgggtttgaaagtatctgagaaatacaaagtctcagggaagatggaaggtgagtgaggtgggggctggggaggatatctgtggtttgagttcagatttgagctgaactctggcttgctgagtgactgctgagtcatttgacctctctgggcctcagtttcctcacttatacaataggaataatggtaactaacctatcataaggtctcgatcaggtcagtcagcttgctgtagaagccccagggaagcccaacacaaagaatccctgctacagcaggtgggcacagggccccaggccctgggaggatgggcggaagaaggtcaccaagggcccattcctgcccaactccccttaacccacagctgcagtctgaggagctgggcctccgggcaccgcagtgggtccgggacaagatggtgaccatgtgcatgcgctgccaggagcccttcaacgctctgacgcgccgtcgccaccactgccgggcctgcggctatgtggtgtgtgccaggtgctccgactaccgggccgaactgaaatacgacgacaacaggcccaaccgagtctgcctccactgctacgcattcctcactggaaatgtgctgcctgaggccaaggaggacaagaggcggggcatcctggagaaagggtcctcagccacgcctgaccagagcctgatgtgcagcttcctgcagctcatcggggacaagtggggcaagagcggcccccggggctggtgtgtgatccctcgggatgaccccctcgtgctctatgtctatgctgcccctcaggtaaggccaccacctgcccgccccccgtcaggccctggccttcccacagcgtgtgtgtgaagggggtcaggggtgagtattgctagctccatatgtcagatagggaaactgaggcccaatgaggatatggtatcctggagtctcaaggttggtaggtttcagaattgtgccctgactctaggtcaccactgctttgccctcagaggcagccagttcttctgtcctcttcctcgatggccttcaccagcccacccccaacccatgggggtttagggtgtgagctgtgcgtgcgtggctgttgccttcacgatggctatctggggcagtaggactgagaggggacagtggcccactgctctctcctccccccaggacatgagggctcacacctccatccccctgctgggctaccaggtgactgttgggccccagggggaccctcgggtcttccagctacagcagtcaggccagctctacaccttcaaggccgagacggaggagctgaagggccgctgggtgaaggccatggagcgggcggccagtggctggagccccagctggcccaacgatggggacctgtccgactgagccactgccagccgctctcctgcccacctctccccaccctgaacccagctcctgccacagactgaccctgtggcctcagtgacccactgccccaagtggtgctttcagagaattgattcagccatctgcgcccaggccacgtgtcccgatctgggattagaaaatatgggtccattcctttctagaaaggggacaaccaagtgtctcagtttgccttgcggggagggggctcctgggccatgggacttccagtgctaaaactgggaaagccccaggtaaccccggactggtggtcaccatagtatggtttttcatttgtatctcctggggagcttttaaagagtactggtgaaaaacacatagtaaattaattttaaaaatgtaaaaaacaatgcctgtactgaagtaccaccaccgatttaaatgggctgagttgggggaggcatggggtcttttttttttttttttttttttttgagacagagtcttactctgtttcccaggctggagtgcacaaacatggctcactacagcctcgctctcccgggctccagtgatcctcccgcctcagcctcccaagtagctgggattataggtgtgtgccactgtgccaagctaatttttttattttttgtagagatgggatttcaccatgttactcaggctggtctcaaactcccagcctcaagcgatgctcccacctccacctcccaaagtgctgggattacaggcgtgagccaccatacctggcgcatgcatattttttaagagtacccactggagtctaatatatagcctgggttacctgggatgaagaataaagagagcaaactaccacaagcaatggttgagcccctgtcaagtgccagtcatgatagtagtaataataataataaacatctattgggccagg

SEQ ID NO: 1764 - DNA, 3248 bp, Homo sapiens
ctactatggggcagacaaccagtctgagtgtgagtacacagactggaaatcctcgggggccctcatccctgccatctacatgttggtcttcctcctgggcaccacgggcaacggtctggtgctctggaccgtgtttcggagcagccgggagaagaggcgctcagctgatatcttcattgctagcctggcggtggctgacctgaccttcgtggtgacgctgcccctgtgggctacctacacgtaccgggactatgactggccctttgggaccttcttctgcaagctcagcagctacctcatcttcgtcaacatgtacgccatgcctgtcatggtgttacgcaccaccggggacttggagaacaccactaaggtgcagtgctacatggactactccatggtggccactgtgagctcagagtgggcctgggaggtgggccttggggtctcgtccaccaccgtgggctttgtggtgcccttcaccatcatgctgacctgttacttcttcatcgcccaaaccatcgctggccacttccgcaaggaacgcatcgagggcctgcggaagcggcgccggctgctcagcatcatcgtggtgctggtggtgacctttgccctgtgctggatgccctaccacctggtggagacgctgtacatgctgggcagcctgctgcactggccctgtgactttgacctcttcctcatgaacatcttcccctactgcacctgcatcagctacgtcaacagctgcctcaaccccttcctctatgcctttttcgacccccgcttccgccaggcctgcacctccatgctctgctgtggccagagcaggtgcgcaggcacctcccacagcagcagtggggagaagtcagccagctactcttcggggcacagccaggggcccggccccaacatgggcaagggtggagaacagatgcacgagaaatccatcccctacagccaggagacccttgtggttgactagggctgggagcagagagaagcctggcgccctcggccctccccggcctttgcccttgctttctgaaaatcaggtagtgtggctactccttgtcctatgcacatcctttaactgtcccctgattctgccccgccctgtcctcctctactgctttattctttctcagaggtttgtggtttaggggaaagagactgggctctacagacctgaccctgcacaagccatttaatctcactcagcctcagtttctccattggtatgaaatgggggaaagtcatattgatcctaaaatgttgaagcctgagtctggacgcagtaaaagcttgtttccctctgctgctttcttagatctgcaatcgtctttcctcccttctttccttgtagtttttcccccaccactctctgcagctgccgctccttatccctgccttctggcaccaatcccctcctacagctcgtccccctccctccatccatccttctcccctgtctactttcttgttctgaagggctactaagggttaaggatcccaaagcttgcagagactgaccctgtttaagctttctatcctgttttctgagtgtgaggcagggaatgggctggggccgggggtgggctgtgtgtcagcagataattagtgctccagcccttagatctgggagctccagagcttgccctaaaattggatcacttccctgtcattttgggcattggggctagtgtgattcctgcagttcccccatggcaccatgacactgactagatatgctttctccaaattgtccgcagaccctttcatccttcccctattttctatgagaattggaaggcagcagggctgatgaatggatgtactccttggtttcattatgtgagtggggagttgggaagggcaactagagagagaggatggaggggtgtctgcatttagtccagacactgcttggctcgctccccgagtcctcctgtttctgacttcctgcataactgtgagctgaagggtttcctcatctccccatcttaccccatcatactgatttctttcttgggcactggtgctacttggtgccaagaatcatgttgtttgggatggagatgcctgcctcttgtctgtgtgtgttgtacttatatgtctatatggatgagcctggcatgaacagcagtgtgcctgggtcatttggacaaatctcctcccaccccccaatccactgcaactctgctgttcacacattacccttggcagggggtggtggggggcagggacacactgaggcaatgaaaaatgtagaataaaaatgagtccaccccctactggatttgggggctccaacggctggtccgtgctttaggagcgaagttaatgtttgcaccaggcttcctgtagggagatccctccccaaagcagctggcgccaaggcttgggggcatcctactgagctgggttcctgctccttcttgggctccatgaaggaagcaagaggctagttgagagcctcccttggcccctttccggtgcctccccgcctggcttcaaatttatgagcattgccctcatcgtcctttcttgttccagggtcagtggccctcttcctaaggaggcctcctgcttgccatgggccaaaaggcacggggtgggttttttctctccctaccctcaggattggacctcttggcttctgctggattggggatctgggaatagggactggagcaagtgtgcagatagcatgatgtctacactgccagagagaccgtgaggatgaaattaatagtggggcctttgtgagctagaggctgggagtgtctattccgggttttgttcttggaggactatgaaagtgaaggacaagacatgagcgatggagataagaaaagcccagcttgatgtgaatggacatcttgaccctccctggaatgacgccagctctgggggcagagggaggaggagaggggaaggggctcctcacagcctagtctccccatcttaagatagcatctttcacagagtcacctcctctgcccagagctgtcctcaaagcatccagtgaacactggaagaggcttctagaagggaagaaattgtccctctgaggccgccgtgggtgacctgcagagacttcctgcctggaactcatctgtgaactgggacagaagcagaggaggctgcctgctgtgatacccccttacctcccccagtgccttcttcagaatatctgcactgtcttctgatcctgttagtcactgtggttcatcaaataaaactgtttgtgc

SEQ ID NO: 1765 - DNA, 3972 bp, Homo sapiens
acgcacccagcgagcccaagcgccttctccgcaccaggtgggatccggggccccgggggtcttgaggacaggcctaacggcccagggctggagatgagaggtggcccgggcccgacccggctgtcacggggggcaaaggcgggccccacggactgggacgtggtagggtctgttgggcacggactgaggggtgagctggggcagcgagtttgctgggggccgacagggactctggccaggggccgggcagcaggaaggctgttctggcctctgagaagcagtggtcctgcggcaagggaaggccatcgtccaggccctgcccctttgctgaggagctggagatgccaagcccagagctccggggggggctggggagcccgggtacaagggtgctggggagagggttgcagtcgtcagttccccctggcccagtaaaggcatgtgtgtcacagatggagaaacagccctgtgggactccacgcccccacagcatctgtgtcccctccccatctcccatccctacaccctgggccaggggaaagggaccgagaccagggggcccttccgacacagccagtgctgtatgcagggacccgggccttcccctctctgggtcatctcgcctgtgggtggggaaggtctgcggagggccctgatggactcacccctagggggcaggacgaggactagtggctgggagaacctgatccctgctcttcccagccctccagctgctctagggaggagactcagatgaggtgcactgagaaggaggcatctggcctgcccagctccaggggctggaggtcatgggggcactgccctgtgctggcttcagcccagccttttctgttatggtgggaatctggacaccaggatgggggacatggcatccagtcacatccaggccaagtatcagtgctgacccctggtgtctagggcacctgaagggggaagcgatggcctcagaactaaaggccccacccatgcctgcccctcgcccctccaccagttctagaaggcgcctctggatacacagagccctttcccactccactgccacaggcccgcctgaggactggggctccctgttttgttcaagcctcgagggcaccagcagccaagtttgctctccactgacccaaacctagcccaggaatcctgtcttccaggtggcccctccccctctcatgggcactccactccccttctggggcctcttttcctagctgcaccatgggggcacccctgcctccgctcaccacttcccacaattgctggggtggacatggcggccttgtgcaagcccttaagtacagtgctcccagccacaccacagcagagagtgcagaccgggtggccatgaaggcagaggggcccagctgggctcagacccagctgtgggtggcctggccatgcctgccctagagcttcatagagtgtggtggggacagtgatggccatcacagcctctgttgggcacagtgcactgcctctctgcatgcagccttctgtgggcaccaggagtcaaagttcccgagaacactggactcagggaaggactaggcccctctaaagcacgggagaggagggggccggcatctggggacaatggcactcccaactaggtcatgggtgagaaggaattctgtctaccttcctgaaccatgcaagaaacactgagggctgggtgtgtcggtccgtgggacacgggcaaccactgtctcatgactacaggcagtgatggccctggggaccagctggggctggccgggatcccagtccagggttgatgatctcaaaggccaaggaccgagaatgacttcaacagagtcatgggaggaaggcctggaaacagctcaagttgcaaccacacagcttggggtgaacaacaggcagaggaggcttcctggaggccctgggcccgggggtttgggcagagggaagaggggccgcagtcctggaacctcagccaggcccactgccccagccgagggaaggaggcactgggtcttcaggcgcatatccccacaagctgtggcaagcattcagggaaacagtcccaggcctggtctcagtttccccatctgtacagtagaagcagcagactggccgtagttgccttcatatagtcattcatcaaacaagcatctgttagcccaactatggcctgggattggtgtaaactgggggatctatgctggcccacaagggagagagatctttaagtgtttactgtggaagcaagggtacagggaacagctccctaggagaggggggcggtctcaagaactgggctggagaagaaagagcacaggggaggaggggaccacagaggaaagcctgggagtgtccagggaactgcagaggtcagaagggtaggattgtgggtcacaagagggtcaccacgagggctgtcagagaggccaggagggactcacacagggccttgaatgccaggatgagggacccagacttgctctgaggggcggcaggaaccttcaagggcttcacaatgataggtgtaggtcagggtctgtatgggacagaagaggccggctggaggctaagaagccaggtctaagcaagggtgaagaagctggggttctcagcccaagcaagcctcacaacccgataagcagtggggagtgagaacaaggagtgggacccaggatcagtctgtgaccactcaccactggggggctggtcaagctccctgaggtggacaggcgggggtttgactgcccagagcctcctagaacctcaggcgggcagcagagggatggagtgggagagtgaggaacggcaggaatgcaggaatgctgatccagctccttcctgcagggccagggagcctggatggcagcccaggagagccctcactgactcccacgagtggacccaccttgtcacttggaaagagagagggacagtgtaaatgctattaaggattaaaggagataaagcatggtaatggttggcaccaagcccaatcctaagtgttttacccaaacagtcacagccaaaatagctgattccatgcccggcactgttccaggagctctcgggcactgagtcagttaatccctactgctgggcactcctcatgtctccagtcccagatgaagactctcgggctcagagaggtagaggaagttgttcagaatcacacagccacacttgtctgcttttgtgaagaactgggtggtgggagccccaaatccgtgggcagccttgaatgccaggccgaagtgctaaaagccagtctgggggaggcaggaagattccctggcccagagtcacagggccacccaacccccaccccttcctgcagggaagccccacccaccagaagccaagatgtccagcaagcgggccaaagccaagaccaccaagaagcggccacagcgggccacatccaatgtcttcgcaatgtttgaccagtcccagatccaggagtttaaggaggctttcaacatgattgaccagaaccgtgatggcttcattgacaaggaggacctgcacgacatgctggcctcgctgggtgagctgggacagggacaggggtgagatggatgaggccaggcaggctctgccaatcatttacagggcacctcctgtgtagtgagacgcgtggtgtccaccttagagaatagttgccattaacttagtccattcaacagggaaactgggccgggcgcggtggctcacgcctgtggtcccagcactttgggaggccaaggcgggcggatcaataggtcaggagatcgagaccatcctggctagcacggtgaaaccctgactctactaaaaataccaaaaattggccgagcgtggtggcgggcgcctgtggtcccggctacttgggaggctgaggcaggagaatggcgtgagcccggaaagcggaggttgcagtgagccgagatcgccccactgcactccagcctgggcaacagagcgagactccatctc

SEQ ID NO: 1766 - DNA, 2848 bp, Homo sapiens
attctcccatctactacctatctattcttcaggccatccactcatccattcttctgtcccaggtacctagacacttgtcttcccatccgtttgttagttgatccactcctcattcagccctcccatgggcctggcatgtagccgagcaccctggagagggcagactaagaagacatggtccgtccctgcctgtgaggagttcaggtctctgaggaggaggaagcagtgaaactgggctttacacatggcctgagaacagcttaggcctgaacataaggaacagcttggagtggaggggacacagaggaaccctcactatcatgcatgccaacccaaccactgcctgccctttcccttctggatttagctcgtgtctccaggctcctagtcctgtaatccagggacccatcagcgagggattcagggaagcagaggcagctctccaggaaggaggaaaatccctgcctcttccagagagactcccccattgctgtctcttgtgtgtgtcatgcacaaggaaggcttggttgtgtgccaggataaggggcacaagggcctcgggtgtggccagagaccccatgcttaagcttttatggtataggtcaggctgcaggggtttgagggcctcagttgtatatcagaatcttcagagcactgcgatgttcaggggtgagtcaggtctgtatatgtgcacggggtcttctgaagggtcagtttctgtaatcactttcaggtgtgtcagggccttgtgcagtaacagtgcacacagaagttagtgtttctgtgggctaagggttgtagctctgtatcaggattctgggagtgggtctggatttctggtgtgtggacttaagaagctgtgtcagacttgggggaggggcgttcatgtataactgggttcacataggccaagactcccaggtgcattttaggcagagcctcaggtgtgttagaggtcccaggggcagagaggctataggtgctgtcagaggccttggggacatttagggcagagcctcgagtgacaggtcctgggacagtgggagccaagggcaagtgctagagttgcagtgaatttagagcaaagtctcagctaagtgacacatcccagggcagtaggggatctatctaggttcgtgctgggcctcaggtaagtgacaggccttaggacaatgggggctgtggcatgcgtcaggttacctgccttgatatgggatcgtgacaggcccctccctatgtgcaggagacaagcagcccaagaaacaggagaaaaacccagtgttggtgtccccagagtttgtggatgaagctctgtgtgcgtgcgaggagtaccttagcaacttggcccacatggacatcgacaaggacctggaggccccgctgtacctcacccccgagggctggtccctcttcctccagcgctactaccaagtggtccacgaaggggcagaactcaggcacctcgacactcaggtccagcgctgtgaggacatcctgcagcagctgcaggccgtggtaccccagatagacatggaaggggatcgcaacatctggatcgtgaagccaggagccaagtcccgtggacgaggcattatgtgcatggaccacctggaggagatgctgaagctggtgaacggcaaccccgtggtgatgaaggacggcaagtgggtggtgcagaagtatattgagcggcccctcctcatctttggcaccaagtttgacctcagacagtggttcctggtaactgactggaacccacttaccgtgtggttctaccgcgacagctatatccgcttttccacgcagcccttctccctgaagaacctggacaactcagtgcacctgtgcaacaactccatccagaagcacctggagaactcatgccatcggcatccactgcttccgccagacaacatgtggtctagccagaggttccaggcccacctgcaggagatgggtgccccaaatgcttggtccaccatcatcgtgcctggcatgaaggatgctgtgatccacgcacttcagacctcccaggacaccgtgcaatgtcggaaggccagctttgagctctatggcgctgacttcgtgttcggggtggacttccagccctggctgattgagatcaacgccagccccacgatggcaccctccacagcagtcactgcccggctctgtgctggcgtgcaagctgacaccctgcgcgtggtcattgaccggaggctggaccgcaactgtgacacaggagcctttgagctcatctataagcagggcccagctcctaacatgcaggtgtcaccagagagaaatgcaccactgtgcccagcaccatagctctggctcagagagtttgcctgagaaagcagcagacagaaaacagaaggtgcgagttgctcccgaaggaactgacttcatgtgcaacagagctcggagaagtccaaggctaagcacactctccagaacagtggaggttgtgctgaaaggcaactgggaggcgacggagagcctgggaggtgcgggctacactggaggccagcaagtctgccagagagaaacagaaaaaaagacaggtgggaagagctctcctggggtcagaacaaagcttaatatcttctttgacaaagaacgtaacatcaaaatagccaactatgggtttagttcaacatttgcaaagagagacaacactgaaaagggaacgtttgatgggactctcccttatgcaggcccagaactcttcttgggccatgggtaccaatgccctgccatcaacgtttggagccttggcatcatcgtatgcaaaatggtggctggggccctgccattttatgagcagaactgtaaggatatactg

SEQ ID NO: 1767 - DNA, 2585 bp, Homo sapiens
gtgttagtcataactcaagaaagtgttgtttgtttgtttgtttgtttgtttaagaaacctaaggggaaaatatcccctatctttgtttctttgacatacattcttaggccgcatattagtcagggtccttcagaggagcaggaccagtagggagcgtgcggagatgttggcatagacacaggcacacctcaggttgttttgtgctttgctttaatgtgctttgaagacattgccttttttacacgagttttgtggcaaccctatgtcaagcaagtctctcggtgccatttgtccaacaacgtatgctcacactctgtatttgtgtcacattttggtgattctcaaatatttcatgcattttgttattgtatttgttacggtgatatgtagttagtgatgtctgatgttaccattataattgttttgaggaacaatgaactgcacacatacaagatgccaaacataataaacgtgtgttctaactgctccaccaactgtccattcccccatgtgtctccctctcctcaggcctgcctgagacacaacaatatcgaaattagaccagttaataactctacagtggcccctaaatgttcaagtggaagagtcacatgtctctcactttaaatcaaaagccagaagcttagtgaggaaggcatgccaaaagtggatataggccgaaagctaagcgcctctcgcaccgaacagttagctaaattgtaaatgcaaaggaaataaaagtgctaccccactaaacacacaaatagtaagaaggcaaaacagcctttgctgagacagagaaagtttgagtggtctggatagaagatcaaaccagccacaaccttgccttaagccaaagcccaacccagaacaaggctccatctctctccagttctataaaggctgagagagatgaggaagctgcagaagaaaagttgcaaactagcaaactagttgattcatgaagtttaaggaaagctaatcctgtaaaataaaagggttaggggctaatgcagctggtggctttaagttgaacccagtcgcatttatttacccttctgaaaatcctggggtccttaagaaccatgctaattatcatcacaccttatataccaaaaggttaattcagttaagaaacatgaagccggttttgctgcactgagtattattttactgaatttgatggcagtttttacaactcttcatccccctggaatgcctgctgtggtagaggcatctactctgcctgtgctctagaaatggaacaacaaagcctggctgacagcacatctgtacaccatgtatttacaacacggtttactgagtattttaaggccagtgtcaacacgtactgctcagaaaacaaaaattctttcaaaatattactgttctttgaaaatgcacctggtcacccaagagctccgatggagatgtgcaaggagattcgtgttgttttcttgcctgctaagacaatatccatgctacagcccacggatcaaggagtaatttggactttcaagtcttatttaagaaatacattttgggctgggcatggtggctgacacccatcatcccagcactttgggaagccaaggcgggtggatcacctgaggtcaggagttcgagaccagcctgacaagtatggtgaaacccaggctctattaaaaatacaaaaattcgctgggcatggtggcatgtgtctgtggtcccagctacttgggaggctgagacaggagaattgcttgaaccctggaggcggaggttgcatagagcctagatcatgccactgcactccagcctgggcagcagagcgagactctgtctcaaaaaaaggaaaagaaatacataaatacattttgtaatgccatagctaccataggcagtgatgcctccagtggatctgggcaaagtaaattgaaaaccttgtggagaggattcaccattccagatgtcatgaagaacactcatgaatcatgggagaaggtcagaatgttaacattaattaacagtggtttggaagaagttgatttcaaccctcatggatgactttgaaggttttaagacttcagtgaaggaaataactcagatgtggcagaaacagcaagaaaaataggatcagaaatggagcctgaaaatgtggctgaagagctgcaatctcctcatcaaacttgaacagatgtggagctgcttcttaggggtgcgcagagaaagtggtctcttgagatggaatctactcctggtgaaaaggctatgaacactgttggaatattggcaaagaatttagaatattacataaacttagttgacagtgcaacagcagggtttgaaaggattgattccaatttccaaagaagttctactctgggtataatgctatcagtgtcacatgctgcagggaagtcttttgtaacaaggggagtggtggcaaatttcttgttgtcttactttaagaaattgccccagccaggccaggcgtagtggctcatgcctgtaatcccagaacgtttggaggctgaggcgggtggatcataaggtcagagttcacaaccagcctggccaacatagtgaaaccccgtctctactag

SEQ ID NO: 1768 - DNA, 3017 bp, Homo sapiens
cttgtgatagggagacaggagtcctaggaaggaaatggaactggtgatagggagacaagagtcctaggaaggaaatggaacttgtgatagggagacaagagtcctaggaaatggaaggagagcacgtttcactctgtccagcagagggcagcagctacccacaaatcaacagctgagcaaggccagggctgtgtgggagctatgcacaggttctgcctccagaagccttcagtgcctgcctctgagccagagggttccaagcagaagaggtcccgcccccggagagggacctcagagaggtcctccaagcccctctcagctcttacttacggcatcccagatgccctattcctcttctgcagagagaaggtggttcagccactaaatggtgctgggacctcgcagtttggtgggaaggaggaagcttactcaagcaaggaatatgagacaggcaaaaacccacgcataagccaaaagcccctccaaagcgaggtgttgttccaggctgacaagtgtccagcagggtggacttcagactccctgttaggaactgaattgtgtcccccaaaaagagaaagtcaccccggggtatgacctaattcaggaaaggtcattgcagatgcatttaattaaatgaagatgagctcatgctggagtagggtggactctgaacccagtgggacaagcgtccttattaagaagagggaaatctggacacacacagagcagagaccgccgtgtgaagatggaggcagagatcggagagatgctgccacacgccacaaatgcctggggctcccagaaactacacggagcctcccccagcggcttcagcaggagcatggctcggccaacactttgatcttggtcttccagcctccagaacggtgagtcgttttcctaaaattcccttttccactggggtgtggtgcaagatgaggcacattttccatggatggtgaacagagggaggagccttttgatcacaaccaggtcaccccacttctaagccactgtgcctccagccccacaagactaaggagagagagcgcagcgtggtggagagtgagctgtgctgggaccattgtttccgtaacctcgttttctgtgtccagctgacacaccttcaaagtggcatcaggtcctaaactgtagcttgcaatgtgcctgtttccagaaaccaaggtgaaagtgctttagagtcccttcccagcttttttctggaaatgcatgtttctctgaactctgagtcccaagaaaaatcacttgagacaccaagaaaatgggggaagtgctaaaattgtgtgggaattcaagcttaacaataaacatcaagacatttttgataaaaatgaatccactgacatcggggaggagcaagagaacagcacgctgacactgggtcagaggctaagaccgacatttctgggaaccactcccggaagggcacagaggagacgctttcagcctctcatcagccagcctggcctgtagctgctgcacgttatgagtgtgttcctggcatgactgcttctaacagtgagttttctggcaaatcaaataaatactaataagtctgtatgcacattatactttatacaaatcctatgagtgatgttccagaaataacaagttttgaaggcaaaataagtccttaaattggcaattttgacacataattccatgtagtagttaatcttgctagaagatcccaatgttgttattctaatacaatctgataatgttcactggcattttccactgttggcatctttactatagcctacagttgtttgtttgtttatttgagatggagtcttgctctgttgcctaggctggagtgcagtggcgtgatcttggctcactgcaacctccccctcccgggttcaagcagttctcctgcctcggcctccctggaagctgggattacaggcacgtgctgccacgcccggctgatttttgtatttttggtagagacgtggtttcatcatgttggccgggctggtcttgaactcctgacctcgggtgatcagcctgtctcggcctcccacacacagtgctggggttacaggtgtgagccacgattcctggctgcctacagttctttgtaaagcagacaaaatagtttcattttttaaagaaatgaacatatatgaggcaacctgtacctaacttaggagttcagaaattccctggactgcctatacattttggtttctcattcctaattcccaaagattaaaatctgtcaggaatttggaaacattgaatcacaggccaaaataggaccatgtctccattcattcattcattcaacaattatttattgagcgcatgctatttttcaggcactgtgccacatattgagaatagagtagtgagtaagacaaagtcatcactttagggagtttatattttagaggagagaaagacaaatgaaagtgtttaggctgggcatggtggctcacacctgtaatcccagcactttgggaggtcagggcaggtggatcgcctgggctcgggagttcaggaccagcctgggcaacaatcccatctctaacaaaaacataaaaagttggccgggtgtggtagcacgtgcctgtggtctcagcaacttgggaggctgaggtggagggatctcttgggcctgggaggcagaggttgcagtgagctgaggttgtgacactggacttcaacctgagtgacagatcccatctcaaaaacaaccctgggccgggtgtggtggctcacacctgtaatcccggcactttgggaggccgaggcaggaagatcttgaggtcaggagattgagaccatcctggctaacatggtgaaaccccgtctctgctaaaaatacaaaaaattagctgggcatggtggcggttgcctatggtcccaactgctcgggaggctgaggctggagaattgcttgagcccgggaggcggaggtggcagtgagccgagattgcaccgctgcactccagcctgggcaacggagtgagactccatctcaaaag

SEQ ID NO: 1769 - DNA, 2630 bp, Homo sapiens
attgcttagaggcggctacctggagccggaagcgcggctgcagcagggcgaggctccaggtggggtcggttccgcatccagcctagcgtgtccacgatgcggctgggctccgggactttcgctacctgttgcgtagcgatcgaggtgctagggatcgcggtcttccttcggggattcttcccggctcccgttcgttcctctgccagagcggaacacggagcggagcccccagcgcccgaaccctcggctggtacggacccctccccggcgtctccgctcccctgaccccacatcccctagaagacctttttttctgagcctcgctgctcggatttcttctcggcgctccccggtggtctcttccattatggtccccacctcagaaattttttttaaccgctccagcgtctcttttctgtattcttacaactttgtggcaaccacctctactggccccacttcgaccttccttcctgatcaccacaaagagccagttctaactggaccacgctgccaccacctctcttcagtaaagttgttattgttctgatagatgccttgagagatgattttgtgtttgggtcaaagggtgtgaaatttatgccctacacaacttaccttgtggaaaaaggagcatctcacagttttgtggctgaagcaaagccacctacagttactatgcctcgaatcaaggcattgatgacggggagccttcctggctttgtcgacgtcatcaggaacctcaattctcctgcactgctggaagacagtgtgataagacaagcaaaagcagctggaaaaagaatagtcttttatggagatgaaacctgggttaaattattcccaaagcattttgtggaatatgatggaacaacctcatttttcgtgtcagattacacagaggtggataataatgtcacgaggcatttggataaagtattaaaaagaggagattgggacatattaatcctccactacctggggctggaccacattggccacatttcagggcccaacagccccctgattgggcagaagctgagcgagatggacagcgtgctgatgaagatccacacctcactgcagtcgaaggagagagagacgcctttacccaatttgctggttctttgtggtgaccatggcatgtctgaaacaggaagtcacggggcctcctccaccgaggaggtgaatacacctctgattttaatcagttctgcgtttgaaaggaaacccggtgatatccgacatccaaagcacgtccaacagacggatgtggctgcgacactggcgatagcacttggcttaccgattccaaaagacagtgtagggagcctcctattcccagttgtggaaggaagaccaatgagagagcagttgagatttttacatttgaatacagtgcagcttagtaaactgttgcaagagaatgtgccgtcatatgaaaaaggttctcaccctgctcctgctcagcgtcccacaggcactgcgcagaaaggctgagctggaagtcccactgtcatctcctgggttttctctgctcttttatttggtgatcctggttctttcggccgttcacgtcattgtgtgcacctcagctgaaagttcgtgctacttctgtggcctctcgtggctggcggcaggtggggtgatggtgctggcctcggcgctgctgtgtgtgattgtgtctgttctgaccaacgtgctcgtgggtggaaacaccccaaggaaggtacgtacggctggttcctgggagtgtgacgtagtccttctgctcaggttgttcttgttatttcaggctgcctttcgtttaccagactctggttgaacacctggtgtgtgccacgtgctggcagtgccctggacagggggcctcagggaaggacgtggagcagccttatcccaggcctctgggtgtcccgacacaggtgttcacatctgtgctgtcaggtcagatgcctcagttcttggaaagctaggttcctgcgactgttaccaaggtgattgtaaagagctggcggtcacagaggaacaagcccccccgctgagggggtgtgtgaatcggacagcctcccagcagaggtgtgggagctgcagctgagggaagaagagacaatcggcctggacactcaggagggtcaaaaggagacttggtcgcaccactcatcctgccacccccagaatgcatcctgcctcatcaggtccagatttctttccaaggcggacgttttctgttggaattcttagtccttggcctcggacaccttcattcgttagctggggagtggtggtgaggcagtgaggaagaggcggatggtcacactcagatccgcagagcccaggatcaagggacccactgcagtggcagcaggactgttgggcccccaccccaaccctgcgcagccctcatcccctcttggcttgagccgtcagaggccctgtgctgagtgtctgaccgagacactcacagctttgtcatcagggcacaggcttcctcggagccaggatgatctgtgccacgcttgcacctcgggcccatctgggctcatgctctctctcctgctattgaattagtacctagctgcacgcagtatgtagttaccaaaagaataaacggcaataattgagtcctc

SEQ ID NO: 1770 - DNA, 2177 bp, Homo sapiens
cacaatgcctggacctcacccactccatccctagcccactcctcacccactctgcccgcctaacccactccatccctcaattcccctcaacagacccctccaaccgcagccagcgctggtcctggtctggcctttcctcctggctcccatattcagcccagcctgaggccaccatgccccacctctggagctctgcagtgcctccctggctgcaacatttagggcttacagttcttagcgtagctcttatagtcccaggtgcagagactcccattgacttgtcctaccaccctaagcaccctggcacatctgcatggctgaactctcaccctcactgggaaaggtcagcctgggggtgtccaggccagggactgaggggcagctggctaaagtggctaaagacatgtgctcacgggtgcgcctgcctgtgcagctgtctgggtggccagtcacttccttgggctaagagagagagagtgtgtgtgtgtgtgtgtgttcatgaggagagccttggttcctagggcccagggatctggatggaattaggggctggccgggggtggggggctgttgcaggaaacgtgagctgtactcgttagctcctcacgtgctcagccggatttataaacacacagagaagacgggatgtaaacaatcagtgggcagcagccagaggcagagctggggcgggggccgggctgggggccaggactggtggggagggggagagggggacctaggacacagccccagtggccggggtccacctgcacaacatgagcctgagggaggatggatgagggctccaggaagcccaccacgcactctcctcaggaggcaggcgagctgtgttgggttcccaagctcacgactaaaccgcaggtgttcaccccacgctgctttccctcctgctgcctgagacacgggcatggctttgcccagagtggaagctgtcatagcaggggcagagccctgtccttctaccccccctttcttttctcctaacctcttctccctctggattcctgagaacccttccctctttctggttctgtgggccgtcggatccttctgttctcccctgccccccacccgcagcctgcaacgacacagttacctcagaactgaaatattcctggaaacaccggcctcgtctggttaatttcatgagccgtttttttctgcccagatgacttagttcttgtctatccaaaggcttctccccctgctgtccctgtgtagggagctgatctcccctagggatgtcccacagggctcagaatgggagagggtaagttctgagctgggttcctgactgtacctcttggccatgacaaaggcagagcctagaactccggccagcatgtgggtaaagaaggaagcctagctcccagctccggcttcagttgggacccttggtctcgccactaactttgagtgaagccagactcgatgctgaaagcgacctcaaggctgggagggccgctgcccaattcagcaggtctccaatctccaaaactaatgctactctgtacccataggatcctagaggtgactgccagatccctaggcttggagttgtgttgagatgtgaggagcagggaggagaaaggaactgagtcaggcaagagctggggatagaaaggaagagtgaggaaagcagcgtccaggaggaagccacaagctcagaggggacaggaaagggtgagctggtctccccagggagcagttgagtgcctgaccctactctctgtcctaaaacacacgcgtgtacacacactcacacttgcctcaaaccaagaccctgtgacttgtggtaccccaccgccacgctcccttagtaaagccggccagtcacacatctgaaagagtccagactgaccaggtgggccactgccgaagtcctcactgacccctgtcctccataagagatgttttatacaaatggagtcttgcatccttcctagttattagccctctccaaaactgccccagcactgtgattagacctaacctagtcttcattctttcttgaatccaaatcccatcctaaccatgggcaaagcgttatacctatctaagttatttctgcctatcaaagcaacctatgtcattatagaaaaatctgagagtataaaatatgaactataggggtggtgggaagagaaggtggcagc

SEQ ID NO: 1771 - DNA, 2295 bp, Homo sapiens
agtgtgtttcagagaggctgtaccagaattaactctgctcagagttagatttgctggtcttaaagtacttttcctctttaagataaaagaagttcttctaaatcaggaatggattgaaatctaatgaaccgaaactttgggtacttcggccttcaaggggctcctttattgagaatcaatgtcttctcctaggtaattgatcaccctagacccagggacacccaattcatcgtaatcatcatgaataatcaaaaagtggtagctgtgctactgcaagagtgcaagcaagtgctggatcagctcttgttggaagcgccagatgtgtcggaagaggacaagagcgaggaccagcgctgcagagctttactccccagcgagttaaggaccctgatccaggaggcaaaggaaatgaagtggcccttcgtgcctgaaaagtggcagtacaaacaagccgtgggcccagaggacaaaacaaacctgaaggatgtgattggcgccgggttgcagcagttactggcgtccctgagggcctccatcctcgctcgggactgtgcggctgcggcggctattgtgttcttggtggaccggttcctgtatgggctcgacgtctctggaaaacttctgcaggtcgccaaaggtctccacaagttgcagccagccacgccaattgccccgcaggtggttattcgccaagcccgaatctccgtgaactcaggaaaacttttaaaagcagagtatattctgagcagtctaataagcaacaatggagcaacgggtacctggctgtacagaaatgaaagtgacaaggtcctggtgcagtcggtctgtatacagatcagagggcagattctgcaaaagctggggatgtggtacgaagcagcagagttaatatgggcctccattgtaggatatttggcacttcctcagccggataaaaagggcctctccacgtcgctaggtatactggcagacatctttgtttccatgagcaagaacgattatgaaaagtttaaaaacaatccacaaattaatttgagcctgctgaaggagtttgaccaccatttgctgtccgctgcagaagcctgcaagctggcagctgccttcagtgcctatacgccgctcttcgtgctcacagctgtggtgctcttttgttaaaatattcaaaaaaatctgaactgtggacggcccaggaaactattgtctatttgggggactacttgactgtgaagaaaaaaggcagacaaagaaatgctttttgggttcatcatcttcatcaagaagaaattctggggaggtatgttgggaaagactataaggagcagaaggggctctggcaccacttcactgatgtggagcggcagatgaccgcacagcactatgtgacagaatttaacaagagactctatgaacaaaacattcccacccagatattctacatcccatccacaatactactgattttagaggacaagacaataaagggatgtatcagtgtggagccttacatactgggagaatttgtaaaattgtcaaataacacgaaagtggtgaaaacagaatacaaagccacagaatatggcttggcctatggccatttttcttatgagttttctaatcatagagatgttgtggtcgatttacaaggttgggtaaccggtaatggaaaaggactcatctacctcacagatccccagattcactccgttgatcagaaagttttcactaccaattttggaaagagaggaattttttacttctttaataaccagcatgtggaatgtaatgaaatctgccatcgtctttctttgactagaccttcaatggagaaaccatgcacatagaatacggcacagtctggtcctttggggcttgggcagggccgtgacacaggttctggccaatgatttgcaagaggaattgatcagtatcactttaagtcctgcatttaattggcagcacaagatcctgcagagcctctttccctctgccacagttatcaagaatgggtcaggagaccgctgcttctgggcataagtcctgcaaggaaagcaacatggaaaacagccccaactcacccatgagggatgaaaagcactgttgagaaaggcatgtgttgtttaagccattgagattttagagctttttgtcactatctgtcaagactgatactactggggcttttcctattgatttgggagttctttacatattaaaaaaatgtgagcctttgtgatacgaattcaatttgttttcctgtcttttgacatttgactttgcataaaagtttatctgtgc

SEQ ID NO: 1772 - DNA, 2816 bp, Homo sapiens
ttaaattttgcgagagcatttgggcccacagtcaccgcttgctgaagcagatgggatgcctggtccaaggtcacgattattaaagtagacacacggggcactttgacccacctgtagtacatttctttcacagcaaggcagtgcaaccggtagcacatcgggctcttttagatgctgctccagccttggtccggtggatcatgcttggtttagaagctgggttgtctttctcctgcccccagtcctgtctttgcttttatagtgcatcatacaccacgtagaaccgagccaggttcctgccatgtggacgctgttcctgcctgagagtctcttagaggaaggctgggaacactgtggaaagactgggcatctctgcaggcggagctgaatggatgtgaaacccctgtgggcatgtgcttccgagttcctcagcaggcatttgtgttttttggtagaaagtttgcttttttttttttttttttttaagacaaggtctcattctgtcacccaggctagagtacagtggtgtgatcatagctcactgccgtccttgaactctcagactcacgtgagcctcctacctcagcctcctgagtagctgagactacaggcgcttgccgccacccctggctaatatttttattttttgcagagacaggggtctcactacattgcccaggctggtctcaaactcctggcctcgagcaatcctctcacagcctcccaaagtgctggtattacaggcgtgagccaccacacctaacaaaagtttgctttttatctaaaatgacccaggcattgtcactgtactgctatttttttaaaaaaattttgttgttttgttgttgttgtcgtcgttatatagatgagggcttcctgtgttgcccaggctggtttctgacgcctggcctcgcctccttatacaccaggacagcaggactgagccaccacactacccaactgcttttatctcagtgaatgaaaatgatacttgcctggaggcttcccctcatctacccccatgtttctctatttattcctcagttaagtgggcagaccaacatccacctcagcaaaaacttcttcctgacgaatcgcgccagggagcgctcagacaccttcatcaacctccgggaggtgctcaaccgcttcaagctgccgccaggagagtacattctcgtgccttccaccttcgaacccaacaaggatggggatttctgcatccgggtcttttctgaaaagaaagctgactaccaagctgtcgatgatgaaatcgaggccaatcttgaagagttcgacatcagcgaggatgacattgatgatggattcaggagactgtttgcccagttggcaggagaggatgcggagatctctgcctttgagctgcagaccatcctgagaagggttctagcaaagcgccaagatatcaagtcagatggcttcagcatcgagacatgcaaaattatggttgacatgctagattcggacgggagtggcaagctggggctgaaggagttctacattctctggacgaagattcaaaaataccaaaaaatttaccgagaaatcgacgttgacaggtctggtaccatgaattcctatgaaatgcggaaggcattagaagaagcaggtttcaagatgccctgtcaactccaccaagtcatcgttgctcggtttgcagatgaccagctcatcatcgattttgataattttgttcggtgtttggttcggctggaaacgctattcaagatatttaagcagctggatcccgagaatactggaacaatagagctcgaccttatctcttggctctgtttctcagtactttgaagttataactaatctgcctgaagacttctcatgatggaaaatcagccaaggactaagcttccatagaaatacactttgtatctggacctcaaaattatgggaacatttacttaaacggatgatcatagctgaaaataatgatactgtcaatttgagatagcagaagtttcacacatcaaagtaaaagatttgcatatcattatactaaatgcaaatgagtcgcttaacccttgacaaggtcaaagaaagctttaaatctgtaaatagtatacactttttacttttacacactttcctgttcatagcaatattaaatcaggaaaaaaaaatgcagggaggtatttaacagctgagcaaaaacattgagtcgctctcaaaggacacgaggcccttggcagggaatatttaaagcaacttcaagtttaaaatgcagctgttgattctaccaaacaacagtccaagattaccatttcccatgagccaactgggaaacatggtatatcatgaagtaatcttgtcaaggcatctggagagtccaggagagaagactcacctctgtcgcttgggttaaacaagagacaggttttgtagaatattgattggtaatagtaaatcgttctccttacaatcaagttcttgaccctattcggccttatacatctggtcttacaaagaccaaagggatcctgcgcttgatcaactgaaccagtatgccaaaaccaggcatccaatttgtaaaccaattatgataaaggacaaaataagctgtttgccacctcaaaactttatgaacttcaccaccactagtgtctgtccatggagttagaggggacatcacttagaagttcttatagaaaggacacaagtttgtttcctggctttaccttgggaaaatgctagcaacattatagaaattttgccttgttgccttatcttcttccaaatgtactgttaaataaaaataaagggttaccccatgcaatcac

SEQ ID NO: 1773 - DNA, 2285 bp, Homo sapiens
agagcccctctcgcctccgacccggcgcctcgcactccgttcactctcggttcctcttcgcattcttgccagtcccgtagcgctgggctggtttcctccgaggtctctaagagcctcctactgcgcccctcaaggacgcatcacctaatgccgcggtcacggccaccgtcacaagcgcccccagccccaccccaccccggcctgcccgccgtccttctcccgcccccgcccctgcctgccagctccaccgggccgtaggttgtgcctttttagccaagaagcatggaagtcattcacggcaggccctactgttgcagggagcttgaaggagctgacatactgtccaacaccttttactctaatgaattgcacaaccccctccagacggttactcgcccaactgcctcagaggacaggtatcaggaattaagggagtcacttcaacaatgtaggcttccttggggcgctgaaagagagtatggtgggataataccgatttcactccccgaggaccacaggccaaagtatgagcctcctcgtgtcatgggcaaaggacatcagcattatggatttggtggagaaacctggccaagaaagcttcctgttgaacaattttattatttgacccagaacaaaaaaagtgatgtctatggaaatgattctttgatacccaagccgcctaattcaacagtaggagagatctgcttgccatatccaattgaacacccctaccacacacacatctgtcgcggcaccatgttccccaccttcacgtcacctgaggacctctacacgggcattaaagcccgcacccagcagccctttcctcccacggtgccaagcaaggcttatgattcaacagttttgaagacaagaggtaatccttatagatatgaactgattgatattcccatggattcaaagaagaaagcactgacttggccaggtcaaggtgtatattatgattttcccagaggtgttgagaaaaataagccagtattctacccaaaacctcctaaaaccttcgctcctaacacttctttaaattcatgggaccctatttgctctgccaaagaagccaacatacaaagaaatcttgagaggtcccactggctcacttcgtacactcatgattttacaggtctggggcccatggacccccttgaactggatgattaccgtgaaaagatggtagcagagttaacacgaaagataggatttgacccagagccgcaagaaaaattccaccctgtcttcaaacctcccagaccgttggaaggacgaattgcccgattaattcagaaccgacgttctctggaggctatagtccagcaaagaccacgttcctgtccagattgtactcctagagttttgtgtaattttcatacctttgtacccagttctaaagaaatggtggcacttagtgataacataccagccggtgtgacccataaaaaccaggatattgaagagaagatcatagaagaacagagcttgctgtctacctatgaactcccatcttgttacccaacaaaagacctaactagcatttatgacataaagccatttccaaaaatcacagatactaaaaagacagaagatttatactggagacagcagtcactaaaaacccaacccacaccttactgtaaaccagaccactggattcactatgaaaatcttaaatctcccctacgtgatcagtataatatgtgtccagaccctgttagccttagtaaacctagtgttttacaaaataaacaagacacggaagctttcactttagaacattttttaagtaagccagaagaagagttgttcttgaatatggaaaacaatgaagaaacaagacctgttcttggttggattcctagagctggagtgaccaaacctcagaccaacctgctggagcttaagaactctttttcaaaaactggtgcacaaaagcgtttccataaatcaattctagaagaccataaagacctcagggataatgagcattcggggatgaagcaccaattctatggccataattcctattatttctataattgagatactcattcttcccttcaaaacccagcctcttgcaagaagctaaaaaatataacagaatttccttcgtattgctggattctgttttctagattaaaccacaaggaccttgttagtgaggtttacattttcaggaatttaagttagtatctggttggaggaacccagaaaaggtgatgttatgacttcttgaaaagtttaacaatttggcaataaaatattagaactag

SEQ ID NO: 1774 - DNA, 2853 bp, Homo sapiens
atagcaacccacagtcaagttaggcaaaggaattggaagagtggactaagggagttcatctgatttttagatacatgcccagaaagttagagagagatgagttttagtagtcactgagtttgtacaagtttttttgatgtgcttttgttttgtttcatttttttttaaatatctgatcatgggtattattattattttgagatggagtctcgctctgtcgccaggctggagtgcagtggcacgaccttggcttactgcaacctccacctcctgggttcaagcaattctctgcttcagcctcccaagcagctgggcctataggcacgtgccaccacacccagctaatttttgtatttttagtagaaacatggtttcaccatgttggccaggatggtctcgatttcttgacctcatgatccgcctgcctcggtctcccaaagtgctgggattacaggtgtgagccatcgcacctggctgatcatggttatatttcatagtgttattaaactttatcatttatgatgcttttggcctgttacccagtttaattctctttagaggatgtatagcctgctgcattgttcacatggtatgagggaacagatctgggaatcctccctgatgtagggacagttcgtcccaagcactgcccactttatgctttctcacaccacaggacactgactgtggtgtgaagggaccttacagcccagtcatattctgcctgcgtttggagtaatggtgatcatagccaacacaggttgggaagaaatgaatgaattcaaatgcagattgtgttaagtgtatgtgcatgtgtgtgtatgcacacatatacacatatgtgcgggtgtacctgcacagacatctatatatacatctatataccagttctgttaccccgctcatctcttcaacagtgtggcagtgaggagctctagacacaaatgatgagaaggaggtagaagtgctccagtgcccctgttagttttaattttaagacagatggatggacggatagatagatagatagatagatagatagatagataaggtatcttttatccatttattcagtatctactgaatttttgagggtctactacgcatggttcgaggttgaggatgaaataatattatggctgtggccttatcttttttttttgataaataaatttccttttccattttaaagcttttgtagataggtagcaggaagagaaacaaaggtgtgtccaggccctcagtatgtagtgtagatgaagattgtgtctagggaaacagtcaacattcattcctatcccttgttatctgtgtgatcttgggcgagtcacttaacctcttgaccacagttttttaatttgtttctggcagccagggaggtggcccatgcagatttttgttcctgaaagaacgtgccattcagctgtaaggaatgtagtgggcagacaagcctcctgctggcatgtcagcaccttcaggacaggactgttttgaagccaaagccatgctctccctgcagccccagccagtgactgagcacaaatgggtcacttctccttctctgctccctgctgcccccaaggaggctcttgctcttctacctccctctcatcatttgcatctagaggtccctactgccatactgttggggagatgcgtggggtaatagatctggtacatggcgtatggatgtatatatagatgtctgtgtatgtacatttgtacatatgtgtatatgtgtctatacatacatatgcacttaacataatctacatttgaattcactatttgtttttccacgacaaaattttcttactgagatttaagtaagatggaagtttgtccaccacatttataaggcccaaattacaaaacaataggattgcaaatggagtaaaaaccaaagtagagaaaacttattgggagtttctttggaggatgaagaaggggtgaatgagaggagagaggatgtgtagaaatgcctggtggggcttggagcagtggaagtggccacatggtagaaattctacttgtacacgtagctctgtggttaaaatcagtgaagggctgaatttgaaactttcattagtagcactaataagattttattggatttagaacatgctgagtattattgtagttttagaggacaattcatgactccatttgtcagcctggatttggggatctcaagtcagtttacgtaataggacatctctctctctctctgacttctgttccacttccttggtttccccacagatccacattctgactggttgtatgcaatggaggtcatggaatagcagccagaagtaaaacagaaaaataaccaagctcggttttattttaaactttgaatctgtgattgctgtgattaaaagaaaacgtacttgattatcttcaaagatcgttactgtaggcattacaggtcttccttccaaactggtgtttgatgaaggagacgtgccttttccaaacctgattaaatacaagggggattttgtctatgtgcagaatttaaatgattctcataccgtaaaattcccacctttcccagcttatgaggtcgtggtaacgatagtgttaatgattgcaccgtttcactcacactttcaggagaatccatgtttccagcttgcatatgatatatcacagagaagggtaagggctaagcatcttagagagtagcagaaatcataatctagatagaactggatgaatctttaatgctacagagcataccttgagttttagaactgaaactcttgaaatagaacagtttctttggctctatcctggactactaccatactgtatgggtttatatctatctatctatctttggttctc

SEQ ID NO: 1775 - DNA, 2320 bp, Homo sapiens
atgatgatatgagctgcatttttttgtatgtgtaataaatgtcttctaaaatgtttaagaggagaaagacataatttaattttgggtcagacacagtggctcaagcctgtaatctcaggactttgggaggtcaagccaggcggatcatttaagcccaggagttcaagacctgggatacataatgaaacctcttctctacaaaaaatacaaaaattaaccaggcatggtggcacagagatgaaaattcaaaaagagggctggataatgaaattggggaaatctcaaaagaacaaaactagaaaagaagataaaattataggactagtaaggaatatctgggcctatgctcccagatgttcaggaggcaaaggtgggaggatcacctgagtccagggaggttgaggctgcagtgagccctgattgcgccactgcattccagcctggatgacagagtaagaccctgtttaaaacaaaccgaaaaacccttttggtctaggattttttttttaatataaggtgatttcagttaaccaccccactcttttttactcaattgttttgtgtatttgataagtcactagctatatactgatatccttagaaataatatataataatctttttcaggttatcaagtatcattagaactaactcagcccactagctaatattttgtttttgtgttaaaaggaaagttaagggtaaagcaccaggcttaatattgaaattatttcttttttcataagtatcacaattctaggggacgaaagttttaaaatacaacccacttttgtaagtggttttatcataatacttggaatttaaactatttacctaatggatgattatggtattgtggcaaaaaaccaaaaaatctcccaaattcaagttgtctgggattggagaaatcaaatataagtggactttaggcattttcttgtctgtattaataatgttttacaccaggccctagaagtttgaactgtgctctgtgcagcctagaaagtggggactgactcatggatgaaggcaaaacagtcagggactttagacagtttcaatgacgatgaagaagatttaacaggtagtagtgcttttcttcctgagctttaataccagtgagagaagcaactagttcagagaaattttgtaagcagaatccaggaaaacttatgagtcaggattcagaacctttaaggaaagcaggtttgacctaagccaaggcactgactgaaaagaggctttaagaaagacctttcgtaagtggaaggaaggatacactggagatttagactggaaatggttttaacagtatatattaggacaagtaagacaatatatcagattcctatgtatgtattaattatacccaaagagtatttcagactagtccaaagtagctttttactttcaatagttgccagtattatattgtgcaggacaccacagggaaggggaacagaaaagacaaggaaggccctggggacactattagaaaagtaatctggatcctctgatggtagaagaaaataggcaaccaactctaaagtaatgtaaaacagtctcaactagagcatctcagagttttgttttatcagctgtctgaatcagttgaaaatgtcagttctttaccttgagctagtccagttaaggttaggattgaaaaccatcaatcttgaaattttccaggattaaattttttcttggaacccatgaggctagttttacctctgtgagtttctgagttgtaatagagatacaatattatgcaatgatattctaaattattatttgacttgaaacttctgaactactcagctttgaattatttgatttctgtgaatctgatcttcagatttatggtataagctttatatctgccatgtaagcttctttaaaacatgccaaggtagagatgtagttgtgttctatttgtctttaaaaataaatatcaatatattttctattttagggcatttgatgtagaactactgtacatagcacagttctttaaaattccaatagcagaaattgctgtcaactggacagaaattgaaggtgagtatattgtttattgtatgattgtcttgagtcagataatacagttgtttagtaaagtcagctggctttaatgttctccttgctcccttcatcaagcccttctcagctgtcttgactcaaagatccagttccaaggagaatagtacctactaataccttccatctggcttgctgccttttatattttttgtctgttcatggggccttcagtaggcctactaccttgtcgaagaaacttcaataaaacttcctacaatag

SEQ ID NO: 1776 - DNA, 3194 bp, Homo sapiens
aagagcgtgccgggagcccgagccccagccgggccgcgcttcgccgctgcgcaccccagcggagccaagccccacgctggccggacagggccgcctgtcgccgggctgctgagaactagccctagacctctgcgtgagggttcttctgccgaagacatcaccagtgtgtggagcctgccacacccacccgctgccaaaccacggcctttacctgtgtcttccggtgtttcccgtgcgacccatcctgtgggagtgcctcgtgggctgccccagagttcaccccacactcagcagcaccaatggtgaagatgacaagatcgaagactttccaggcatatctgccctcctgccaccggacctacagctgcattcactgcagagctcacttggctaatcatgatgaactaatttccaaggtacacatttccagcaggccttccttgcctaccccggggagggcgcttagtgctcctgaagttgcagaggtttacaagctctcaagaatatttgtactccatctttgtacagggagggctgacccacgtgaccgtctcactcaactgagaaaaactctgagttggagggacagagtagtcatttaatttgttattttggaaatgaggtgtcatccttgttggaggctttgggagctggcagcttgcaagccagagaagggaggggctggggattgatgggagccttgttctcagcttgcttggtttaggttggcggacgaagagtgaagagtgctccctgctcagaaggtgaattctgataaagcaggggaatgtcttgtaagaggggttccttagcaagatgagagagccaccaggaagttgtgagactgtggaattactaaaatgggtggcttttggcagggaccaaaagtggcttgttgaagagctgaccttctggcctgtgggggccgttagggcttatacatgaggtaatatggcatgacatttgatcatgatcagaagaatggaaccctgtttttcctgaggtgcttaggcagctgctttctaaagttggggctgggggattattaataagtaaataaaccaacatgccagttgtgcagttcaggaaatggatccttcagggagcgttctcaggggaactgcttccctcctggccctagattcccaggggaagagaaacaggttttactaggctgcatgacaaagagaaagagataatgggagacttttcccttacaaaagcatctttacccagaacctggacttcacgccattaaagtaaaaaaaaaaaccaacccatctttacgcagacccagacgaagttttttgttttgtttttaaatgtgttcctcatctgtttacaagacctgctggaaaaggtggctgttgctttctttgcctctggtttggtagccccagccagagaggaatgaaggatctagtcagctcttgtagaacagtcctctccagctggctgatttgacctaggaggtgaagaaagctgcccaaacaaacacatctgtagtagtgaggcttttcaaatcgggcctgaggaccgaacctcttgttctagccttactccagggtctaaggtgaccacagagcttgaagcgtacagccccttagagtcctatcctctggccagacttgtgaatctgccccactttcctttctttatggttctgctaattcctctcctttatgctgcttatgtttcagccagcctttagcttccttctcagcttcccttcgaattttggggaaccccttgagtctggaagtttgaatgtgtggaggtgtcagtgagagaagagaggagttggtctcttggacgttggaattgggtttgcaaagttgtaggggaattgtgagttgtcctttttttttttttccccccctttggaaatctccagagaaattatttgcctgtatctactggggaagccaaggcatcatttttttaatgcaaggaagcagtgccatgtatcataagaaattgaggtaccaataaggtattttagcaccctttatgtactaaaaactgcaacttgacactttatcaatgttaacttaaccttcatatgaagtctttaaggtagttgacatgagtcatactttatgcggatgaagaagctgaaactcataaaacttgtccaagatgtcaaatcagaggttcagagaagagtgattactttgagtgggtgttcaggagggattgctggaggagatggttctttgatctgggccttgtaagatgggcagaagttgagtatgtggagatggtaatggccttcagaatttatgtcttatctgtttggcctggcatacaaggcctttgacaatttggcagagtctggcttttttggtaggtctccagccagctcttcactttgtttcagccacttggaaccaagccacatcgcctgaatatgcaggtatgggtgtttcagggctctgtgccttagccaagagtgtccgttctccttcacctccctcctcctacacctccctcctctttctcctgagctctttcttatacatccttgggcatggcctatatctgctttacatctcggggtcagaacctgacccatggcaagagctcagtaaatgataaatgaatagatggaggttgagccttggagaagacaagtaatgagaaaaaaaaatactttgttggcctcatgtccttcctgtcccttttggggcagaaaggctcattcacaagtccaggccaaagtcagcacaggcttcaatttcattggctcaggccggtacacagatggggtgcattagagcttgatgatttaaagggttgggtgaaatgcctgactgtggggagagctgagggagctgtggctggcattgcacaaagcttcctttatttcactccacagccacccccggcgttaaataatctatagattcttatgcaggtctgcctaatggaaagatcattgccccagcctcctccttggaaaataggcctttcttttcatttttccctccctcttccatttaagaaagttcaaggagagaatgtctctcctgttctcctctcttgacttaatctcctatgcagtttcagaatctgcccagtgggagttaggagctgggaagcagataactggagctggatcagcagtgtaattaaatgatactttgtactggtaatagggcctttcatctgaaagcttgacattcgtttggtgc

SEQ ID NO: 1777 - DNA, 2065 bp, Homo sapiens
atgtggactggatgcccagcgtgagtgtataccgtgagggcctttgagctctcggacagcgtggagtggtcaaggaaggcctccaggaggaagaggtggccaaccgccccaggcagcacagtgctgtctctggacggagggacgggaagtggccagaaggggaagtgtgaggagttcccgtccagcctgtcatcagcctccccaggtcttgaagcggcggccctgctcctggccgtgaccatggaccctctggagacccctatcaaggatggcatcctctaccagcagcatgtcaagtttggcaaggggacaggggaggcctcctcaggatccacagatgcccagtctcccaagaggggcctggtccccatggaggaaaactccatctactcctcctggcaggaagtgggcgagtttcccgtggtggtgcagaggactgaggccgccacccgctgccagctgaaggggccggccctgctggtgctgggcccagacgccatccagctgagggaggccaagggcacccaggccctctacagctggccctaccacttcctgcgcaagttcggctccgacaagatacttctgggaaccccaggcgtcagtctcctcatctgtaaaggagagagaaccgatgacgtatcaggcataatccttgatgagagtttgctgcgtgcctactcagtgccaggcgctgggggacacagccgtgttcaggacagccttggtcctgttctccgggagccgacattccagggggagagaagtttcctgaagacttccatgctgcgttccctcctctgctcctgctcctggcgccatcctaggagccagccatgcacgcaagcgtcatgcctccagggctctgactgcccagcccctcaccgcaactccacctcagctgcacacacccttggcacatcctgaacctcattttcatgacggacacacaatttttgctctctcctgtccaagcctcatcctctggccgccacctctttccagctcacttcctttagtgcggccagtaccgcccctgcctaggcatgtcgacctgcagggacccttttctggctcttcgaggcctctgcccaccatcccctctttgttctccatagtcccttccccctgttctctctcgtttcatcttactggtctggcaaagtccccggccttgggcgagcccagacctcctcagtgcctgcacacagctgcccacagccagagaaatccatttaagcagactgcctgcatccttcttaacagtgcaaggcaggcactccctgccacaagagaccctgttccctagtagggcagcttttctcctccccagaacctcctgtctatccccacccaatgtctcctcacaggcatattggggaaacaggtcaggctctcccaccgtatctgcaagtgtactggcatccatctgtcttcttcctacccctacagtagaaacagtgtctgtccccagctgtgctctgatcccggctcctttcacctcagagcttggaaaattgagctgtccccactctctcctgcgcccattcatcctaccagcagcttttccagccacacgcaaacatgctctgtaatttcacattttaaaccttcccttgacctcacattcctcttcggccacctctgtttctctgttcctcttcacagcaaaaactgttcaaaagagttgttgattactttcatttccactttctcacccccattctcccctcaattaactctccttcatccccatgatgccattatgtggcttttattagagtcaccaaccttattctccaaaacaaaagcaacaaggactttgacttctcagcagcactcagctctggttcttgaaacacccccgttacttgctattcctcctacctcataacaatctccttcccagcctctactgctgccttctctgagttcttcccagggtcctaggctcagatgtagtgtagctcaaccctgctacacaaagaatctcctgaaagcctgtaaaaatgtccatgcatgttctgtgagtgatctaccaagaaaataaaaaattttaaaaatc

SEQ ID NO: 1778 - DNA, 3181 bp, Homo sapiens
atgtggactggatgcccagcgtgagtgtataccgtgagggcctttgagctctcggacagcgtggagtggtcaaggaaggcctccaggaggaagaggtggccaaccgccccaggcagcacagtggtgagggggccctggaggggctggcctgggggagatgcaggccagaacacacaggtccctgagtgttgggctgaggagcctgggctgcaccccaggaaggggagagacaggttggtcttgggttgtggagagtgctgcatggagccccagtggggcagtggcccctggggggatgccaaaggctggtgatgttcagtggctcgtgaggtggagaggagcaggtgaacacgagagagatttcagggagaaagaaaagcagcaagatggggtgaggcgctcaaaccaggacgccgagtgggaaagccaggagttggctagagaagggtcctgggtggaggcagggccagggagtgtcaggcccagggtgcgcagctgcccggggcgggacgggggaggggcgggaactcatgactcggggagccagactgcgatcagacgcgcgtgcccagctgaaccaggtgcgtgagaaggctgccttcaggtggccgggggctccctccaggtaggtgtgggcaccttgggcagccagaaccccagggaggaaatacatgctgcccccagcccctgagctgaagacaggctcccctccccccggcctgcagctgtctctggacggagggacgggaagtggccagaaggggaagtgtgaggagttcccgtccagcctgtcatcagtctccccaggtcttgaagcggcggccctgctcctggccgtgaccatggaccctctggagacccctatcaaggatggcatcctctaccagcagcatgtcaagtttggcaaggtggggacccctggctgccaggcagctgccaaggaccaacagtgggtggagaatgcagcctctgcccctgcctcggacagcccaggcagacctgggagacttgggaagggagtcagggtggaggatcccacccaggtatggggagtggaatggagtgcgggtgtcagcctgagacggcaggggctgagcaggctctgccagaccctgcctccgggagagatgggaaatacaggagtgggagagggtcgaaggctcaaacctcccagcagggaagagcttcacagcctctgacccatgaaatagtgccaccgagggccctaaatagggtgaggggctgagctggaggaggcctcaagggtggagcccctccctgcagcggcactgtcctgggagcaaggaggcagggggtcacctctcctcggcagcagccccacacccccgcagctcagctgcagctgctgcccaggcagataaaccgtcagtttcctttgctcgaagctatttgcatgtttccttccttaacagcttgaggcagaggcctccctcccaccccagctcttggcctgtggcccaagtgcccctttttgggggtgagagggaaccaatataatggcagtgtctggtggtctgcccggccactggatgctttacaaacatgacccagtagcagtcccagctcgagttctcatggccttttgagagacgacattgatgcttgtggaggtcacagttaggaaagagcgggctgggatttgaacccagggctgaccaatcccaagcatagccaaggcctccttacctggctccctgagaaactggggagcagaggcccgctcctggctgggagcgtttgccgagcagcttgtgctgagccaagtggcacggacaatctgccacccaagggtcttcaccctcccgctcccctcccgcagaagtgctggcggaaggtgtgggctctgctgtatgcagggggcccatcaggcgtggcacggctggagagctgggaggtccgggatggtggcctgggagcagcgggtgacaggtcggcagggcctggccggcgaggggagcgacgggtcatccgcctggctgactgtgtgtccgtgctgccggctgacggcgagagctgcccccgggacaccggtgccttcctgctcaccaccaccgagcgaagccatctactggctgctcagcaccgccaggcctggatgggccccatctgccagctggccttcccggtgagtgcggcgagcagggggcgattgggctggggcacctgcccccgacttgtccacctccacgctcacatcccatcacccagcaagctccaccgagcacctacaagcctgggaaaagtaaatctataatgactctcagagggccgtgcgtgccatggagaaaatggaccgccaggggagcaggaggaagtgagggagcgacgggcagggtggccagggaaggcctctcagaggagggccctgaatgacaggaacccactgggcaaaggtctgaggacaggggcagcctggggagttgtgaacagagggagtcccgtgggcagaggccccgaggccggacagtgtggggtgtttaagggcagaaagaaggcgacgtggctggaaggaaaggagtgcaggaggaagccaactcacagagcttaggagagcggctgaaatgccctaggccatgtgtgtggttttgttctgagtgagaggcgaaggctttggagggtttaagccggacatgtttgtaaagccccaaaaggtctgtgatgggtcaaaaggaagtgagcctgggggttcttcaaagaggtaaacagagttaccatgtggcccacaggtccactcctaggtgtgtgcccaagagaacttgaacaggtgttcaaacaaaacatgtacatgtgaggcaggaggatcgcatgagccccagaggtcgaggctgcagtgagctgtaatcgtgccacttcactccagcccgggagacagagcaagaccctatcttaaaaaaaaacccacatggacatgaacgtccatagcagcactactcacagccaccagaaggtggaaacagcctacatggccatcagctgacaaatggataagcaaaacgtggtccgtccgcaagatggaatactactcagccataaaaacaaacaaacgcctggcacagtagctcttgcctgtaatcttagcactttgggaggctgaggtaggaggattgcttgagcctaggaattcaagatcagcctgggcaacatagtgagaccctgtctc

SEQ ID NO: 1779 - DNA, 2248 bp, Homo sapiens
ttgtgtgccacagaggtaaaaaatttccttgtcagttttgtcttttgactatggctgccttaaaacttttttcttccatgcacaattgttgttttggtcctcttttttaaatatatttttattattatttttgagatggggactcactctgttgcccaggctggagtgcagcggcacgatcttggctcactgcaactgccacctcccaggttcaagcggttctcctgcctcagcctcccgagtagctgggattacaggcatacaccaccatgcccagctaatttttttgtattttcagtagagatggggtttcaccatgttggccaggctggtcttgaactcctgacctcaggtgatcagcccaccttggcctctcaaagtgctgaaattacagatgtgagccacacacctggcctattttggtcctctttagaaggtggttttataatcagctgtaaaactccaacaggtgctcttacatgcaggtttctgataactttggagattgtgacatcagaatagagggaaaagtttcaggactcatggagagctaaaatgttcatgagtatcaagcagaacaggaattaactgcatagactgaaccaatctttttgactttttgcttaaaatgtttgctgatcctttgttttgtgtttcagtcttaaaacttttcttttgagctattgacagcttttaacaatttagtatactcctatgacaaaatttggagcatatttgtttctctctacctgatttctccagaattcagaaactatttgtaagtattcttaacttatggtgatacagttatttgcataagtgcaataagaatctgttctaatttgtaacaggacacgattggagaaattggttgttttactaagactttgactggaatggtgtgcttttctttaaggaatcaaacttgacttatggaaccaataaagtccttggaaaaactggccccatattttgtgtacacagtctccgtacaagatttctgacctgtagtaagtaaagaacgtcactttctgacaggcacataagccccaggtttacctcagaacctcaagaggagaggaaattcacccaatttataagtatttgatggcacaaatccatggctgggcatggctttaagaaagtcttatctgagattcctcctgtggaacaaagttaattggttccagagattcaaagccagagttgctgtcagttcattggtagagatgccatcactgggcaagtgttctgaaaacatcttatctgaataacagcagtcctggagaacatctagggatctagcaaagcgagagatacatgaaggacataaaaacgtttttagaaagtccttggaaacagttctcatttcagacatgtaagcatgagctaggatgaaaagtgatttcatcctggtatctgcaattttcacattcattaggtttcaacatataaactttcaggggacacagacattcagactatagcaccaagctgtagaagctacatagttgtagaccagggtcagcaacccaagaagcctgacttccaagctgtgcttttaacttccccaccatgttgcacctaaagctttggagttttcctgtgattagtgtttttggtgttgttttattttttttcttacaggaactcttgcaagaagaaaggactatgagttcaactttagagggagccatggggactaaacaaaattctgaggccccctcaaccatctaaatggacttccttctgggccaggacactcgaaaattaaacctgaaagactggttcaggccatgatgggaagtgggagtcgaacatgcctcatcataccctccagcattaacatcaacacagaccttaaggctgataagaagcatttacaatctattctctctgaagtcttctacctggaggcttcatctgcatgataaaactttggtctccacaacctcttacaacccaggcattcctttctatcgataattactctttcaaccaattgccaatcagaaaattgttatatctacctataatctagaagcccccacatcaagttgttttgcctttctggacaggaccaatgtatatcttaaatgtatttgattgatctctcatgtctccctaaaatgtataaaaccacgctgttccccgaccacctggagcacatgttctcagggtctcctgagggctgtgtcacaggccatgttcacttacatttggctcagaataaatctcttcaaatatt

SEQ ID NO: 1780 - DNA, 3080 bp, Homo sapiens
gggggtggccttgcttacccagctgtgcggaacaggcttggttgggagtgcctggcctcaccctttgtggggaaaccagattctctgggcagcagtggtaaatggtgtctgagtctgtgtttcgttggatgtgtctgaggtccgctgctgccagctgggttatgctgtctccaaagctatctgcagtgggggaggccctgagcctgggcaggggagggtacagaggcctcaacccgtgggacctgggggtgatctgaactctgcacttcactttttttcaggatttcccccgccccaccctaaaggaggaggaaatagagtctgtcccaccctaagccccagtccctctccccaggtctctttggcatctcccagctgggctggggctgaaggcccttctctggggttggccacagtgaggccaggatctggctgggcaggtggcagtgttccgcctgtgggctgggtgcggaggcgggcctgggggtcttagagagagagcggcggatgtgactgcgggccaggaggaagcctggtcccaggatgtcaccatttcccctgcagtgagcaagcatctctagggctcggagataagtgctgggtggggtagctccagctctccagcgcttttttctgtctggttcctgccatctggacttgagccatgaggaaggccagagtgggtctgacagtccccactcctttccccgctgagccccaaggaaggggctgggcctttgcacccccaccccaacttctgcacgagttggaggcagttgatctcaatggtggaaagtggctggtgcaaagtcatgcttccatactccatgtttaggcttcgtgggtgtcaaagctgggccgtgaccttgtcccattccctcagagaagggaactgaggccagagggtggagctgctctcaggccgctgcccaggcctcttgtgctctgcggttcagatggcactcccgatgccaggctcctgcccaggaagacgtgcccacccgccctggccctgtctctgctgtctggtgtcaggccacctctcttcgggacccccccccaactgattgccctggggctgaccaggctctcctctccctcagtgttgggttttgggagcctctctcatcaggaggttggcacagatgccagccatgcagcggatcctgggcaggggtctcagctgggatggcctggccttgggacagggaggctggctgggcagaaccctagaaccaaaagcggtgcctgtggtgggctagggagctaggtggggagtctagtggggagtctagtggggaggtccactagacactcgttctggcacagcatgcagcgtcctccatcctggccctgctgtgggtacggagccagcagggcaggagctctcagcggagccctccaaagagggctgcttcctggaccagctgcaggatgagggagaccccttctgtccagggctgacataggctgaccaccgccagccccaccctctcactagcttcccattcagttagccattgatgagggctcactgggtgcaggatcctgggctgcccggggttgggtaggggactcctacatgtaggtaaatccgcgagatgctggagagagcaggcaataaagtggttgattctctctggaggtgacattttactttcctagtagggcttggccaggcaggcaaggtggagcctggtgtgccaggcgcagcgcttcagatgagaggaggtgagagcttggggatggcacagggaagtgttttgtctggtgagggtgtggcagggagggcaggcctgaagggacctccagggaggtgtgatcagatctgggttccagagagatcctacctgcttggcgaccttaactgagctggagtctggaggccccacccttgcacccagctgcttccactgcttgcctcccatcccccagtgccagttccccagggcagtgccctccccatgccctcttggtgtaccctggtcccaaaggaggccaagctatgaacttttcttgcagaggtcccaggtgaggctgttgtcctggagctgtccccagagcaggcttaggatgaggggacctagccacagcttcaaccgagtggggtcccggtgtggctgccagggctccttggcaccaacccagcccagtgggttgatctctgaggacctcgtcatactcagccgggcagtctgccctggggggtggggtcaggactccccagcactttgggatggaaggaggcgaagccagcgctgctggactagccttaaagaagcgggagacatcctagctccgcctcaagatttctcctctgcacccagcattctgctccccaaatgtcccaaatatgcagggggtcaaggaacattgctcagtggaatcaatggggagcgtgggctactccccagcctctggtttgccccatagcagccccttgggcaccgctggggacccccaggcctctgaggagcttggtttggaaagcgctggaatgctggaccaagttccctctctggctccctgagagggggtcttctagccccagtcttagggcaagaggagcccgtcccctaggagcctccaggccctggagccagacatcgggcgtcctagctacaccctttcctggctatgtgagcttgggcaagttaccgaacccctctgagcctccattcaccatctacagaatggaagagacgctaatgtcaccctggaaggtgttttgaagggtaatgtgtgtaaagggccaaacaaggccccgcacagttaaggacttcttaaaaacaaacaggcggctgggcgcggtggctcacgcctgtaatcccagcactttgggaggccggggcaggcggatcacgaggtcagggggtcgagaccatcctggctaacacggtgaaaccccgtctctactaaaagtataaaaaattagccgggtgtggtggcgggcgcctgtggtcccagctcctccggaggctggggcgggagaatggcgtgaacccgggaggcggtgcttgaagggagctgagatcatgccactgcgctccagcctgggctacagagcgagactccatctc

SEQ ID NO: 1781 - DNA, 2488 bp, Homo sapiens
actttttgtttgttttcttgaacacattttggacatttgctatcaggaataatcccacttagtgggagggcaggatggggtcctggcccttgacacccagacatgctgccgtgagggccaagatccatcttacttagctcaaaagctttctgtaaaagttgatatttctgaatttttaagcaaggaaaaccgacgcatgagcagccgcctgacccctcgtgtctgtctttccacccagaggagcttacccgccttgagacagctgacccccgactccgcggccttcatccagcagagccagcagcagccgccaccgcccacctcgcaggccaccactgcgctcacggccgtggtgctgagtagctcggtccagcgcacggccgggaagacggcggccaccgtgaccagtgccctccagccccctgtgctcagcctcacgcagcccacgcaggtcggcgtcggcaagcaggggcaacccacaccgctggtatggaaggggcgcctgactggtctgcacagcccaccgtgcctctgctcccgcccgcttcttagataaattggccacggctcagaaaccttttccaagcatgcaggaagcctcctgctagaggaagcttgggtattaccttaaatagttaaaatagaaaccagaggttgaggccctgggatgttgtattttgtctcagtaaaatgaaatagttgagttggctttgaaccaccggcacgtccccgccctgccttgtctggggatgttactggtgtaaatgaatgcagcgtgcttttagaggatcttgtagatagatgttctcttggattaggagcagcggtccaagcgtaagacacgggcacctgcgtgggacaggtgggcaggagactggaggcagggtagcagctcacagcacagggtggatttaggtgagtcccgggaggcgaagccgcggctgctcatagcggttcacttatgtgcagtttggatctggctttcttggttttatagtcatgatgtttgctctgcagctagagaaaggatgtctttgccagaagaattacattttgagcacattccctttcatgggcagagggattcaccaaacgtagaggggcagttttaaaaaaatttcagaggtgttttcttcctctaaagacagcttaaacaacaaaatggtgcgggctccctcatcatgagctggtatgtgttgtgatggtgtacacatcagaaccagctgggtgaggagtagccattagggggctggctcttgtgctctgttcaagttgcatttgtttttgtcttgataatagcgaggagaacagggtgaaatggcatggagggagggtgtcccttataaaggccagggaagggctgagcgcctgtgtaaagagagggcttccttgcctgccttttgactccagagggaaagagatgtgccgtgcctcttgctttagtgtaaggacagaacttccctgttcactagtcagtggagctactttacccaaaaaggtgggttctgtttaagcaggcacagcctgtgggcaatcattttcttgccaagttttgacctctggtgcttagtcacacacaagcagcatgggtgtttttagaattaggtgctgtgtttggcagcaggatcacctctgcattctgcttccctgggctcctcctgaccacgtgtgagtctgcagagcacagccagtgggatccagggcatccaatccattgcctgcaccctgaagcctgtggaggcagaacccaggcttctccctgattcgatgacaggctccctgcaccgcagggcctggcccgggcatttgatggcaggttccctgcgccgcagggcctggcctgagcattgcctgagctgcctgaggctcttcctgtccggtgtgggtgttcctgtttcgttggagacatgtttgcattataggctgcttccccaggtccccacacatgttctgcagcatagagtttacctgccagggcacctttgcaaaatggtagcgactaaattctgaaacacctgggcccagaggtttgaggtcaggccttatggacttgagcattggcttttgacaaggatgccagtgtctctaggccccagcatcctggggacagggccagagcataggccatggtcagtgctgccaggttttggatctctgccttgtgccggaggtgagagtgagaggcaggatgacagcagagctgggcagaccctgccacgaggggcccagcaggggctgggcggacagagctggccatgctgggggcagtgggtggaggcccttgagggccaagttcaggcaggacttaggaactctaaccccactccagtagaaaagccctcagccgccttacagaaaattcagaaagggagctgggtttggtagctcatgcctgtaattcagcactttgggaggtcaaagtgggaggatcgcttgagcctaggagttcaagaccaacctggccaatgtggtgaaaccccatctctac

SEQ ID NO: 1782 - DNA, 2611 bp, Homo sapiens
gggccagcccccttaacaggcatcttatttactacccgcagctgcacaggaggcagacccatccccttttcacaactggggctaagggaggaaaatgacttgcccagatcacagagcagaacagtggcagagccaggggggacggagggccatctgcccccagaccttcctccctaatgagggtgaatggaagctaagagtgcatcccacagcccaggcagttccagacctgagcctgacggcttctgccagggccacataccaggttcttttccttgatctctgcccacgtgtcagcctgggccacttgggctgcggtctgggtaccatccactccctcattaggcaggagccccacccacaaggctcactgcccagattgccccacaccctggcacctggggaaggcagtgttgccgagggcctgattggtgccaggcactgttctaggccctcagggatctggcactgatcaaagtttgcaaaacgccgggtgcagtggttcacacctgtaatcccagcattttgggaggccaaggtgggaggattgctttagtccaggagttcaagaccagcctgggtaacatagagagacccagtctctatttcaaatatatttatattaaaaaaaaaaaaaggttgacaaaaacttcctcatggtagtttagtgagaggagacagacaataaccaagtccatgagcaccgacagttcgtcacggtggtgagtggcatggaggaagagaagcagggaagggatgaggtggtgcaggagggatttaggacaggcctccctgaggtgagccttgggtgaagacctgaaggcagtaagggatgaagccatgcagagatctggggcagccagagagcagagctggagtggaggcctggaggcgggagcgggcccagtgtgttgagacagcccaggcagtatggcagggagtgaatgagggaagggtgggaggtgagaccagggaggtggcggagggccagagtctcagcagacgggatgggctgtttccctgcccctttcccttcccctcacacacaggctgtgatggatgtggggtcctcgtcccctgccgcccagaggcccccacagtccttcagcctggcctctcccctcctgcctgttccagcggagatcctgcaggccaatgacaacctcacccaggtgatcaacctgtataagcagctggtgcggggtgaggaggtcaacggtgatgccacagccggctccatccctgggagcacctcggccctgctggatctctcaggcctggatctcccgcctgcgggcaccacctacccagctatgcccacccgccctggcgagcaggccagccctgagcagcccagtgcctcagtttccctgcttgacgacgagctcacgtctctgggtgaggaaggggccaggcctggaggagggcgggctcagcagcagatggggcatgatcccagggcccactcacagctagcggaaccacgtgccccaggtgtggatcctgtggggcacgtggatgagcattaggcccacttcacaactgaggaaactgaggctcggggaagttaggagcttgtgcgaggccacacggccagagggtgaggctggcaacctctaagccggcctcggataagctaaccagcattcaggctctggcagcctggggggaaaccaggggatttccccgcaacaggttagagcctggaattgagaactgtctgggcaaaagttcagcagtttcttcatccaccaagaggagagggagggctctgggctccagagcacccagaggctccagagaagccgaggccagagcgcgagggactcggtgatccaagctggtccagggccaggcctgctgttactcccgggcaggctccggctccagagcccagcaggggccaggcttccccggggggaagcagcaaagcgttcccagctgcccaaaccatttttgggtttccaactgctctcagggcagcagccccatccgagagctgagatcagaacagcctcctcctgagagccactgaagggatgaagagcagatacgttagggccacatcaaaggaatcctcagggatatgttggaagccaagattcagactgtggtttcctgagccagttctgaagcaaaaaccagacccgaaggccttgaagaagtgatggggacccggggcgccctgggcggggtctgcctgggttccaggagtgcttcctttggtggtgcccactactgcactctgtcctgtcttaggtgaccctcacggtctctgcaggcaggtgccgttaatagccccactgcacaatgaggaaacggcagcacagaaaggcgtggtggctcacgcctggaatcccagcactttgggaggccggggcagagggattacttgaggtcaggagtttgggactagcctggccaacatggcgaaaccccatgtctattaaagatacaaaattggctgggcgtggtggcacatgcctgtggtcccagctactggggaggctgatgcaggaaaattgcttgaactggggaagcagaggttgcggtgagccgagatggcaccactgcactccagcctggttgacagagcaaggctccgtctcac

SEQ ID NO: 1783 - DNA, 1987 bp, Homo sapiens
ctacgcgtcttctggcccctggtgaccggcctgtgcaccgccctggtgtgcctctaccatgtcctgcggggaagcgggggcgcccgggccgagcccgccgacggcgtggatggcggcttcccgttgcttaaggtggccgtcctgctcctcctcagctatgtcctcctgcgctgtcgccacgctgtccggcagcgcttcctgcccgggtctccccgtctggagggtcacgccgccttctcctcgagacacttccgagagccgggcctcagcatcctgctggagagttactacgagcatgaggtgcgcctgtctccgcacgtgttgggccacagcaaggcgcacgtgagccggatcgtgggcgagctggtgcgggctggccgcgcccgggggtcccccggtctcattcctgggggagcgctggccttggccttccgcggagacttcatccaggtgggcagcgcctacgagcaacataaaatccgccggcccgacagcttcgacgtgctggtgccactgcgcctcccgccgcttgtggcgctggagccacggagcctgggcgaggagccagcgctggccccggccttccgcggctgcttcttgtgcgccctcaaggcaccaccctcaccatcgggggcctcggggggccactggcttcgggactgcaaaccctttgctgatgccttctgcgtggatgtgcgcgggcggcgtcacctctctgctactctggtgctgcgctggttccagtcgcatctgcagcgctccttggccactgtgcgttacagcctggaggggcgctgtcgggtcaccttgaccccaggtggcctggaacagccccccaccttacacatcttgccctgccgcactgactacggctgctgccgcctttctatggctgtgcgtctcatccccgctgtccatctgggagatggggtcttccttgtggcgccaccaccgccacccttgcccagcgcgcccctgttggagctccctgagggcctgcgtgcggaggcactgtggggtgtgaacacagcacgccaggagcagaagctgctgagttggctgcaggaacgggcagctccaggtgcctgctacctcaagtgcctgcagttgcttaaggctctgcgcgatctgggggcccgtgggctggactcagcggccgccacccagtggggacgcatcctatcctcatatgtgctcaagacagtgctgctggcagtgctgctgcgcaagggggcccctgggcaaggctgggacgaggagcacctgggaaggtgtttggaggagttggtgcagttccttagggactgcctgctgcgacgccatacgctcttccactgcgtcctgggccctggtggggcggctgccgaggtgggtcccctgcccaaggcactgagggaagccgccccagttgacctcctggccgctttcgacgggcacgcccgggaacttgcagcagcgcggttgctgtccacgtggcaaaggctgccccagcttctccgggcctacgggggtccccgctaccttgccaggtgccccccaccccggagtcagcgcgcccagggcttccttgaaggtgaaccgtaaaccctgacagcacccccacctgaccaaatgctcctaaagcctttcccactgggtgggggtgggaatggcggtgaagccagttaaatgcaagattgcagaaggcattggaaaatttggtggctgccacaagctttagtggcttaaatatcaccttctcgcttcacagtccagtataatatgacatcttcacacccactagagtgtcctgggcaaaccatgggaagacatccaacaggagacccaagaattggttcaaatattgttctgtgtagacggattctgtagaaggatgtggcttttagagaagtccagtagaagaagcaagaactagctgcagggaaagttccttctgtcggtttttagacacagatctctctgcccaaattaaaaaaaaaaaaaaaag

SEQ ID NO: 1784 - DNA, 3283 bp, Homo sapiens
gaagaattgaactgtgaggcagagggtggcctggttcccgcggacaggaagaacaccagcacgagggtccggccccactctgggaaggtggccggctatgtcccagaaaccgtccctgaagaaaccggacctgaggcgggctcgtcagcccctggcattggaggtgccgcagaggaggtgggaaagacgcttttgtcattggaggggaagcccttggaagccagcagggccttgccagcaaagcccagggcctttactttataccctcggtcgttctccgtggaaggccgagagattccagtgtccgtgtaccaggagcctgaggggtcagggttggatgactacaggataaagaggaaagaggacaatctctctctgtcgtgtgtaattggctcctctgggagtttctcccagagaaaccaccttccgtccagcggcacctccacgccttcttccatggtcgacatcccacctcctttcgacctggcctgcatcaccaagaagcccatcacaaagagctctccctcactcctgatcgagagcgactccccggacaagtacaagaagaagaagtcatcctttaagcgcttcctggcactgacgtttaagaagaagacggagaacaaattgcatgtggatgtgaacgtgtcttcctctaggtcctcttcagagtccagctaccacgggccttccaggattctggaagttgaccggagaagcctcagcaactcccctcagcttaagtctcggactgggaagctccgggcttctgaatccccctcctccctcatcttttatagagatggcaagaggaaaggtgtccccttcagcaggacggtgtccagagtggagtcctttgaagaccgctcccggccgcccttcctgcccttgccactgaccaagccacggtccatctccttccccagcgctgacacttcagactatgagaacattccagccatgaactcggactatgagaatatccagattccaccccggagacctgccagggctggcgcgttcacgaagctgtttgaagatcagagcagagccctgtccacagcaaacgaaaatgatggctacgtggacatgagcagcttcaacgcctttgagagcaaacagcagagtgcagaccaggacgcagaaagcgcctacacagagccctacaaagtctgtcccatctcgtcggcagcccccaaagaggaccttacgtcggatgaagagcagagaagctcggaggaggaggacagtgcttcaagagaccccagtgtcacccacaaggtggaaggacagtccagagcccttgtcatcgcacaggaactgctatcttcagagaaagcatacgtggagatgctccagcacttaaatctggatttccatggagctgtcatgagggccttggatgacatggaccatgaaggcagagacacattggcccgggaggagctgaggcagggcctgagtgaactcccagccatccacgaccttcatcaaggcatcctggaggagctggaggaaaggctgtcaaattgggagagccagcagaaggtagctgacgtcttccttgcccgggagcaggggtttgatcaccacgccactcacatcctgcagttcgacaggtacctaggtctgctcagtgagaattgcctccactctccccggctggcagctgctgtccgtgaatttgagcagagtgtacaaggaggcagccagactgcgaagcatcggctgctgcgggtggttcaacgcctcttccagtaccaagtgctcctcacagactatttaaacaacctttgtccggactccgccgagtacgacaacacacagggtgcactgagcctcatctccaaagtcacagaccgtgccaacgacagcatggagcaaggggaaaacctgcagaagctggtccacattgagcacagcgtccggggccaaggggatctcctccagccaggaagggagtttctgaaggaagggacgctgatgaaagtaacagggaaaaacagacggccccggcacctatttctgatgaacgatgtgctcctgtacacctatccccagaaggatgggaagtaccggctgaagaacacattggctgtggccaacatgaaggtcagccgccctgtgatggagaaagtgccctacgctctaaagattgagacttccgagtcctgcctgatgctgtctgcgagctcctgtgcagagagggacgagtggtatggctgtctgagcagagccctccctgaggactacaaggcccaggcgctggctgcattccaccatagcgtggagatacgagagaggctgggggttagccttggggagaggccccccaccctggtgcctgtcacacacgtcatgatgtgcatgaactgcggctgcgacttctccctcaccctgcggcgtcatcactgtcacgcctgtggcaagatcgtgtgccggaactgttcgcggaacaagtacccgctgaagtacctgaaggacaggatggccaaggtctgcgacggctgcttcggggagctgaagaagcggggcagggctgtcccgggcctgatgagagagcggcctgtgagcatgagcttcccgctgtcttcaccccgcttctcgggcagtgccttttcatccgtcttccagagcattaacccctcgaccttcaagaagcagaagaaagtcccttcagccctgacagaggtggctgcctctggagagggctctgccatcagtggctatctcagccggtgtaagaggggcaagcggcactggaaggagctctggtttgtcatcaaaggcaaagttctctacacctacatggccagtgaggacaaagtggccttggagagtatgcctctgctaggcttcaccattgctccagaaaaggaagagggcagcagtgaagtaggacctatttttcacctttaccacaagaaaaccctattttatagcttcaaagcggaagataccaattcagctcagaggtggatcgaggccatggaagatgcgagtgtgttatagcagttatcaagcatgtggacttgtaacaaattcttaggtcaatatgtgaatgcttttagaagctaagctgtggctcaactcatccggacacacacctggattcagcaatgaggcctgaccttttttgctataaccgccccaccactcccctgcccttgccaacatcttcatgaatggaatccttaagggatatttatggacctctccttttctgtgttttccacccctacccccacccgccacccagtaataaactatttccttaccccgc

SEQ ID NO: 1785 - DNA, 2828 bp, Homo sapiens
tgggattagcagcgcagcctggccaggcacagtggctcacacctgtagtcccaacactctgggaggccgaggcaggagtcgcttcagcccaggagttcaacaccagcctggacaatatggagagaccctgtctctgcaaaaaagtacaaaaattagctgggcgtggtggcatgcacctatagtcccagctactcaggaggctgagttgggaggatggcttgagaccagggaggttaaggctgcagtgagctgtgatcacatcagtgcactccagcctgggcaacagagcaggaccctgtctcaaaaaaaaaagcaggagcagcaccttagtgccaaagaaaagtctacctttcctcccagagcctcctgggccaggctgagtggcttggggaacaccacgtgactggcttcactccccagggcagacaactgctggcctctcatcccctcccctcccctttgctgccactgacctccatccacacggtttccttaagcagagcttttctcctcctcttctctgctagtgaagcactgcttaccctcctagcctacagcaagccctgccctgccccatctttctacccaatttctcgctcttctgtttcacactcatttctttttactttggactaattgtggctgttgggactttggcttgattgctaaaatactttacttgtacttcctgatgatacaaacaatcctgcccacttcctctgccagatattgcacccactcgtcaggatttgtgcgtccttgactctgccccacccagtgctcccagcaggggcaggtgcaggaagctcactaggtggagatgttggaattggtttttcttgcagacaaagacctgcggaccaagggcttcagcctagagtcgtgccgcagcatggtgaacctcatggatgtatccttccgtttgcttttgtctcctgagtggggttttgggtggaggtatcggtgctgggagaactgtcccaggacagcacagagaacaggacagagccatgcggagtgtggacacacagtgccccatgctcagatgtctccctggacgtcttcctgttggttgggagggagaaactgaggcacagacctgtgtcaagtgaaaggtggagcaagacctgggtccccattgaccctgaggctggtgctatttctgacccctccccagcccactccactgcagcccagctcagagaataaggcaagcccggctgtgggctgactgtacatggcttttgctgcttctcctcacccagccccaagtcgacttgccggctcggcggccatctccccttctgcacagttgcccactctcccatgactggtctaagtgatggaatttccttcttaacggccacccagcgtgatggcaatgggaagctgggcctggtggagttcaacatcctgtggaaccgcatccggaattacctgtccatcttccggaagtttgacctggacaagtcgggcagcatgagtgcctacgagatgcggatggccattgagtcggcaggcttcaagctcaacaagaagctgtacgagctcatcatcacccgctactcggagcccgacctggcggtcgactttgacaatttcgtttgctgcctggtgcggctagagaccatgttccgatttttcaaaactctggacacagatctggatggagttgtgacctttgacttgtttaaggtgggaacctccctgggcccatggttggggaagagttccaggcgatcgaattttcttatctggccagtgttccctgtcctttcctggaaatgagcctgggcctcagagccaaccctgaagcccgggccacctgaatcctgaaaggctggggtgggggtgtctggattctgggaaaggagcaggaggggaggtccaggcccttggaggcccctatgggagcagcactctggtttcccaggggtggaggaggtaagaaagtaacccctccatgaggttcctgaggtggctcctgagacgtggagttgggggctggacctggggtttgggtggggaagaagccagggagccatttctgcggccccagctgacctgcctgttctcccgcagtggttgcagctgaccatgtttgcatgaggcagggactcggtcccccttgccgtgctcccctccctcctcgtctgccaagcctcgcctcctaccacaccacaccaggccaccccagctgcaagtgccttccttggagcagagaggcagcctcgtcctcctgtcccctctcctcccagccaccatcgttcatctgctccgggcagaactgtgtggcccctgcctgtgccagccatgggctcgggatggactccctgggccccacccattgccaagccaggaaggcagctttcgcttgttcctgcctcgggacagccccgggtttccccagcatcctgatgtgtcccctctccccacttcagaggccacccactcagcaccaccggcctggccttgcctgcagactataaactataaccactagctcgacacagtctgcagtccaggcgtgtggagccgcctcccggctcggggaggccccggggctgggaacgcctgtgccttcctgcgccgaagccaacgccccctctgtccttccctggccctgctgccgaccaggagctgcccagcctgtgggcggtcggccttccctccttcgctccttttttatattagtgattttaaaggggactcttcagggacttgtgtactggttatgggggtgccagaggcactaggcttggggtggggaggtcccgtgttccatatagaggaaccccaaataataaaaggccccacatctgtctgtg

SEQ ID NO: 1786 - DNA, 3192 bp, Homo sapiens
gtgcgctcctccccgcgctgtctcggcggcccaggaattcactgtctgtagcatctgctcctccacagagggaccctggaatggcgatggcactcccgatgcctggacctcaggtgagcaccccctgagcccgtccattgccccaggagactgcttcgcccctagcctcagcttttcagccctgagaaccttacagcttgcctcacacccacccacatcacaggatggagtctgcaagccgaggacagcctcctcgctctatggccaggcctcacacatggctctgccaaatccttccagcctttgggcagaagtgggcttcctgcggcctcctctggcccctgagcttctatggtcagccattgagggcagggtccctgtccttccccagtgcctgcctccttcctggtgtgaatggtcagcccatcctccctctcctgatgctgactcactgctggtgttagaaattgagacccagagggtggggatgctccccacagtgcaggtgctccttccccaaatccctgatagcctgtggagagggcgaggccaaggttgggacccccttcctggtaaatctctctccctcccccaagttcagtttttccctcttcctctctggggcttctgctgagaatgaggccgctcactcggggggtgttgggctgccctttctctgctgggccctgtggatgcagcagtgggcagcaaggagagaggcctctagcagatcatgcaaatgtttctcatctgctgggttctcaccgagcccttgactgcctggatagcagagtatgtggttgcaggaggcggttgtgttcgaggatgtggctgtgtacttcacaaggatagagtggagttgcctggcccccgaccagcaggcactctacagggacgtgatgctggagaactatgggaacctggcctcactaggtgagggcttctgcctttggtcctggggccgggaggtgcgtctgtgttagcttcaaaggaagttggttccattgcagattcaaggtctgacacatttttgaggggaagctggaggctccccaaggagcccctctctgcttcctgttgggcacccactgccagcgtcagcctgcctgaggcttctctcctggggcaggccccccatctccccctggccacctagctgcccccttctgggatagtgaatgttcctgacccactccaagcactctgtgccctgatggcctccagccaggcacctgggcgtcccttctccctcctgtactgatacgtgctgctttccttctctgagcttaggctttcttgttgccaaaccagcactgatctccctattggagcaaggagaggagccgggggccttgattctgcaggtggctgaacagagcgtggccaaagccagcctgtgcacagattccaggatggaggctgggatcatggagtctcctctgcagagaaagctctccaggcaggcaggactgccgggcaccgtgtgggggtgcctcccctgggggcaccctgtgggggggcaccctgcaccaccccacccgcatggcggtcctgaggacgggtcagataaacccacccacccccgggctcgggagcacagcgcctccccaagggttctgcaggaagacctgggccggcctgtggggagctcagccccccgctacaggtgcgtgtgcggcaaggcgttcagatacaactcgctgcttctcaggcaccagatcatccacaccggcgccaagcccttccagtgcacagagtgcgggaaggccttcaagcaaagctccatcctgctgcggcaccagctgatccacactgaggagaagccgttccagtgcggcgagtgcgggaaggccttccggcagagcacgcagctggctgcccaccaccgcgtccacacccgcgagcggccctacgcatgcggcgagtgcggcaaggccttcagccgcagctcccggctgctgcagcaccagaagttccacaccggggagaagcccttcgcgtgcacagagtgcggcaaggcgttctgccgcaggttcaccctcaacgagcacggccgcatccacagcggggagcggccctaccggtgcctgcggtgtgggcagcgcttcatccgagggtcctcgctcctgaagcaccaccggctgcacgcgcaggagggtgcccaggacggcggcgcggggcagggcgccctgctcggagctgcgcggaggccccaggcgggggacccgccccacgagtgcccggtgtgcgggaggccgttccgacacaactccctgctgctgctgcacctgcgcctacacacgggcgagaagccgttcgagtgcgcggagtgcggcaaggccttcggtcgcaagtccaacctcactctgcaccagaagatccacaccaaggagaagcccttcgcgtgcaccgagtgcggcaaggcgttccgcaggagctacacgctgaacgagcactaccggctccacagcggcgagaggccataccggtgccgcgcctgcgggagggcctgcagccggctgtccaccctcatccagcaccagaaggtgcacggccgcgagcccggggaggacacagagggcaggcgggcgccctgttgggcttcctgatgacggggacgacaggccgaggattcacgctggaagcccacccaagccggcggggccctagcgcagaaattcagaaccccctgtcctgaaggtgaagcaaagtctaaagaaagggccagctcccatcaggagctcggcttcttgctccagccgggcactggggagggaaagggcaccaggcagcccgtggtgtggcctcgggaaccactatcagccaccatttcctggggccttccggaaatgtccaggagcgggcagaagggagagagggaggggcagctatgctcagtccccaaagagcagggcacagggggcgccacagacgcatatgcagctgagctccccacaggccggcccgggtcttcgtgcagaaccattgggcacagccaggccttagcgccaggctccgtgtggcggtcaattccaggtgctgtaaagccgactaacagggtacagggagccttagctggctgccatgtctcctgcctgtaatcccatcactttgggaggctgaggtgggaggtttgcttaagcccaggagtttgagaccagcttgggcaacatggtgaaacttctctacaat

SEQ ID NO: 1787 - DNA, 2283 bp, Homo sapiens
atcctaaatagaacctccttccctgaccagaaacctccacttccctgcaggacccccatcctgacctgggccctctctcctcacctgtggaccccatcctatcttggatcccctcctgacctgggggccccttcctctgatccgagcctccctcctccccattctgggcccctaattctgactcaccatccccaattccttacccaggacccccgttcttatccggggttggccctgacctctctctacccacagaacacgaccctggacctcctagaccgggggctgcaggtccatgtggtggtggacgcctgctcctcacgcaggtgagagggcccctgcctgggtgggtgcacgtgggggccatcaggggctcccaggaagggccacaggcggcattcccaccagggtgcctgcgtgtctgggtgtccagactgcggcgtccacaccaaccttccctccctccctcccactcacagccaggtggaccggctggtggctctggcccgcatgagacagagtggtgccttcctctccaccagcgaagggctcattctgcagcttgtgggcgatgccgtccacccccagttcaaggaggtaatgcccacctggccgcccccgcctcccctgcatctgtcaaaggtcttgtctttgggctctgagaatacatctcggcaccagcaggctgccgcctccagggggagccaggttcttggaggggaggctgctggtcactgtcactgccataaatccatgaaaggagcccacagatggaccataagggccacagagaacaataaaatgggggaggcaatccagagggtcagggcacagaggagggggtttgtattggagggtctggggggcatcctggagcaggtgactttagaatgaactgaaggagggagtgaccaggcggacactggggaagaacaggtcagcagagaccctctagatagaagccccttgacccgtccacacccatctccaactctccatctcctccgcctctgccccttccggcccgggtgcccctcctccagtttctcagactccactggccaccctgctaccggggtcagccaggtactgggcccccctgcttcaagccattggccctcaggatgctggagaggccccagaccttgacattcccaggccctcccaggtctgctccttaccttccttctagttcagctctgtgggacattcaccgagcacccaccctgtgccagccactgtggtgagccctggagtctgcagcaatccatgttcagtgacacattgtgacccccagctggggcaggagttgcagagggatgagcaagagtggcagaggtggccctgaattctgagctgccggggaagggggcatcaggcactcacagtgttcccaggggagggggactgagctttctttgaggagctgtagcaggccagggtgagcaccacgcgggaggagccagcagcctgtcttcacgcaggagtcagagcccagaggtttgagatttcagccacgggcagccatcagggtttgatgcaggggagctggccatatcagatcggcagtttacaaagttctttctggccctgtgtgaccagtggattagggagtgtggcatagaggggaggagggagacctgtcagtaaggaggttaatttgggcgcccaggcaagcggtgatgaggcagtgaggagctcaaccagtcacgtgtaatgaaagggaggccccaggaaaagtcttgagaagagggagtgttgtcttgggcagctgctagccagaaggtccgagagatgaagacggagaggtgtccctcagatttgtcatccatggagatcgggaccctagacgcttcctgacccatcgccccctgcccttacagatccagaaactcatcaaggagcccgccccagacagcggactgctgggcctcttccaaggccagaactccctcctccactgaactccaaccctgccttgagggaagaccaccctcctgtcacccggacctcagtggaagcccgttccccccatccctggatcccaagagtggtgcgatccaccaggagtgccgcccccttgtggggggggcagggtgctgccttcccattggacagctgctcccggaaatgcaaatgagactcctggaaactgggtgggaattggctgagccaagatggaggcggggctcggccccgggccacttcacggggcgggaaggggaggggaagaagagtctcagactgtgggacacggactcgcagaataaacatatatgtggc

SEQ ID NO: 1788 - DNA, 1981 bp, Homo sapiens
gctccaagaaaaatgaaattatggttgcaccaggtaaggggtcttctacctccccatgtaggaacagacctcatggcacattctctgtggctcatcaggagtcctggcacagtggtgtctccagaggatccaagcagggcccgaggagttgaaggaattgggttgttgcctcactgcctagccagcctccagctggtgtcccatagcagatcctcccagggaccggccccagagggtaaccccagtctcctgagatagacagacacgtgagcatcatgtgtgtctccccttccttgataggagaaaactcaaaggcatttgggacatagaggagggtgtggccaggcctgtctggggctgtctgcaaaagcttcccagaagaggggacactggagctgaatcttaagggcaccaggaagcagtgtgagcaaggcggaggggcggaaagccacgtttggaagaatattcagtgattcttctccaaaatgtaaagcaaaagtactgtatcattttatccttgaaaacatgttctctgcccacttgtaaaggccaggcctgtctttaggccccttacagccagcttttcctgccgcacgggagcagattgctttgtttcctttacgcgaggtgcttgccttgcatttgggggctctgtggtgcaaccaaggcctgtgtttagtccttaggatcattctcagggtgaggagatgctcattctgggaggagcccacaaggatgggagcacaggagcgagcaacagagccacatctcctgcccggctccctcgctctcactcatggactggggtggcaggcagagcctccagggccgtctttgcattattacttttttctcactctgctttttcttggctgagccacatagttgagtgtgcgtgcgtcacgtatgcgcgtgatggtgcactcccgctgcagtgccgcttatctagggcatcaggatgtgagtggggaggagtgggaggtgaggctttggtccagtttagaaggggccacaaacacctaactcagttgcatggacttgatcttgcaagcagaggtttttagggcaggaggtgataggattatgattaggacctggataaaggaaggcagtggggggtctggggacactgaatgctctggactggcaacacagagggcaaggaggctggccacagagttctgaggtaatttgatgggaggtcagccactccctgcagcagaccagcataggttctgtcaccaggcctggaaggatgggcaggaaagaactatagagccagtcacagcagcccacaggctccctgggacactccctagaggggtggggacagagcagttcagtcacagagaagaacataagaataactccagagtctattattccaaaatcacgcttctgtgtgtaatgcctgatccatcggggagaaaagactgcaggaggcacagaatctgttttcccagctttgcttcccacaagcatgaccctgggcaagtcgcagaacacctgcaaatccacatctgtaaagtgtcgagtaggggactgtgctgtgctgatgtcctgagccaccctgcctggttgagtgtgttgacctgggttgggggaaaaagccttggaatcagatttaaactgcagttcctcccaggttgtcatgttgtgtgactgcagaggacaaagcttcactccccaaaagtcgggccgggatggagcgcagtggctcacgcctgtaatcccagcactttgggaggccaaggcaggcggatcacaaggtcaggagttcaagaccagcctgaccaacatggtgaaaccccgtctctactaaaaataaaaaaattagctgggcatggtggcgcacacctgtaatcccaggtacttgggacgctgaggcaggagaatcacttgaacccaggaggcggagcttgcagtgagctgagatcgcgccactgcactccagcctgggaaacagagtgagactctgtct

SEQ ID NO: 1789 - DNA, 2065 bp, Homo sapiens
tgccttctcagaatgctgttttttctcaggaggggaacatggaggaggaagaaatgaatgatggctcacagatggtgagatctcaggaatcactgacgtttcaggatgtggccgtggacttcaccagagaggagtgggaccagctgtaccctgcccaaaagaacctctatcgagacgtgatgctggagaactacaggaatctagttgcactggggtatcagctttgtaagccagaggtaatcgcgcagttggagctagaggaagaatgggtgatagaaagagacagcctgctggatactcatccagatggagaaaacagacccgaaatcaaaaagtcaaccacaagccagaatatttctgatgaaaatcaaacccatgagatgataatggagagactcgcaggagacagcttctggtactccatcctaggaggactctgggattttgattaccatccagagtttaaccaagaaaaccacaagagatatttaggacaagtaactttgacccacaaaaagatcacacaggagagaagccttgagtgtaataaatttgcagaaaactgtaatctgaactcaaaccttatgcagcagagaattccttccattaaaatacccctgaattctgacacacagggaaacagcatcaaacataattcagacttgatttactatcagggaaattacgtaagagagactccctatgaatatagtgagtgtggaaaaatcttcaatcaacatattcttcttactgatcatattcatactgcagagaaacccagtgagtgtgggaaggccttcagccacacctcatctcttagccagcctcagatgttgcttacaggagagaagccctataagtgtgatgaatgtggaaaaagattcagccagaggatacatctcattcaacatcagagaattcacacaggagaaaagccttttatatgcaatggatgtgggaaagccttccgtcagcattcatcctttactcaacatctgaggattcatactggagaaaagccctataaatgtaatcaatgtggtaaagcttttagccgcatcacatcccttactgaacatcatagacttcataccggagagaaaccttacgaatgtggtttctgtggcaaagccttcagtcagaggacacatctgaatcaacatgaaagaactcatacaggagagaaaccctataaatgtaatgaatgtgggaaagcctttagccagagtgcacaccttaatcaacacaggaaaatccatactcgggagaaattatgtgaatataaatgtgagcaaactgttcgccacagtccttcatttagcagcacataacttatggtgggggaaatcagataaatatataaatgtaggagattttttggtcagacctttttatcccattcaatatcaaattattcatagtggagagaaagcttatacataaatttttgttttgttttgtttttgagactgagtctcactctgtcacccaggctgaagtgcagtggtacgatcttggctcactgcaacctctgccacctgggttcgagcgattctcctgcctcagcctcctgagtagctgggaccacaggtatgcaccaccacgcccagctaattttttgtatttttagtagagacggggtttcaccatgttggccaggctggtctcgaactcctaacctcaggtgatccgcccacctcggcctcccaaagtgctgggattacaggcgtgggccactgcgcctggccataaactttcaatgcgtagaaaccaaattaatttagaccttaaactagcagcatattacattcccaggaggggttataaaaagaaaaaataatttattttacaaatgagattatatttggagtcatgttccaaatctgatataaaactttttaaaaaatcagaagtccttatccaggcatggtggtgcacacctgcaatcccagctactctggagactgaggcatgagaatggcttgaacatgggaggtggaggttgctgtgagctgagatcacgccactgtactccagcctgggcaacagagcaagactctgtctc

SEQ ID NO: 1790 - DNA, 1820 bp, Homo sapiens
tatcagtggaggaggtgaggactggctggattggggatatattttgaaggtagaggtgataggatttgctgagggattcaatgtgatttgttccagaaagacagaaattaaggatgactccaggatttttagcctgagtatctggaggaaagcattgccatgtaccaaaatgggatggactggaaagaactggtttgggggaaagatgaagagttcagttttagacatgtttcaggttcctattggaaatccaactagaaatgtcatcaagaataaaagtatacttttgctttttttttattggaaaggtgcacaaaatgaaagtcctccttttcttatccctccattcagatggaaaaactgttcatggttttgtgatgtccttcacaagtacacacgcatgcacatgtgtgtgtacatgactttgtgttatttaatgctttctgataatacccttactgccttcacctagcagggccttggagtcctgagatcttccctcccccattttctctgctccccgctccactccagtcctcacaatatcatactttttgtctttcacttctaggaggagattgtatttcgttactaccacaaactcaggatgtctgcggagtactcccagagctggggccacttccagaatcgtgtgaacctggtgggggacattttccgcaatgacggttccatcatgcttcaaggagtgagggagtcagatggaggaaactacacctgcagtatccacctagggaacctggtgttcaagaaaaccattgtgctgcatgtcagcccggaagagcctcgaacactggtgaccccggcagccctgaggcctctggtcttgggtggtaatcagttggtgatcattgtgggaattgtctgtgccacaatcctgctgctccctgttctgatattgatcgtgaagaagacctgtggaaataagagttcagtgaattctacagtcttggtgaagaacacgaagaagactaatccagagatgaaagaaaaaccctgccattttgaaagatgtgaaggggagaaacacatttactccccaataattgtacgggaggtgatcgaggaagaagaaccaagtgaaaaatcagaggccacctacatgaccatgcacccagtttggccttctctgaggtcagatcggaacaactcacttgaaaaaaagtcaggtgggggaatgccaaaaacacagcaagccttttgagaagaatggagagtcccttcatctcagcagcggtggagactctctcctgtgtgtgtcctgggccactctaccagtgatttcagactcccgctctcccagctgtcctcctgtctcattgtttggtcaatacactgaagatggagaatttggagcctggcagagagactggacagctctggaggaacaggcctgctgaggggaggggagcatggacttggcctctggagtgggacactggccctgggaaccaggctgagctgagtggcctcaaaccccccgttggatcagaccctcctgtgggcagggttcttagtggatgagttactgggaagaatcagagataaaaaccaacccaaatcattcctctggcacattatttctaaataagtgttgtttgtggaaatcgtcctatttttatgcctcggttgagggggcaagtaaagtcctggtgaggaatttacagttagaaacttttggaaaaactgaagttcctggaggaaagccaaaccgtgctaacacactagaggctggttttggtcctgggaaaggtttggggtgaatgggttggaagtagggtatgaatacagttttgggattt

SEQ ID NO: 1791 - DNA, 3035 bp, Homo sapiens
cttagcacagtgcttccatgtaatagtgttggacaaatattagctattaaaatatcctcaccgtttaaactttaaaaaaaaaaaaatctgtgcccaggctgccgtgcagtagcatggctcactgcagccttgaactcctgggcccagaaggtcctcctgcctcagcctcatgagtagcgaggactataggcatgtgtcaccaggccattttttatagaaatggaactcgctgtgttgcccaggcttgtcttgaactcctgggctcaagtgatccatcctcctcagcctcccaaagtgctgggattacaggtgtgtgccattgcacccggcttccccgtttgaactttcaaagctaatcatgctgtgtggtatgaggttgaggggaaaaagggatgccccaaattaatgaaactaaatcttccagatgctttcgccagcgccgtgcgtgttctgtgttctttctgcggtcccatcctgggtatgacagtgaattttaggctgggctgtgccttcggctgtgcagggcctcctgcttagaggccctttgtctgacctttggtgacacagcagtagcagcgctcagggtctgtagtgggcgtgtgggtggccagggcaagccctgcacatgtgcctcaaggagcattggctggcccgggtgagcccacccatttgtgagttgctgaggccaccgtgcctgcggccggcgtcctggcatggctgagccgggccatctgctgccttgtggtctctgcctctgcctttccaactctcacttgtcctcctgctcccgcgtgaagagggggaggggaggagttgggaacacgtcctcatgctcggcttctggctggcagtcatgatgggggacagggaacctgtgctgctcacaggtgtcaggaggggcttcctgggccatgcttgggaggagctgggaagctggcgtatgtgtggggggcagagccctctgccacacaggtttcagaaatccttttgcagacggcagtgagaacttgagacttcagtgagagtgttgtcagcctggcgttagtgttgaagagctgggtcgggaagttgcccacccaagaggcaacttgagccatgtaaaagtagtgcgtggtttatggggtgtcgggtcttgcgtgtgcctctgggcctttgggtaaagatggggtgcacccgtgagagcagtggtagatcaggtctgtgagccacccttactcctggggaatggctcagaggactggtgggcgtgaggcatgaccctggtttcttgccatgcggtctaggaacagggacttttgacttcccatcagctctcctctttgaaagcacccttgaccctgaacgattttgcatgtctgtaatttgaatgtcgtgtggttacaggacccggtcagcccaaggagcaggggtccagcagctctgcggaggcatctggaacagaggaggaggaggaagtgcccagtttcaccatggggcgatgacaatgtttgccacagcctctgcctggaacctggctcgtgctgtgaccagaagggaaaggcggctgtttggctctttctcccccgcaaggacccgctgacccgctggatggagagcaaaggagacccctcccgagccgctcacagtcctgtatttggcaggtttgggagcctgaggggccatctccctgacactcagaggcactgccttgcagacaccatccgtgctcctggtaaagggggacagagagcctcaccttgccacatatttgaacagtgatgagtttggggctggtttctgggaagggaacgtttatttagtaaagagcagaacacccttgcgttttgttgggacatgtggaccgtgagtcgcaaacactctggagaaggctgagatgccaccattcccacggggactgaagacacattacgtggacctggtcccaggctcagtgaggagatggcctcagctgtggggctggtccatgttgcccactcactccagtgggaagtggggaccacgccatagagggtctgctcccactgcagctcccggtgctctcgtgttctgggaaggcctgggtgtgtgcacaaggaggcccgggccagggacttcaccaggggctgggtcacaagggcacagggtgtgtggaaagcgctgtgggggaagagccggtcaccggagagtgagcaggcggagactccaagctgggctgagccagagcagaaggcgagggattcccagccggacgggggttctctcaccaacagctgtgatttcatcccgaagtggaagggggtctaaacagaacaggctgagagaggcgggactgggtcaagtgggtggagctcctccttgcatgactgcaactgtcggggctttccgccggctcacagcagttggggccagcggggagaagagaggcggaactgctgtgtcctcatgtggcgcagcctcaaactggcatccaggcactgggcccgtgcagagaaggcacctgcagagagcaggtcagcccggcgcaggggcatgcgcctagaatcccagctactcggaaggccaaggcaggaggaccgcttgagtccagggattcaaggccaacctgggcaatagagcgagaccctgtctcttaaaaaacgatgatgatgaacacagaggacggggcactgtgctgggagccagggggcctgggaggagccgagaccagccttttacctcggggttttgaggccaacagggacgacagagacagtttctagttagagccttggctccatttttggatgatttagccccgagttcctgagtctattttatgccccttacgtactttgatagaactaaggaaatagtggttttgagtgaagggaaaggaaacccagaaacattttacgttgcttttacttctgtagtgtagattgccccggcccctctctgagccctgtagcatctgtgatagcttctgtcccttcatcggttcatgtcacagggattttctttcccaggaagcggacacggagagtcagccctaataaatgagcacatgccctggctgt

SEQ ID NO: 1792 - DNA, 2192 bp, Homo sapiens
agcccagagcagccccgggcaccagcacggactctctcttccagcccaggtgccccccactctcgctccattcggcgggagcacccagtcctgtacgccaaggaactggtcctgggggcaccatggtttcggcggcagcccccagcctcctcatccttctgttgctgctcctggggtctgtgcctgctaccgacgcccgacagcaggcccgaggaagccctggattcctcccggcagctccaggccgacatcttggccgccacccagaacctcaagtcccccaccagggctgcactgggcggtggggacggagccaggatggtggagggcaggggcgcagaggaagaggaagaggaggagccgtgctcaggggtccttgagggggctgtggtggccggtgagggccaaggggagctggaagggtctctcttgttagcccaggaagcccagggaccggtgggtccccccgaaagcccctgtgcttgcagcagtgtccaccccagtgtctaacagtcctcccgggctgccagccctgactgtcgggcccccaagtggtcacctccccgtgtatgaaaaggccttcagccctgactgcttcctgacactccctccttggcctccctgtggtgccaatcccagcatgtgctgattctacagcaggcagaaatgctggtccccggtgccccggaggaatcttaccaagtgccatcatccttcacctcagcagccccaaagggctacatcctacagcacagctcccctgacaaagtgagggagggcacgtgtccctgtgacagccaggataaaacatccctcaaggctgggtgtggaggctcacgcctgtaatctcagcattttgggaggccaagtgcggacatcacttgagaccaggagttccaaaccagccctggcaacattgtgagacccatctctataaaaacaaaaaacagtccactaaatcagccacattaattgggaatcatatgtcacaggtcatttgtggggcaaacatcactgcttttccatcaagggagcaaagaataagtgggagttttggaagagtttggatgagagacgccaaggtgcccagcgttcgtaaggcaacatgcagcctggcgtgaagcagtattttgaaactgcaaatggttcccttcttgtgtcctttcaatgctgaatattttagtgtcattctgcctgtgctcagagctccagcagcagaagtgtgtgtggttaattaggacacttctgtgagaggacccctgcacacattacgacaggtccctaaatgagcatttcccaaactaggttccccgaggcactctacggaaacaagatttttttttttgagacggagtctcggtctgtcacccaggctggagtgcagtggtgcaatcttggtgcaatcttggctcagtgcaatccgcctcccaggttcaagcgattctcccgcctcagtagctgggattacaggtgcccaccactgcgcccagctaaattttgtatttttagtagagatggggcttcaccatgttggccaggctggtctggaactcctgaccttcaggtgatccacctgcctctgcctcccaaagtgctgggattacaggcgtgagccaccgtgcccggcccaaactactttttaaaacagctacagggtaaaatcctgcagcacccactctggaaaatactgctcttaattttcctgaaggtggccccctgtttctagttggtccaggattagggatgtggggtatagggcatttaaatcctctcaagcgctctccaagcacccccggcctgggggtgagtttctcatcccgctactgctgctgggatcaggttgaatgaatggaactcttcctgtctggcctccaaagcagcctagaagctgaggggctgtgtttgaggggacctccaccctggggaagtccgaggggctggggaagggtttctgacgcccagcctggagcaggggggccctggccaccccctgttgctcacacattgtctggcagcctgtgtccacaatattcgtcagtcctcgacagggagcctgggctccgtcctgctttagggaggctctggcaggaggtcctctcccccatccctccatctggggctcccccaacctctgcacagctctccaggtgctgagatataatgcaccagcacaataaacctttattccggcc

SEQ ID NO: 1793 - DNA, 2290 bp, Homo sapiens
ttcaacacgctgatggcagtcacagggggcctgtgtcacagtgccatctccagactcaaggactcccatgcccacctgagccctgacagcaccaaggccctcctggagctcactgagctccttgcctcccacaacaactacgcccgctaccgccgcacctgggctggctgcgcgggtttccggctgcctgtactgggcgtgcacctcaaggacctggtgtccctgcatgaggcacagcccgacaggttgcctgacggccgcctgcacctacccaagctgaacaacctctacctgcggctgcaggagctggtggccctccaagggcagcatccaccctgcagcgccaatgaggatctgctgcacctgctcacgctctccctggacctcttctacacggaagacgagatctatgagctttcttatgcccgggagccgcgttgtcccaagagcctgccaccctcccccttcaatgcacctctggtggtggagtgggcccctggtgtgacacccaagccggacagggtcacactgggtcggcatgtggagcagctggtggaggtaaggaggggagggtggcccggccgccagcagccaggagggaagacatctgtagaaccctgagcctggaggtggggacttatggccatggggatcatatttcgacaactgggccttatctgcttccccacactcctctgaagtctgtgttcaagaattatgaccctgaaggccgaggaacaatctctcaggaggactttgagcgactctcgggcaattttcccttcgcctgccatgggcttcacccacccccacgccaggggagaggatccttcagcagagaggagctgacagggtacctgctccgggccagcgccatctgctccaagttgggcctggccttcctgcacaccttccatgaggtcaccttccgaaagcctaccttctgcgacagctgcagtggcttcctctggggtgtcaccaagcaaggctaccgctgtcgggagtgcgggctgtgttgccacaaacactgcagagaccaggtgaaggtagaatgtaagaagaggccaggggccaagggcgatgcaggaccccccggagctcctgtcccatccacaccagctccccatgccagctgtggctccgaggaaaatcactcctacacgctatccctggagcctgagactgggtgccagcttcgccatgcctggacccagactgaatccccacacccttcctgggaaacagatacggtcccctgcccggtgatggacccaccatcaactgcatcctccaagctggattcctagacatctcttggtctcctctcttcctcactcccttcccccagtcagtcctgagtcctgccgtcagactctggcagggctcccagaggtaggcctccagaggcatccgccttcccatccacactgcctttagtggtacgtccgtcatctttttccctggaagtgactttcctcttttgcatcctggtggatgctaatcctgctccctttccctgcacttagtatctgtgcggctgtgtgttggatacatttagactcaggcctcattctaccaactccctacatctccatttctttttttttttgagacagagtcttgctctgtcacccaggctggagtgcaatgatgcaatctcagctcactgcaacttccgcctcctgggttcaagtgattcttctgcctcagcctcccaagtagctgggattacaggcacgcgccaccatgcccggctaatttttgtatttttagtagagacggggtttccccatgttggccaagatggtctcaaactcctgacctcatgatccaccagcctcagcctcccaaagtgctgggaatacaggcgtgagccaccacgcccagctcctgtttttctgcatagaacgtgctccctctgacagcctatactttttccctctttatctcgttgaacgtctgtctttcctcaacaggagcatcaacttcaggagaacagggatttctatcaatgtcattcactgctgcatccccagtgcctagaacagggctggcaggtggtaggcgcctgacagatgcttgtctgatgcctgaatgtctccttacccatgcccacggcacaggatagatgtgctatagggcaaagaactttgagggtcgagcagcaggggcccattcagtcccagggagcagagacccccccaaccccttcacaaaccccaacgcccctgacttggcccccacagagagaggtcctacagctgtcataaattaaatttattctctggag

SEQ ID NO: 1794 - DNA, 1751 bp, Homo sapiens
atctctctactggtcacacatgcatccttgctattggtcctggccctgctcctgcggctttgtagacagcccctgcatctgcacagcctccacaaggtgctgctgctcctcattatgctgcttgtggcggctggccttgtgggactggacatccaatggcagcaggagtggcatagcttgcgtgtgtcactgcaggtcccaagattctgctactgctcctattttttggagttgtcctggtcatctacttggcccccctatgcatctcctcaccctgcatcatggaacccagagacttaccacccaagcctgggctggtgggacaccgaggggcccccatgctggctcccgagaacaccctgatgtccttgcggaagacagctgaatgcggagctactgtgtttgagactgatgtgatggtcagctccgatggggtccccttcctcatgcatgatgagcacctcagcaggaccacgaatgtagcctctgtattcccaacccgaatcacagcccacagcagtgacttctcctggactgaactgaagagactcaatgctggatcctggttcctagagaggcgacccttctggggggccaaaccgctggcaggccctgatcagaaagaggctgagagtcagacggtaccagcattagaagagctattggaggaagctgcagccctcaacctttccatcatgttcgacttgcgccgacccccacagaaccacacatactatgacacttttgtgatccagacattggagactgtgctgaatgcaagggtgccccaagccatggtgatgttgccaggaccccctctccccaccctgccttccctaggccatgatgatgaggatgattttgaggctgcccctacccccagggccctgccccagctcacataccccattctgtggtcaaaactgtttgcccctgtccctgcccttggaatccctaggtcttccccagcttcacacccatccttcctgaaccacaggtcttttggctaccagatgaagatcgggctaatgtccaacgacgggcacctggaatgcgccagatatatggacgtcagggaggcaacagaacggagaggccccagtttcttaacctcccctatcaagatctgccactattggatatcaaggcattgcataaggataatgtctcggtgaacctatttgtagtgaacaagccctggctcttctctctgctttggtgtgcaggggtggattcggtcaccaccaacgactgccagctgctgcagcagatgcgttaccctatctggcttattacccctcaaacctacctaatcatatgggtcattaccaattgtgtttccaccatgctgcttttgtggaccttcctcctccaaaggagatttgttaagaagagagggaaaactggcttagaaacagcagtgctgctgacaaggatcaacaatttcatgatggagtgaatgccctgccctgcttccccacccaagccagtctacattgcccaaacagcaagggttggagagtggcttaagtggaatgcttcaggggtggtgggttgcaagtggggggagctttgccaacaggaggttttgaaccatgagggccctctgcccaggtgatgggcattccctaagctgctatggaatctgctccctttggggttttgacctgagatgtttgggaagagtgagtaatgagaagtttctcctcaaatgaaactagaacagaggaagtaaaagggagattgctcgg

SEQ ID NO: 1795 - DNA, 2512 bp, Homo sapiens
aagtggagatgataagagactcagaaagcctcaatggaatggagctggctcactcttccttctctgaaatgcagacagctgtgagtgacatgggcctctggagaatgcaagtctttgccatggcacggctccgtttcttaaagttaaaacgtcaaactaaagtgttattgaccctattattggtatttggaatcgcaatattccctttgattgttgaaaatataatacatgctatgttaaatgaaaagatcgattgggaatttaaaaacgaattgtattttctctctcctggacaacttccccaggaaccccgtaccagcctgttgatcatcaataacacagaatcaaatattgaagattttataaaatcactgaagcatcaaaatatacttttggaagtagatgactttgaaaacagaaatggtactgatggcctctcatacaatggagctatcatagtttctggtaaacaaaaggattatagattttcagttgtgtgtaataccaagagattgcactgttttccaattcttatgaatattatcagcaatgggctacttcaaatgtttaatcacacacaacatattcgaattgagtcaagcccatttcctcttagccacataggactctggactgggttgccggatggttcctttttcttatttttggttctatgtagcatttctccttatatcaccatgggcagcatcagtgattacaagaaaaatgctaagtcccagctatggatttcaggcctctacacttctgcttactggtgtgggcaggcactagtggacgtcagcttcttcattttaattctccttttaatgtatttaattttctacatagaaaacatgcagtaccttcttattacaagccaaattgtgtttgctttggttatagttactcctggttatgcagcttctcttgtcttcttcatatatatgatatcatttatttttcgcaaaaggagaaaaaacagtggcctttggtcattttacttcttttttgcctccaccatcatgttttccatcactttaatcaatcattttgacctaagtatattgattaccaccatggtattggttccttcatataccttgcttggatttaaaacttttttggaagtgagagaccaggagcactacagagaatttccagaggcaaattttgaattgagtgccactgattttctagtctgcttcataccctactttcagactttgctattcgtttttgttctaagatgcatggaactaaaatgtggaaagaaaagaatgcgaaaagatcctgttttcagaatttccccccaaagtagagatgctaagccaaatccagaagaacccatagatgaagatgaagatattcaaacagaaagaataagaacagccactgctctgaccacttcaatcttagatgagaaacctgttataattgccagctgtctacacaaagaatatgcaggccagaagaaaagttgcttttcaaagaggaagaagaaaatagcagcaagaaatatctctttctgtgttcaagaaggtgaaattttgggattgctaggacccagtggtgctggaaaaagttcatctattagaatgatatctgggatcacaaagccaactgctggagaggtggaactgaaaggctgcagttcagttttgggccacctggggtactgccctcaagagaacgtgctgtggcccatgctgacgttgagggaacacctggaggtgtatgctgccgtcaaggggctcaggaaagcggacgcgaggctcgccatcgcaagattagtgagtgctttcaaactgcatgagcagctgaatgttcctgtgcagaaattaacagcaggaatcacgagaaagttgtgttttgtgctgagcctcctgggaaactcacctgtcttgctcctggatgaaccatctacgggcatagaccccacagggcagcagcaaatgtggcaggcaatccaggcagtcgttaaaaacacagagagaggtgtcctcctgaccacccataacctggctgaggcggaagccttgtgtgaccgtgtggccatcatggtgtctggaaggcttagatgcattggctccatccaacacctgaaaaacaaacttggcaaggattacattctagagctaaaagtgaaggaaacgtctcaagtgactttggtccacactgagattctgaagcttttcccacaggctgcagggcaggaaaggtattcctctttgttaacctataagctgcccgtggcagacgtttaccctctatcacagacctttcacaaattagaagcagtgaagcataactttaacctggaagaatacagcctttctcagtgcacactggagaaggtattcttagagctttctaaagaacaggaagtaggaaattttgatgaagaaattgatacaacaatgagatggaaactcctccctcattcagatgaaccttaaaacctcaaacctagtaattttttgttgatctcctataaacttatgttttatgtaat

SEQ ID NO: 1796 - DNA, 2291 bp, Homo sapiens
taagaaagcataaccagcaataaaaatactatttttgagtctaaatgatagaagcccaaatatattttgttcatggtacaaaggaagcctagagtcaagttgatttcacaagttactggttccagatattcaacgagatcttcacctctctttctgttatgtctctatctgggcatctgtctcactttctctgtgtctctttgtccttgtatagttctttctgcgtgtctctctgcatctttgtttctgcccccttgttgtgtctttcactacattgttgcctttctttctatttttctaatccattgtcactatgtatctgcattttttctatctccatgtttctttttgcatctatttttctgtatttgtcttccttatcacttcatatcttacctcatctctctgtgtgtgtgtgtgtgtgtttgtgtgtgtgtctgtttgtctgtctctgttatatatgtttctagacttgtctaccagagttttgacaactttaggaaagattctgattggccaagcctgggtaacatgcacacccctcaaacacattgtcctgtacacgggatgctgacagccagcattgtgtccatcgctcttattaggaaggaggactggattttccagatccttgtggtcctggaaatgacttccagtgtgcagatgtctacaccagtcatgtggagcacttcagcctccagagcctcctcacagtggaggggtgtaaggggcagtttgtttcttgtggagcacacaggacaaatggcagagctccctctggttctagggtccctcactgggggtacctgttcacagtcattccactccttgtctgagttccctttgtcattgacatagtaacctgttgattcctgatgacactctcttcccagttaggaaggtcactacgcactgtggcccctttgatgtgggcccaaccctgaagctggtctacatctcagtctctgagtttcatcatgaagacagagtctgggagcttctgcgaggttatggaaggccatgaccctgaaagcagacatcccatcttcctttctccctcacccacacactgggcgtgaggagtctttggcaggctcttccttcttatggatgaggtcagagtggagaactaggtctccttgggaccttcatctcctgtactccagactgtcatgcaggtcctcagacagggacactggcgcacaaagaggcaccaacacttgagattctgctccccagggttatggtctgaattttccccaagcagaatgctgaatgaagtcaaaagttttgtgctgattttgtcctcttcctcagggtgggcattgtcattgaccatagggatcaaaagggagtgccacttttggggaaatggggaaagcatgtgctgggttgtccagggtgtcctcagtctctatgtgtagctgtggggaaaagaaagagagatcagactgttactgtgtctatgtagaaagaagtagacataagagactccattttgttctgtagtaagaaaaattcttctgccttgagatgctgttaatctgtatccctatccccaaccctgtgcttgcagaaacatatgctgtgtcaactcaaggtttaacaaagcaggatgtgctttgttaaacaaatgcttgaaggcagcatgcttgctaaaagtcatcaccactccctaatctcaagtacccagggacacaaaacactgcggaagtccacagggacctctgcctaggaaagccggatattgtccaaggtttctccccatgtgatagtctgaaatatggcctcatgggaagggaaagacctgactgtcccccagcctgacacccgtaaagggtctttgctgaggaggattagtaaaagaggaaggcctctttgcagttgagataagaggaaggcatctgtctcctgctcgtccctgggcaatggaatgtctcggtttaaaacccgattgtatattctatctactgagataggagaaaactgccttagggctggagatgagacatgctggtggcaatactgctctttaatgcattgagatgtttatgtatgtgcacaaaaaagcacagcgcctttttctttacctcgtttatgatgcagagacatttgttcacatgttttcctgctgactctctccccactattaccctattgtcctgccacatctccctctccgagagggtagagataatgatcaataaatactgagggaactcagagactggggccggcgtgagtcctcagtatgctgagcgccagtcccctgggcccacttttctttctct

SEQ ID NO: 1797 - DNA, 2131 bp, Homo sapiens
atttctgtcctgtaaggaacagtgattgcccctgctccggaagatgtaatgtgtaaggtaccatcctgggggtggccctctccagacaccaagcctgctggcaccttgatcttggacttcccagcctccagaactgtgagaaataaatttctgttctttattaattacccagcaatttttatagctgcacaaaatggtttaagacagaggtcatagcaagcttcagtttttactttttccccttgcatctgaacaattgcaagcagaaagaagaactgagtgctttatttctgcaaccaccatgctgctactgagtgaaggggaaggaggggtaagagcttgccttctttccttgtgttaattgcaacatcttccaaaacccagcaaggaaggcatgaagtgagcctaccaaggccagtctccagatgaggggactatagctacagattgctatgtttcctgttggtggtggtagcaagatttcataggggcctttcttgccattgctcaaaatgaaatgcattgacaccaaaggaagtggtgaaactgtgggcattgtatgctttagaaatttgatatttggaaacctgcagacctgaagaggcagtagcttctcctgaagatctgatatccaagggctacccagacaaggagctgacttgtcaggaagtgtggtggaccttgacgcaaaaactcaaaccacaaatgtttcacttctaaatttttgcaggctttgttatatagacatttttgttaagccctgtctaaaacaataggatgactgggttctttcccctcctcatggtgactacgtgcatcttctacgaacattcccatgtcatgtggtcagcttccaagaaagactttaccaatgagtctgtttacagattctcaaccagaggacttacaggaatgcacagtagctatttgtttgggatgcagaggtacatgagccccagacctcatccccaatcaggcagttgggtaggaatggtgtggttactgatggtgggaggacagggatggtggggactttcctgtggagggcccaccactgaagaaatctctctacctcctggtttgatccaggctttccagggataaaataagagggggaaacaaagaagtaatcattccccagcccccagtatgccccatctctgactcagctcccagcagagcagtaataggtccctgcttatcagatggcatcggaagggggtgggtgcctgggtgggtgcctggctgtgtgcagtgaggaggtctcagcagcagcctctgaagccaactgcttggctggaatctaggtgcgctactcactagctggggaacttacagcaagttacttcacctcttacgcctcagttttctcatctgccaaaagggagtactaatagcagcatcattgacaaaagctgaaaggtggaagcaagccaagtgttcatccactgagaaatgcataaataaaatgtggcctagacatacatggaatactattcaacctcaaaggaagagaatctggacgtgtactgcaacatggatgaactctgaagacatcatgctgagtccaaggacaaacactgtatgattccacttagatgaggtacttagagctgtcaaatttgtagagatagaaagtagaatggtgcaggtcaggcgttcaacaccagcctggccaacatggaaaaaccctgtctctattaaaaaatacaaaaattagccaggcgtggtggtgtgcacctgtaatcccagctactcgggaggctgaggcataagaatcacttgaacccaggaggtggaggttgcagtgagccaagatcgcaccattgcactccagcctaggcaaaaagagcaagactccgtctcaaaaaaaaaaaaaaaaaaaaaaggaaagtaggacggtggctgccaggggctggaggaagaggggaatgggaagttcttgcttaatgagcatagtttcagtttcgcaagatgaagagttccagagatggatgggaagatggatgcacaacagtatgaatgtacttaatgccactgaactacacacttaaaaatggttacgatggtaaatgttgtgtatgtatattttaccacaatttttaaaaataaataaggagaaatattaccc

SEQ ID NO: 1798 - DNA, 2320 bp, Homo sapiens
atatttatggaccgcaggcctgcgcggcgtggagcctgggcattctcgggggagcgagagaggcacagtcccgccctccctttacctccctggagaggaactcgagggcatcctcacagaaggaacagacagagattttcccaagtacagtgcagacacatgaggtgggctgtacgtttgggggctgccacaagtacgctggggacgtgttcggagatacttttcctggagagtgggagagctcggcctcaaggaagaggactcagcgccaggctgaggatgaggtctaggtggctcgatctcctgcagggcacattgggcaccttgctttacgccctcatctcttgggctggagctgccccagcacctggcagcatggtgtttctagggtacgtggtacttgtctgtcttaaaacttgcctgtatgtttttaacctttgcgtctgtctttcagtggaatcaactatgacaagccgctgcctcccatccaggtggcatctctccgtgcagagcgaatcgcaaaagagaaaaaggtcagcgccctgggcccttctgcttgagtgggaaaatgtggtgactgtgacttcatccagggggtatgcaggccgagtctgcccctccagtggctcctcttccttcctggcccctcaggctctggctgatcagcagaaggcacagcagccggccgtggcccagccacccccgccccagccgcagcccccaccacccccgcagcagccaccgccaccgctgccacaaccacaggcagcgggcagccagccgccagcagggccaccagctgtccagccccaaccccagccacagccccagacccagccacagcctgtgcaggccccagcgaaggcgcagcccgcaatcacgacggggggcagtgcagccgtactggtgagcaggggcctcctcccgggcttcccctctacgggaagtcacccacacctgcacttgattcaagtgctttctgttgaaacgaagacttgttgccagttctagcacatttccagcttgtagaccttcctctgaagaaatgggaaaaggcttagtctcatcccagaggaattgtgtgttttcacctggattctgccatttctctcctccagggcttttgtgggcttagtggctttattggatttggcaggtagaggcagctccttttagtggaggtggttgggaagtttgtaattgcctgggttttgtaaaacatacctgtgacgcattcacttcctgacttcctacacacttagagagcaggtactgcctgtgtcggtgtctcaaagcatgcccatgtgtgctcccccacacaggtcagtctttaatgcctgttgtagaaaagctgtaaagcacacaagaagcattgtgaaaagaaaggcagggtgcggagctgcggactgtggccatgcacaccacgctctggtgtatctctgtactgtgtgcgtccgtgtgccacacagacgctgaaatcatatgcgcagaatcacacctgcagagaataggagctgtgccaaattggggaaacccacactttggactaccaggcaggcataaaaatatttttgttacatagaaccatttcctgcagtagtttttagaaaattgtttgctgtagtggaatttttatatgtactcaggcaacttcattcctcatttattcaaaagggatctttgtgaatacttacttggtgcaaggtgggcaagatgggcagtgcccacattctggagccacgtcctacaggggagggaggcagccaaagggatcattttaaatgctggcgggaggagtcagggtggcacaatgcaggactggcttgttaggaaacacctttctgaggacttggcatttgagctaaggcctgaatgacaaggagttggtcataagaagaacaaaacagcaagtacagaggccctgagcttggctgatatgggggccagaaagctcagtgtggctggactcaggtggtgagggacagagggtggatgaatggagtggagggacggaggagtggagggacagtggggtgagggtggagggtccctggggtggagggacaatgggataggggtggagggacagcaggtagacagagtttgtaccctgtgttttaccttaacaacattctatttgctctttgtatatttaagtgttgtaaggaaacgtgtttcaatcaaaactgaccatgagataaaggaaagagatgtggcttttgtgatattctatcacaaacacttattgtatctctgtaaaatacaatgtatgtatgcatgtaagtgtttttgtcctaatgttgctactcccatggcaaag

SEQ ID NO: 1799 - DNA, 2175 bp, Homo sapiens
tgtttcagggaaattctccagcattagagatcaagttattgatctttctgctgcattgcaggtggggatcaatatcttcagaattggccaggcaaaatacatttgcttaacattcagctgctacagataactgcaggtgctgggatgatggtacttggtgaatcctataggtgagcaggggtgtgagatcctgctctgagccctgtgtgtgcggcctcctggttgtgtggcatgtggtaagtgtgtagtaaacacttaatgaatgggtgaagttatgaagtcatcagatatgtgtgccagtgtgtctgttattatggatgcttttggctctaacaaagtggcttaaacaacaggcacatttgatattattttcttctcataacaggtgcaatgggcaggtccagggttggttgagcaccagggcagtgttgagactctggtccaacttctctgggcgttttctttttgcttgtcagagagcgacctcggctgcaagtattatgttcttacacggacgcccaagagcagaaaggaaaaagggcagggatgttctcagaggctcccagcaggtctcacttgtgtctcagtgtctacacttggcatacacttacgcttcccttgccagcaaggctgggaaaggagtcattagcatttttaccctgtatcagggcaggtgggtttcactggcaaagaggaagaggaaggggactggccactaggtcaaaacccacagtggggctggggatacagggatgaaagagagatgaggctcctgccttcagggagtgtctagtgacagtgacagagggatgagagaagtatgagatgttgctcaccctcaggaagattgtaacctagggaccttaagcatatatgtatgtatctatcccaagccaggagaaaggtggggccaaagctctgtatgaaggccagggggatgagggatcctttgcagctgcgagctctgtgcaggaggagagggagcgtttgctctgagctaggaagagaggtgattttcagacagaaagcctagagagatggagtggctgcaggggcttcaggaggctgtttgggagcccaggcagaaggtggcaagtgagtgtgcaattctcagagagtggctgggtaaggagtggggatccagcaggtctggggcagctgctgctgagtctgggctgtttccagtgctagctggctgagcatttgcaaattttaatctttccctgggtattggatggtgttctggcaagttctctaggagtcccagtggtgtttagaccctggaagtgtaagaactgactgtgatttttttttttctcttgtttgaaaaagtcctaagtgtatgggaagtggctatggtgccctctcactctgcccctcccgtgtgcttgtgctctgcaggtatggatttaacagtcacgggctttcagtggtggaacacaggttacgggccagacagcagaagcaggccaagctcacagaagttgggcatcgatgggctgattgttacgaacaccaccgtgagtcgccctgcgggcctccagggtgccctgcgctctgaaacaggagggctgagtgggaagcccctccgggatttatcaactcaaaccattcgggagatgtatgcactcacccaaggccgagttcccataattggggttggtggtgtgagcagcaggcaggacgtgctggagaagatccgggcaggggcctccctggtgcagctgtacacggccctcaccttctgggggccacccgttgtgggcaaagtcaagcgggaactggaggcccttctgaaagagcagggctttggcggagtcacagatgccattggagcagatcatcggaggtgaggacagcgtctgacgggaagcctgatctggaaccttcccaaggactcaggcaagcctttgtggctggatcatgagaggagggactccatcttgagccatgtcccccagccatggcatggctgcactgtaaacgccaatcggggggtcaccaggatcaaccgcaggctttcttcagtcccttggtcagaccataaactgcatttttgattctttgtggattcaaaccctaggatccatcagtcttgcaaggacattgaatattaggaggaaaaagtcatggaaaaaataaagccatttagaacctgggtttcaaaaaaaaaag

SEQ ID NO: 1800 - DNA, 2147 bp, Homo sapiens
ttaaatgcatatttctgtacttcaaccccttcaactccccttcccagagagtcagattctgtctgtcttggggaagggtcccagtatctgcattttttatggctcctcttatgcattctttttttttttttttttttttttgagacggcgtcttgctctgtctcccaggctggagtgcaatggcgtgattttggctcattgcaccctccgcctcccgggttcaagcgattctcctgcttcagcctccccagtagctggaactacaggcgccctccaccacgcccagctaatttttatatttttaatagagatggggtttcaccatgttggccaggatggtctcgatctattgacctcgtgatctgcccgcctcggcctcccaaagtgctgggattacaggcgcgagccaccgcgcccggccggctcctcttatgcattctaaagtttgtgacctactgtttcctgacccatcctgattagtcctgggcttttaattgtgcatatctgcacaattaaatcttaattggtattaatttggtagtagattctaatactgtacttttttctccttttcatgatgggtaataagtgagcaagcagcacttgcgaagcgcagtttcaagtgaaggatgcatctgtgatgcaaaatcatcgaccatttatttgtaatggtgtgtatgtaaccttcaccaaggtattttactggggctagtgcttttacaggcatttccaactttgtagattgctacctctggatctgagaaactgcagctaaagtgaagtcggctttaatactgtttcatggattcattggtacaccctcccaccgtgtttatttgtattttgcaattgtttgagattattgttttggttttttgcactaagcaattgcttggttaatcctaaacaaccacagtgatgaggaaagcatgtgattgtaactaactgcctagggtgagtacctttcagtgagggtttgatttcagtgttagccagagaaggcactagtagccatattattagaagattgtagtaaattgtaaagtctgatcgggagttttgttattttttatgtagcaagacagaaattttgtagttcaaattgaggtttttatattctagatctcaacctgaaaatgaaattacttaatcattaacactgattctaatatctgaaatgagttttcttccatttatcaaactcaagcctacccttccttccatgaaggtttaacatgaaggtttaataatttatgaaggaaattgaactatgttcttttctaaaatctttggaatgttagcagatactgtcattgacactgaaaagttgtttagaaaaggaaaaatagctaaagcttctgtccacattttttacttgtatactttttctttttgctttaaaaatgttcagaatttgggagcaaaaattgaaagcaaaaaactagtaattataatgcatgatggcatctattaatatgtattttactagttttcattcagagtcaccaaaatgttcatagtaacttactatgttactatggagtaagatagaaaagcattttctaccctgctccctgccccccccctttttttttgagacagagtctagctctgtcacccaggctggagtgtggtggcatgatcttggctcactgcaacctccacctcctggcctcagcgtcccgagtaattgggattgcaggtgtgggccgccacgcccggctaatttttgtatttttagtcgacagggttttgccatgttggccaggctggtcttgagctcctgacctcaagtgatcggtccgcctcagtctcccaaagtgctgaggttacaggcgtgagccactgcgcccggctggcatttcctaccttactccatagtaaaatagtaagtgttggcttctcagaattgccagcagtccatgtgttatatgtgtatgtaattgctatttgcttttcttcccaaaacatacagaattagagtgaatagtataataaattgaactccccatgtacccatgcccaatttagcaatattagcacatagtcaatattatttcctctgtatcccttccattattttgaagcaattctgttattgtcaaccttaaagcggtcattgtatatctgtaaaatacaaggacttt

SEQ ID NO: 1801 - DNA, 1618 bp, Homo sapiens
agctctgggagaggagccccagccgtgagattcccaggagtttccacttggtgatcagcactgaacactgaccaccaaccatggagtttgggcttacctgggtcttccttgttgctattttaaaaggtgtccaatgtgaggtgcaactggtggagtctgggggaggcttggaacggccagggcggtcactgagactctcctgttccacttctggattcaacttttatgatcacgctatgtcttgggtccgccaggctccagggaaggggctggagtgggttgctttcattagaagcaatgtttatgaagggacaacagaatacgacgcgtctgtggaaggcagattcatcatctcaagagacgattctacgcgcagcgtctatctacaaatgaacaatttgagaaacgaggacacaggcgtgtatttttgtgccagagtcccgcccagcagtggctggtactataattatgtggacgtctggggcaaagggaccacggtcatcgtctcctcagcatccccgaccagccccaaggtcttcccgctgagcctctgcagcacccagccagatgggaacgtggtcatcgcctgcctggtccagggcttcttcccccaggagccactcagtgtgacctggagcgaaagcggacagggcgtgaccgccagaaacttcccacccagccaggatgcctccggggacctgtacaccacgagcagccagctgaccctgccggccacacagtgcctagccggcaagtccgtgacatgccacgtgaagcactacacgaatcccagccaggatgtgactgtgccctgcccagttccctcaactccacctaccccatctccctcaactccacctaccccatctccctcatgctgccacccccgactgtcactgcaccgaccggccctcgaggacctgctcttaggttcagaagcgaacctcacgtgcacactgaccggcctgagagatgcctcaggtgtcaccttcacctggacgccctcaagtgggaagagcgctgttcaaggaccacctgagcgtgacctctgtggctgctacagcgtgtccagtgtcctgccgggctgtgccgagccatggaaccatgggaagaccttcacttgcactgctgcctaccccgagtccaagaccccgctaaccgccaccctctcaaaatccggaaacacattccggcccgaggtccacctgctgccgccgccgtcggaggagctggccctgaacgagctggtgacgctgacgtgcctggcacgcggcttcagccccaaggacgtgctggttcgctggctgcaggggtcacaggagctgccccgcgagaagtacctgacttgggcatcccggcaggagcccggccagggcaccaccaccttcgctgtgaccagcatactgcgcgtggcagccgaggactggaagaagggggacaccttctcctgcatggtgggccacgaggccctgccgctggccttcacacagaagaccatcgaccgcttggcgggtaaacccacccatgtcaatgtgtctgttgtcatggcggaggtggacggcacctgctactgagccgcccgcctgtccccacccctgaataaactccatgctccccc

SEQ ID NO: 1802 - DNA, 1611 bp, Homo sapiens
atcacataccaaccacagtcctcctctaaagaagcccctgggagcacagctcatcaccatggactggacctggcggttcctctttgtggtggcagcagcgacaggtgtccgggcccaggtgcacctgatgcagtcagcggctgaggtgaagaagcccgggtcctcggtgcgggtctcatgcaggactcccagtcagacacccaatatgcacgctatcagttgggtgcgacaggcccctggacgagggcccgagtggatgggagatgtcaggccctctctgaagactacaacctacgcgcagaagttccttggcagagtcacaatcaccgcggacgagtccacgcgcacagcgtacatggacctgaccagcctgacatctgaggacacggccatgtattactgtgcgggaagagacgaggaatattgtattgatttgagctgttttacttcaggggtttatggattgggtctctggggccaagggacaatggtcatggtctcttcagcatccccgaccagccccaaggtcttcccgctgagcctctgcagcacccagccagatgggaacgtggtcatcgcctgcctggtccagggcttcttcccccaggagccactcagtgtgacctggagcgaaagcggacagggcgtgaccgccagaaacttcccacccagccaggatgcctccggggacctgtacaccacgagcagccagctgaccctgccggccacacagtgcctagccggcaagtccgtgacatgccacgtgaagcactacacgaatcccagccaggatgtgactgtgccctgcccagttccctcaactccacctaccccatctccctcaactccacctaccccatctccctcatgctgccacccccgactgtcactgcaccgaccggccctcgaggacctgctcttaggttcagaagcgaacctcacgtgcacactgaccggcctgagagatgcctcaggtgtcaccttcacctggacgccctcaagtgggaagagcgctgttcaaggaccacctgagcgtgacctctgtggctgctacagcgtgtccagtgtcctgccgggctgtgccgagccatggaaccatgggaagaccttcacttgcactgctgcctaccccgagtccaagaccccgctaaccgccaccctctcaaaatccggaaacacattccggcccgaggtccacctgctgccgccgccgtcggaggagctggccctgaacgagctggtgacgctgacgtgcctggcacgcggcttcagccccaaggacgtgctggttcgctggctgcaggggtcacaggagctgccccgcgagaagtacctgacttgggcatcccggcaggagcccagccagggcaccaccaccttcgctgtgaccagcatactgcgcgtggcagccgaggactggaagaagggggacaccttctcctgcatggtgggccacgaggccctgccgctggccttcacacagaagaccatcgaccgcttggcgggtaaacccacccatgtcaatgtgtctgttgtcatggcggaggtggacggcacctgctactgagccgcccgcctgtccccacccctgaataaactccatgctccccc

SEQ ID NO: 1803 - DNA, 1612 bp, Homo sapiens
agctctgggagaggagccccagccctgagattcccaggtgtttccactcggtgatcagcactgaacacacagaactcaccatggagtttggactgagctgggttttccttgttgctattttaaaaggtgtccaatgtgaagtgcacctggtggagtctgggggaggcgtggtacagccgggggggtccctgcgactttcctgtgcagccttcggattcccctttaatgaatatgccatgcagtgggtccgtcaacctccagggaagggtctggagtgggtcgccctcatcagtggcaatggttttggaactcactatgtagactcggtgcagggccgattcaccgtctccagagacaacgccagggctgtcctatatctccaaatggacagtttgagacctgaggacaccgccttctattattgtgcaaaacgcctgggtcacacattcggttacattgactcttggggtcagggagtcctggtcaccgtttcctcagcctccaccaagggcccatcggtcttccccctggcgccctgctccaggagcacctccgagagcacagcggccctgggctgcctggtcaaggactacttccccgaaccggtgacggtgtcgtggaactcaggcgctctgaccagcggcgtgcacaccttcccggctgtcctacagtcctcaggactctactccctcagcagcgtggtgaccgtgacctccagcaacttcggcacccagacctacacctgcaacgtagatcacaagcccagcaacaccaaggtggacaagacagttgagcgcaaatgttgtgtcgagtgcccaccgtgcccagcaccacctgtggcaggaccgtcagtcttcctcttccccccaaaacccaaggacaccctcatgatctcccggacccctgaggtcacgtgcgtggtggtggacgtgagccacgaagaccccgaggtccagttcaactggtacgtggacggcatggaggtgcataatgccaagacaaagccacgggaggagcagttcaacagcacgttccgtgtggtcagcgtcctcaccgtcgtgcaccaggactggctgaacggcaaggagtacaagtgcaaggtctccaacaaaggcctcccagcccccatcgagaaaaccatctccaaaaccaaagggcagccccgagaaccacaggtgtacaccctgcccccatcccgggaggagatgaccaagaaccaggtcagcctgacctgcctggtcaaaggcttctaccccagcgacatcgccgtggagtgggagagcaatgggcagccggagaacaactacaagaccacacctcccatgctggactccgacggctccttcttcctctacagcaagctcaccgtggacaagagcaggtggcagcaggggaacgtcttctcatgctccgtgatgcatgaggttctgcacaaccactacacacagaagagcctctccctgtctccgggtaaatgagtgccacggccagcaagcccccgctccccaggctctcgtggtcgcgcgaggatgcttggcacgtaccccgtgtacatacttcccgggcacccagcatggaaataaagcacccagcgcttccctgggcccctgcg

SEQ ID NO: 1804 - DNA, 1821 bp, Homo sapiens
aactctgggagaggagcccagcactagaagttggcggtgttttcattcggcgatcagcactgaacacagacgactcaccatggacactgggttgacctgggttttcctcgttggtcttttaagaggtgtccagtctgtcgtggagattgtggagtctgggggaggcgtggtgcaacctgggacgtccctgagactctcctgttcagcgtcgggattcaccttcagaaattctgccatgtattgggtccgccaggctccaggcaagggactggagtgggtgggccttatatggaatgatggaagtcacaaatactatggcgactccgtgaggggccgcttcaccatctccagagacaactccagaaatatgttttacctgcaaatgaacagcctgaaagtcgaggacacggcaacctattactgcgcaaaagaggccgccgacaactgcagaattgacggccacgaaatgtggaggtgtctggcagacaagcagaaggggtcccgagacgacgtggacgtctggggccaagggatcacggtcaccgtctcgacagcctccaccaagggcccatcggtcttccccctggcgccctgctccaggagcacctctgggggcacagcggccctgggctgcctggtcaaggactacttccccgaaccggtgacggtgtcgtggaactcaggcgccctgaccagcggcgtgcacaccttcccggctgtcctacagtcctcaggactctactccctcagcagcgtggtgaccgtgccctccagcagcttgggcacccagacctacacctgcaacgtgaatcacaagcccagcaacaccaaggtggacaagagagttgagctcaaaaccccacttggtgacacaactcacacatgcccacggtgcccagagcccaaatcttgtgacacacctcccccgtgcccacggtgcccagagcccaaatcttgtgacacacctcccccatgcccacggtgcccagagcccaaatcttgtgacacacctcccccatgcccacggtgcccagcacctgaactcctgggaggaccgtcagtcttcctcttccccccaaaacccaaggatacccttatgatttcccggacccctgaggtcacgtgcgtggtggtggacgtgagccacgaagaccccgaggtccagttcaagtggtacgtggacggcgtggaggtgcataatgccaagacaaagccgcgggaggagcagttcaacagcacgttccgtgtggtcagcgtcctcaccgtcctgcaccaggactggctgaacggcaaggagtacaagtgcaaggtctccaacaaagccctcccagcccccatcgagaaaaccatctccaaaaccaaaggacagccccgagaaccacaggtgtacaccctgcccccatcccgggaggagatgaccaagaaccaggtcagcctgacctgcctggtcaaaggcttctaccccagcgacatcgccgtggagtgggagagcagcgggcagccggagaacaactacaacaccacgcctcccatgctggactccgacggctccttcttcctctacagcaagctcaccgtggacaagagcaggtggcagcaggggaacatcttctcatgctccgtgatgcatgaggctctgcacaaccgcttcacgcagaagagcctctccctgtctccgggtaaatgagtgcgacggccggcaagcccccgctccccgggctctcggggtcgcgcgaggatgcttggcacgtaccccgtgtacatacttcccgggcacccagcatggaaataaagcacccagcgctgccctgggcccctgcg

SEQ ID NO: 1805 - DNA, 2831 bp, Homo sapiens
aaaagccggggaagtggccgaggagggagggctgcgagccatggcgaccaagacggcgggcgtggggcggtgggaggtagtgaagaagggtcggcggcctggggtcggcgccggcgccggcggccgaggaggcggcaggaaccgcagggcgctcggggaagcaaacggagtgtggaaatacgacctgacccctgcaatccagaccacaagcaccctttatgagcggggctttgagaatatcatgaagcggcagaataaggagcaggtcccaccccctgctgtggaacctaagaaaccagggaacaagaagcagccaaagaaggtggcaactcctcccaaccaaaaccagaagcagggccgcttccgcagcctggaggaagcactgaaagctctggatgtggcagacctgcagaaggaactggacaagagccagagtgtgttctctggaaacccatccatatggttgaaggacctggccagctatctcaactacaagctacaagctcctctaagtgaacccacgctgagccagcatactcatggggagtcactacatggttaccgcatctgtatccaggccatcctgcaagacaagcccaagattgccacggcaaacctaggcaagttcctggaactgctgaggtcccaccagagccgaccagcaaagtgtctcaccatcatgtgggccctgggtcaagcaggttttgccaacctcaccgagggactgaaagtgtggctggggatcatgctgcctgtgctgggcatcaagtctctgtctccctttgccatcacatacctggatcggctgctcctgatgcatcccaaccttaccaagggcttcggcatgattggccccaaggacttcttcccacttctggactttgcctatatgccgaacaactccctgacacccagcctgcaggagcagctgtgtcagctctacccccgactgaaagtgctggcatttggagcaaagccggattccaccctgcatacctacttcccttctttcctgtccagagccacccctagctgtccccctgagatgaagaaagagctcctgagcagcctgactgagtgcctgacggtggaccccctcagtgccagcgtctggaggcagctgtaccctaagcacctgtcacagtccagccttctgctggagcacttgctcagctcctgggagcagattcccaagaaggtacagaagtctttgcaagaaaccattcagtccctcaagcttaccaaccaggagctgctgaggaagggtagcagtaacaaccaggatgtcgtcacctgtgacatggcctgcaagggcctgttgcagcaggttcagggtcctcggctgccctggacgcggctcctcctgttgctgctggtcttcgctgtaggcttcctgtgccatgacctccggtcacacagctccttccaggcctcccttactggccggttgcttcgatcatctggcttcttacctgctagccaacaagcgtgtgccaagctctactcctacagtctgcaaggctacagctggctgggggagacactgccgctctggggctcccacctgctcaccgtggtgcggcccagcttgcagctggcctgggctcacaccaatgccacagtcagcttcctttctgcccactgtgcctctcaccttgcgtggtttggtgacagtctcaccagtctctctcagaggctacagatccagctccccgattccgtgaatcagctactccgctatctgagagagctgcccctgcttttccaccagaatgtgctgctgccactgtggcacctcttgcttgaggccctggcctgggcccaggagcactgccatgaggcatgcagaggtgaggcgacctgggactgcatgaagacacagctcagtgaggctgtccactggacctggctttgcctacaggacattacagtggctttcttggactgggcacttgccctgatatcccagcagtaggccctgccttcctggccactgatttctgcatgggtagaccatccaagactgcagcgggtagaaggtggcagttcttcatgggagtctttttaacttggtgcctgagttctctcctaggcaagtggccagttgcctccacctcagttcttccatctttggtggggacagggcccagcagcatctcagcctcctacccacaattccactgaacacttttctggccctactgcacatggcccccagcctccatccttgtgctggtagcctctcacaactccgcccttgccctctgccttccacttccttccatctcatttctaaaccccaaacagctcatctctaaaaagatagaactcccagcaggtggcttctgtgttcttctgacaaatgattcctgcttctccagactttagcagcctcctgttcccattcttggtcacagctctagccacagcagaaggaaaggggcttccagaagaatatagcaccgcattgggaaacagcagcctcacctccacctgaagcctgggtgtggctgtcagtggacatggggagctggatggaaatgcctctcacttcaaaatgcccagcctgccccaaatgcctctaagcccctccctgtcccctcccttgtagtcctacttcttccaactttccattccccatcatgctgggggtcttggtcacaaggctcagcttctctccactgtccatccctcctatcatctgtagagcagagcacaggcagttgtgtgccttgggcccagggaaccctccatcaacctgagacaggactcagtatatggttcttgggtatgccctaccaggtggaataaaggacacagatttgatttct

SEQ ID NO: 1806 - DNA, 2405 bp, Homo sapiens
agtggtcctggccaccggctcgcggcgcgtggaggctgctcccagccgcgcccgagtcagactcgggtgggggtcccggcggcggtagcggcggcggcggtgcgagcatgtcgtggctcttcggcgttaacaagggccccaagggtgaaggcgcggggccgccgccgcctttgccgcccgcgcagcccggggccgagggcggcggggaccgcggcttgggagaccggccggcgcccaaggacaaatggagcaacttcgaccccaccggcctggagcgcgccgccaaggcggcgcgcgagctggagcactcgcgttacgccaaggaggccctgaatctggcgcagatgcaggagcagacgctgcagttggagcaacagtccaagctcaaagctggagtgcaatggcgcaatctcggctcactgcaacctccgcctcccgggttcaagcgattcatctgcctcagcctctggagtagctgggattacaggcacgcgccaccacgcctggctaatgttgtattttagtagagacggggtttctccatgttggtcaggctggtctctaactcccgacctcaggtgatccacccgcctcggcctctcaaactgttgggattacaggcatgtgccaccacgcctggctaatgttgtattttagtagagacggggtttctccatgttggtcaggctggtctctaactcccgacctcaggtgatccacccgcctcggcctctcaaactgctgggattacaggcacgcgccaccacgcctggcctattttattttattttgagacagagtgtcactctgtcccccagtctggcgtgcaatggtttgatctcggctcactgcaacctccacctcccgggttcaacctcctgcctcagccttccgagcagctgggactacaggagcctgccaccacatctggcgaatttttgtatttttagtagagaagggggttcagcatgttgtccaggttggtcttgaactcctgacctcaggtgatccagccactttggcctcacaaagtgctgggattataggcaagagcgatggcgcccggcccactcagcaggattcctagaatgggcacgagctctgccctcatcacagtccaaaagtgagcacctgcctggagctgcccagaaacagccttgtggggtggggttggtgtctgacctccctccccgggggccttcgcaggcttctctgctggtgcttctgtgcctgtgggtctggattcctccagggcctgatcctgggtgcagatgcagctggaagccctgaacctgctgcacacactagtctgggcacggagtctctgccgtgccggagctgtgcagacacaggagcggctgtcaggcagtgccagccctgagcaagtgccagctggtgagtgctgtgctctgcaggagtatgaggccgccgtggagcagctcaagagcgagcagatccgggcgcaggctgaggagaggaggaagaccctgagcgaggagacccggcagcaccaggccagggcccagtatcaagacaagctggcccggcagcgctacgaggaccaactgaagcagcagcaacttctcaatgaggagaatttacggaagcaggaggagtccgtgcagaagcaggaagccatgcggcgagccaccgtggagcgggagatggagctgcggcacaagaatgagatgctgcgagtggagaccgaggcccgggcgcgcgccaaggccgagcgggagaatgcagacatcatccgcgagcagatccgcctgaaggcgtccgagcaccgtcagaccgtcttggagtccatcaggacggctggcaccttgtttggggaaggattccgtgcctttgtgacagaccgggacaaagtgacagccacggtaaacatattcataaaacagggctggcaggtggctgagaggcagcatgtgggggcctcctggagccccaggtcctgtccctgccggctctgcacagccctgtagctctcccagcacagagcaaacccacgttgtacctgctgggctcggctgctcctccctccttgagctgggagaaaaaaatgcagttgccagcctgggccacacggtgagaccccatctctacgaagaataaaacattagctgggtgtgatggtggcgcctgtggtcctgctactcgagaggctgaggtaggaggatcacttaagcccaggaggtttgggctgcagtgagccaacattgcaccactgcactccattcttggcgagagaataagaccttgtctcaagaaaaaaatggccaggcggtagtggctcaggcctgtaatcccagcattttcggaggcggaggtgggcggatcacgaggtccggagatcgagatcatcctggtaagagtgaaaccctgtctctactaaaaaaaag

SEQ ID NO: 1807 - DNA, 1991 bp, Homo sapiens
tggaaaaaaaaaaacctctctggagctcgggcatgagccagcaaggccacccatccaggcacctctcagcacagcagagctttccagaggaagcctcaccaagcctctgcaatgaggttcttctgtgcacgttgctgcagctttgggcctgagatgccagctgtccagctgctgcttctggcctgcctggtgtgggatgtgggggccaggacagctcagctcaggaaggccaatgaccagagtggccgatgccagtataccttcagtgtggccagtcccaatgaatccagctgcccagagcagagccaggccatgtcagtcatccataacttacagagagacagcagcacccaacgcttagacctggaggccaccaaagctcgactcagctccctggagagcctcctccgagacaagtcagttctggaggaagagaagaagcgactaaggcaagaaaatgagaatctggccaggaggttggaaagcagcagccaggaggtagcaaggctgagaaggggccagtgtccccagacccgagacactgctcgggctgtgccaccaggctccagagaagtttctacgtggaatttggacactttggccttccaggaactgaagtccgagctaactgaagttcctgcttcccgaattttgaaggagagcccatctggctatctcaggagtggagagggagacaccggatgtggagaactagtttgggtaggagagcctctcacgctgagaacagcagaaacaattactggcaagtatggtgtgtggatgcgagaccccaagcccacctacccctacacccaggagaccacgtggagaatcgacacagttggcacggatgtccgccaggtttttgagtatgacctcatcagccagtttatgcagggctacccttctaaggttcacatactgcctaggccactggaaagcacgggtgctgtggtgtactcggggagcctctatttccagggcgctgagtccagaactgtcataagatatgagctgaataccgagacagtgaaggctgagaaggaaatccctggagctggctaccacggacagttcccgtattcttggggtggctacacggacattgacttggctgtggatgaagcaggcctctgggtcatttacagcaccgatgaggccaaaggtgccattgtcctctccaaactgaacccagagaatctggaactcgaacaaacctgggagacaaacatccgtaagcagtcagtcgccaatgccttcatcatctgtggcaccttgtacaccgtcagcagctacacctcagcagatgctaccgtcaactttgcttatgacacaggcacaggtatcagcaagaccctgaccatcccattcaagaaccgctataagtacagcagcatgattgactacaaccccctggagaagaagctctttgcctgggacaacttgaacatggtcacttatgacatcaagctctccaagatgtgaaaagcctccaagctgtacaggcaatggcagaaggagatgctcagggctcctggggggagcaggctgaagggagagccagccagccagggcccaggcagctttgactgctttccaagttttcattaatccagaaggatgaacatggtcaccatctaactattcaggaattgtagtctgagggcgtagacaatttcatataataaatatcctttatcttctgtcagcatttatgggatgtttaatgacatagttcaagttttcttgtgatttggggcaaaagctgtaaggcataatagtttcttcctgaaaaccattgctcttgcatgttacatggttaccacaagccacaataaaaagcataacttctaaaggaagcagaatagctcctctggccagcatcgaatataagtaagatgcatttactacagttggcttctaatgcttcagatagaatacagttgggtctcacataaccctttacattgtgaaataaaattttcttaccc

SEQ ID NO: 1808 - DNA, 1490 bp, Homo sapiens
ctatcacgccattcattgctgcttcccctgtctccacataccagggtgctgtgattacaccaaccatggaccatcccatgtcaatgcagccagccaacatgatgggcccactgacacagcagatgaatcacctttcgttgggcacaacaggaacgattcaatcccaagacaggattatgatactccaccagctgttgtgtcagtatatgactgctgctgctcctatgcaagggacctacattcctcagtacacgcctgtgcctccgacagctgtttctattgaaggtgttgttgctgatacctctccccagacagtggcaccttcatcccaggacaccagtggtcagcagcaacagatagcagtggacacatccaacgaacatgcacctgcatattcttaccaacagtctaaaccataaacaggactgaagaatgtctgtctgaatctttgccttgaatgaagaaacttcattgaacaagaagttggcttccagtttgcacagacgtcaatggaatgcatttttttgttgttgttgttgttttttttttagtgttataccttacccaatgaaagcaaagtttttatgtgctgtgcaaatggtcttcatgtggtctgacaatttatttttgccatcatttttttaattaaagaaaaaatttccagaagaggaaaaaaaaactacaaaaaacaaaacattgaaggttgatattttatgtggaagaacatttgaattgaattcagaatttttctgaaggtgtagatactttttttttttttttaacagaaaacctgatgtcaagaggtgggcaatagaaatggaaacaaattgtcttcctcaataattaagctactttctctttttcccttcttgttttaatctagtgggttttttattttattttttcttagaaatatgtaggtaaggtttatcttgaatcttaattgccttaattttaaggacgtcaaaggctctcgaggcaagctgtcaacgtcttgttgaaaacaaaaatcaagaaagaattgaaatactgtgccggctttcactggcacagaagtttaagactatgagtttttagggtgaagaaaaaactgtacagtttaaatgaaaatgtttttcttcatttgaagaaaatttgttgataaaccatggcaactgcaagaattggaaaaatgctgggacttttcatgaactttgtcttaagtgttgacatgaatcattctaaaaggctaaaacattttacagtaaagttattaaggttggtttaaaaacaactgcattagaaataatgcgtgtttggggggcagaatgcagatttttttaatttacaaagcgtgatcgctagcaaaagcattagtgctttttatctgcagtcttttttatgagctttacaaagtttttagtcagctttgcttgtcacattgcaaaacctagcttaagagcattaaaaaaaaaaacttaagtagataggagcttatggtcaaaaagtgc

SEQ ID NO: 1809 - DNA, 2544 bp, Homo sapiens
ttgaaacatcacatacacacagagacgtccaccaattggctcgatgagctttctcaaaggaaacacattctctgagcagtgtgcacatccagacacatcatctccatcctccagaagccccctcctgttaccgccactcacaggtcacccgtctcctgacttgcagccacagagatagtcctgcctaattctgaacgtggtacaaacggaatcatacagaatgggcttggcttctttcactctgggctgtgtttatgagcatcacccagattgctgcatggaagccatcgtttgttcattttcaccaccatagagtattctactgttgatgggacataggctatttattccttctactgttgagggacgcatagttatttccagctggagactggtatatgtctcttggctaccttctgcatgcatttctgttggaggttgtttcaggtatctcttaacgtataacagaccaccctcaaattgagtccttgaaacaattaccattttcttctttctcaggatttggtgcatgggatgggctcagttgggcagttcttctgttccatgtgatggtactggggctgcagtcattcagaggctcaactgggctgaacgtgcaaggtttcttgctcacgtggccatcagtggtgctggctgctgttgggagctccactggacttctgtccagagctcctcagctcacctctctgtatccttgccctgtggctcaggcttctaacaatacagaggctggattccaagaggagggaattagaagcgttcagccttcttaagaccaggattcagatgtcccagactgtcactgtattgaccggagcatttacaggccagcctagtaatttttccatcttgggcaggaatgggtggcatatgctgggggtaggggtagcattgttggggatcatctttggagctgtgtgccaaggagtaaattgctcggctgctttctacctgaggaagtccgctatgcttgcttgtggagagtggattgtgtgctcagagtccacaaggatttaagaatccgagccctgctgcccttgcctcagcctgtgcattagggcccggtggtgagagcactgagccattgtgaatcaaggcccctccctcgacctgcatactaacaggccagaagagcttgcttgattttggtcctaggctcctgcctgtgggttggattccaggggcactctctcctccacaaaccagacggtggcaggtacatcccctcaatggaaattgcccacacttcaccctaaagacagatcctgctgttcagcaacaatgtgagtggcccacacatttgtccagcatgaaaccgtttgcagattcctttccagtacacagtcccatcagccggtcacttcacgatgacagctcctcgaagcaccttttggtttgccgttgtgtagcttagaagtaggagcctgcacggcttcaggaattcacagaaggagcacactttgtgcttggagaagttaattataggaatatcctgcaacctgctgctctgagcctgtgcacctggggtgtttccctggaggtcctgtgtatgaggatactcatcagcatggggtttgggaagcctagcactggagacaacctaggtggtcctctccaggggagtaggtaagagccctacagcagtgaaaagcattgaaggaaaagtgtgttcagcagtgctcttaatctgatcagagcagcctgaacacattctaaacacagggcatttagaactagggtagaggcactagagcaccatagatacaaactcagattctgaaggtaaatgcccaggttcaaatccaagccccctcgccaagtgaccacgactcccccgagtcacctgacctctgtgtttacatcctcaaagttaagtagtcaggaaagggggcttggggcttgccacatggatggttgccactctcctttgcaaagtgtagtccccaaaaacaggtggaagagggaagggtccaattagaaggccgagtaccagctgccatgaatatgccagagctgctggctagtgataaataactgaaacccagggggacagcagagcttgggtgaccatacattctaggaaagaaaacatgcctgttgtcctggctttttatccagcttagacaaagatgggcaaagaaaataatttagaaaatggtagagatgggcacagagaaagggcacggagggaggcacaaacagaaggccaagtgatggtggaggcaggcattggagaaatgcctttacaagccggggaatgccaaggatgctggcaaccctgggagtgggaagaacctggaacacaccctccgtcagagtctccagaaggaactggcccttcatcacctttcggacttctggcctccagaactgggcaagaaaatgtttctgctgttggaggccatccagctggtggtcatttgttatggttgccacagaaaacgaatatagatttagacatctaatttgcatatatagatatgcatgtgtatttgttaaataaaagataaagcatgacaactc

SEQ ID NO: 1810 - DNA, 1671 bp, Homo sapiens
ggttttccctgctctcaaatcagatgctgaggagaggagagctgaggtttcctggagctccccctgctggcaggcagccgagggtgtctcctgccctcttggcactgttctcccagccaaggaggtggccttttctctcttccaagtggggaggagacattttatttctactctgtcccttctgctagctcctcccacttcctgggaagactaattctagaactgcttgaccttggccagggaagggctggatgtgaagttccacacctggagtgatgggtccttaaagtcccttctttctgttctcaggctggcccttgtgactagttcatggcctcagacactgtactgtgggcaccatctcttgactcctggccggccttctcttctgggaaggggctgctccaggtcttcattggacccagagcttcctggatcccatcagcagaggcgggacaacggggaagggcgccagaggccagcggggtgggggagcacagatgcctccagttggcttggctccctgcacttggtcctgaaggggttaatgaggcttgaactgaacagaccgggccctcactcccttccgccccctccccctttggtccccttcctctggacctcacatcctgtgtttaggttccagcccacatacctctctaatctgagaggcctgagagcccgttggctggagctgcctaggttccttccggctgcagctggccacccccggctctccactccgactctgccctgggtcactgccctctggtgtcctgatgttcctgaccccacccccgcctgtcccacagtgggggctgctggggaactctcactctgctgtgccccgcctccagggtgtctgagcatgtgagaggtgcacatcgcccaccagccacctcccaaccccaacccttgtgtgccaaagagaggactctggctgccttccctgcttggtacctgaagtactgtcttctctacaagcctcttaattcaagtgactctaaacttctctcgactcaggctctaaggcccaaaggatagggcaagagaccctgtccccttctctcacctgcccttccagagacaaaagaactccaggctgccagaggatgagggaggagcatattcggattgaaaatggtgatggtgtggcaggaacacagggactgtccactctgcacaggctgtcggggtctccgtgggggctgagcacagggtggcaaacacaaagaggacactgaaaatgaccaactcaggatgggggagctctctagtaatctgaaaaagggagattctagccctagttgaggccggcgctgtgtggggaaggggacaggctcctgtatagggtgacgctggaactccctgactttaagatcaccaagtcaggccgggcgtggtggctcacgcctgtaatcccagcactttgggaggccgaggtgggcggatcacgaggtcaggagatcgagaccatcctggctaacacagtgaaaccccgtctctactaaaaatataaaaaaattagccgggcgtggtggcgggtgcctgtagtcccagctactcgggaggcagaggcaggagaatggcgtgagtccgggcggtggagcttgcagtgagctgagatggtgccactgcactccagcctgggcgacagagcgagactctctc

SEQ ID NO: 1811 - DNA, 3291 bp, Homo sapiens
tttttaaggcctgccttgtggagaaagaagagcaggtgaaagtagggcagaaggtcagggagagactctttttctgaggcctaaagcttcccatcgttagaacaagaccgtaacaagggctgtgggagtcatgagccaggagccgtggacagagcccaatgtatacgtatcataaaatcacagggagggttaggaccccggggctgctccatgctccccccttctgtgtgcctggccccacaaggcgcgcctgtccccgcatgggtgtgccctggatgtctcttcctgtggacaatgcctggccagcgtcccctgtctctggggcctcaaaccaggaagttccccgaggaatgggtggatctcaggcttttctgtgcccaagatctctgggagaaccgtctgctggcacggcttcccaggctccactctcaggtgtgtcaaccccggtgcccttgagctgaggccaggacagcacccctgcccagcctctgcctgtggctgacaccacacaagggtcatgggagccccgccaagggccaaggagctggagggtggtccagggtggtgctctgggcccgagtgagactgtgctcttctgactctctccgatgggccccagagcccatcacggtcccacagccaggttgcgaggcacctaggatctagtcagcgttgtgccaagcccccatcctcatgcctcagctgcctgagtcactgggattacagtcatgagccaccaggcccacgctcttgtattttgacccccttatttaggaaacgttttcttgtctgtcagagtgagggcaggtggtttgcccctgccgctttgcttttttttttggagacagagtctcactctgttgcccaggctggagtacagtggtgtgatctcggctcactgcaacctccgcctcccgggttcaagtgattctcctgcctcggcgtcccgagtagctttgattacaggtacgtggcaccacgcccagctaatttgttgtatctttagtagagttaggatttcaccatgttggccaagctggtctcaagctcctcaccttgtgatctgcccgcctcagcctcccaaagtgctgggattacaggtgtgagccacctcgcctggcctaggcattgctaattttcacaccagtgattgctttgtgatccacgtactcctctggccaaaaatatttgaaacggggaaaaggtgtggtgcgtgacttagctgtcataggcaccagaagaattctcatccctttcccttggggacgtggttttgaggaattatgtagtagggcgaagaaaccacaacgagttggactgaaactttttaaatttttggtcttcctggttggtgccgtcctgcttggcagctgttctgctgtttcacaccaagaaaagttgtttctgaacttagtttacttttttcccaagttaaaagtagcttatatattctgcattttgttaaggagcttgcactttatccaaagggcaggacgaagctgatctgagacaggtgtattagttatttctcgcttcctgacaagtcaccccacactcaggggtgtaaacagtaacatctgtcagctcagaaagcctctgtgggtccggagtctgtgagtggcttgggcacgcggacctggcccagggtctcctgtgaggtcacagtgcagtgttggccaggctgtcatctgaaggttggtggcttcaagatggctccctggcagggggttggcaggaggccttggttcctcacctgggggcctctctgtggggcagcttcagtgtcgcccagcatgactgtggcttcctcccagcagggatgggattgcacagctggtcgacggtggttgggagagggagaaatagaggcccttgctcaggtttctgagttcaaaactgtgctctcatttcaggggccagcagcctcccccgatgggtcgtcagcaacgagggtgcctcaggatgtgacgcagggccctggggccacaggtggaaaggaggacagtgggatgattcccttagcaggcaccgcccctggggctgaggggccggcgcctggggactcccaggctgtgcgcccctacaagcaggagcccagcagccccccgctggcgcctggcctgcccgccttcctagcggccccgggcaccacgtcctgccccgagtgcggcaaaacgtccctgaaaccagctcacctgctgcgccaccggcagagccactcgggcgagaagccgcacgcctgccctgagtgcgggaaggcctttcggcgcaaggagcacctgcggcgccaccgcgacacgcaccccggcagccccggcagccccgggcccgcgctgcgccctctgcccgcccgtgagaagccccacgcgtgctgcgagtgtggcaagaccttctactggcgcgagcacctggtgcgccaccgcaagacgcactcgggagcgcggccctttgcctgctgggagtgtggcaagggcttcgggcgccgcgagcacgtgctgcgccaccagcgcatccacggccgggcagcggccagcgcgcagggggcggtagctccgggcccggatggtggaggccccttcccgccctggcccttgggttagccgcctcccggccagcgccatctcccgcccttggtgctgcccccgggcggtacctgctctctcccagcgccacttggcctcttcctctcctccttccctcccatcgtcctcctccacctgcgcctcccttgtctgaacttcccaacgccttcctattcctttccaactccttttcccccaaatttcactttccttctcaggtctcacctcagccccccccttctccctgatttctcggcctctctctctgtgtgaaggggcctctccctaatgtctcctccttcccccctcttctctctcctgcggcccagcctccctctccctcctccattcctctctccctgcccttttcctgcctgaagagcagaggtgaggacctgggacccctgaggggcaggccaggaggagctcgggcgcaggccaggcccccttggtgaagcagaggctgaaggaaaggggtctgggtcttgtccctaggaattctcctccctcaggagattgggggttgggggaggcagcgggtgatggctctgaagctgaacccagggcctggctgtggtcttcttggtcttgctgccccctgtgacccaaaggcatgggatggacagagatgcctgcccccgtgaagctggttggggagggcagttcaccagcatccatagagtaataaagtcactgtgtgtagacccgg

SEQ ID NO: 1812 - DNA, 1627 bp, Homo sapiens
agctctgagagaagagccccagccccagaattcccaggagtctccattcggtgatcagcactgaacacagaggactcaccatggagtttgggctgagctgggttttcctgattgcttttatacgaggtgtccagagtctggggcacctggtggagtctgggggaggcttggtcaaacctggagcatccctgagactctcctgtgaagcctctggattcaccttcagtgactactatatgacatggatgcgccagtccccagggaaggggctggagtgggttgcgtacatcagtcgcactaataccaacatttactatgcagactttgtgaagggccgattcaccatctccagggacaacgccaggaactccttgtatctgcaaatgaacggcctgagagccgaagacacggccatttattactgtgccagagattctagggagtatgtggatttatggagaggtcttcccaagggttacttcgatctctggggccgcggcactcgcatcactgtctccccagcatccccgaccagccccaaggtcttcccgctgagcctctgcagcacccagccagatgggaacgtggtcatcgcctgcctggtccagggcttcttcccccaggagccactcagtgtgacctggagcgaaagcggacagggcgtgaccgccagaaacttcccacccagccaggatgcctccggggacctgtacaccacgagcagccagctgaccctgccggccacacagtgcctagccggcaagtccgtgacatgccacgtgaagcactacacgaatcccagccaggatgtgactgtgccctgcccagttccctcaactccacctaccccatctccctcaactccacctaccccatctccctcatgctgccaccccctactgtcactgcaccgaccggccctcgaggacctgctcttaggttcagaagcgaacctcacgtgcacactgaccggcctgagagatgcctcaggtgtcaccttcacctggacgccctcaagtgggaagagcgctgttcaaggaccacctgagcgtgacctctgtggctgctacagcgtgtccagtgtcctgccgggctgtgccgagccatggaaccatgggaagaccttcacttgcactgctgcctaccccgagtccaagaccccgctaaccgccaccctctcaaaatccggaaacacattccggcccgaggtccacctgctgccgccgccgtcggaggagctggccctgaacgagctggtgacgctgacgtgcctggcacgcggcttcagccccaaggacgtgctggttcgctggctgcaggggtcacaggagctgccccgcgagaagtacctgacttgggcatcccggcaggagcccagccagggcaccaccaccttcgctgtgaccagcatactgcgcgtggcagccgaggactggaagaagggggacaccttctcctgcatggtgggccacgaggccctgccgctggccttcacacagaagaccatcgaccgcttggcgggtaaacccacccatgtcaatgtgtctgttgtcatggcggaggtggacggcacctgctactgagccgcccgcctgtccccacccctgaataaactccatgctccccc

SEQ ID NO: 1813 - DNA, 2190 bp, Homo sapiens
aggcccggcgtggcccagggcaggaagcgcacggcctgcgccgggggctcccgcttccgaccggggggtgctttcgtcctggcctctgggggatcggcggcggggggcggcacagggctcctgcactcctggatggctctgctccgggtcagcgggaattggtcccgacgcctaacctcctgctgcgggccttcccccggctctgtcctgcccgccggcccgcggctcctgggcctcccaggctcgtcccccggcttctccgcgctgctcggagagggcggctgggcggcggcggggctcacggcccgcgatgtcttgggggtggagggccgagagaagagcgggggctcgccgggctctcgaggggatggggcacgctgcagcgtggcgcgcagggactcgtgcgagcgcaccagctcctcccgcgacgtggagcggcggatgcggcccagctcctgggcgaagcgcagctcgaggtctgaggccgggctgcgctgacgcgtgcgctcgtccagcgaggccgctttctgctggaacaggcggcgccgctcggccacgctgcctggcgcccgcagttcttcctgcgaggccccgggggtgccccacggtgcgccgcgctccgacttgggctgctccagagagcgggccttgcgcaggggcacccagggccgcaggggcgccggcggcgagtcgctgcgctccaggctgcgccgtcgctcctcgaagaactgcagcttgtccaggatgcgggagccggcgcgcaccagcctaggcgatcggcccaacgccgacaggcggcctgaggcctcgctcagtggcgtctggggtcgggattccgcggtgcccgccagggagggcccggacgacttggacttctcccctcgcttctcttcggtggtggtgtcctcgggcagcacaggctcctgagtgcgacggtggggcgacgtgggggtggccgcgggctgggccgggggtcccggcggggaccgcttcccgacccgaggggacggtggggggagcagcgcggatttggaaggaggcggctgggcagggcggcgtggggcttcgctggccagttgaggctgaaggtcgggctcctccctgcgcaacccgctctgagggacgctgctgcagaaccaagatggagaagggtagaggattcagggggcctcctctcctagacccttagcttgtgacaggaattgggtggtgggcatgctgggcaggcttgggggtgacatgggccagatcctcctgccccccacccccacccccacgaggagcgcacagccagagcaggtgctggggagaggccggcggctctggaaccacaagattgggctaatggctgggtcttggtacagactcagccccaggactcgggccagcctcctccccccagccctggaagccgagaaacagcggaaacagaactgagcatgagggagagaaaagaatgaggcttaggacccaaaggatgaagtggggagggaagacaagagggtggggtggggaggggcgttctcaggaatgcagccacccactcattccagcccccagctggcccccacacccctgcccatcatcagcagggcacaccccttcctagtggtccctggaagccaagcaacagcctcctggaccaggcacaagccttttggggggcagtgccccatccctaggattccctagctgctgtgtagacctgagcctatacctgccgccaccccgagcactgatgggacacagcaggtggcaacgggatgcccaggctcctactctccttgctcagtctgccccccgataggcctttgacttgtgcttcccctggcaaagctaccttgagtccttagaaatcccccctgagaagtacagaaggccccccccacagggatatgctctgaaataactcagctcagaaatagctactaagtgggcctgaatagggagtgtgggagaaaaggaggagggaaggagccggtcaccccagagtatccctttcacttaacagagctttggtgcccaagagctgggtctcagttttccccatctggacccttgcggggaggagggggtgggtgagggggcacatcacacataaagataagcaaaaaaaaaaaaaaaaaaggaattaaatgtattatcatacctgacacatcagagagagcttaataaaaatctgtaaaatgg

SEQ ID NO: 1814 - DNA, 2185 bp, Homo sapiens
attcataagactcagagcagttccaggagtccatttacgggaggggggagatgagcgctgctgaggcttgggggctcaggtcccgcaccattccccctccgcgacaatctgagagagctccagtggttacttttatctacctgtccgttcaccctaaactgtcactcgtcagtctcactctgagaagagacagtaacttgaaacgttgttctaaactcctaggcccgtcccccaaacacccttttgactgggacccccgcccctgcatgggacctcgcgcagaggggggtgtgtatgtgtgtgagtgtagaggaaggcttggcctaaggcctctccttctccctccccttgcctctggggtgggggtggggtgttgtggctgtgtgtgtggctgtggctccgtcccgggggttctgtcacccggctgtgtccagcctcctctccacccccatacctaagagtcaccaacccggggtgtgattcaccacccgctggaaccgtgcaacctttccccgaggaagaaggaggaggtagaagccagttgagcagaaatcctctcattaaccactgcgtcacggtgtagtggaagggtgggtgttgtggctttttccctgtgacacacacatccacactcgctcaccctgtgctcactcacggagtcggtgtgtgttatgtgtgttgggtgtgtgtgtgtcggtgtctttgtttgtgtgtctacgcctgtgtgtgtatgtgtcaccccgtaggagtgcgccggtctcggggaaatgcccggttccttcgtgcccacggtcaccgcgatcacaaccagccaggacctccagtggcttgtgcaacccaccctcatctcttccatggcccagtcccaggggcagccactggcctcccagcccccggtcgtcgacccctacgacatgccgggaaccagctactccacaccaggcatgagtggctacagcagtggcggagcgagtggcagtggtgggccttccaccagcggaactaccagtgggcctgggcctgcccgcccagcccgagcccggcctaggagaccccgagaggagacggtgagtaagggacatcagaacttggcctgggtagggggaagcaagagaggcaggaagtttcttatgaatggaggggggctccactaaggcctcagtgttacagaaaccccaagatccttgctacacgagcgaggaccggaggcttgttttttggctcttgggggttctgaaagaagtagaggttcgggatgggtggaggagtgctgtatccccaaatctcatggcctctatctccctgactcagctcaccccagaggaagaggagaagcgaagggtgcgccgggaacgaaataaactagcagcagctaaatgcaggaaccggcggagggagctgaccgaccgactccaggcggtgaggacaggccctggggtgggagaggggatgttgaggggagctctctccccattctctgccccctctccacctgtacccttatcctgggttgagaactagacgttccacacatggaactaggtactgctgtggccagactgggtagcccagggcacaaacacagacccccatggacttaagtcaactcctggtcccccccccatttcctgaccccacggactactctcctagccttcatttcatcccaaggggccacatggggcccttgaggagaggggcgcccccatcatttctcccatctggtcttcagcaagtaacaacccattttgcctcagtttctccatctctgcaaaccctcatcaaatctcccgggctctttctacccttaacactctggaaagcctgtgaaatgaaattattccacctcctgccctagccacccacagctctcctggtgctggtggcatcccccaaaacccactcccttcctacgtcctcccttggtctgagagttccctgctgtatgcctgcagggtgagctgttactccttgagggaacaagggaattgtcaactttccttctctactttttctcttccccgggaggtagagagggaggggtaatagaagggaacacattaaaaacacataacagtggctcatgcctgtgatcccagcactttgagaggccaaggcaggaggattgcttgagcccaggagtttgagaccagcctgggaaacatagggaggacttgtctctacc

SEQ ID NO: 1815 - DNA, 1813 bp, Homo sapiens
gcaatttaagtaaaacaagatgaagcaggaaccgactctcaccatccccactcccacctccatgaattccatcggacagttgtgcgaaagcgggctggctctggggtctggcctccaaccattggtggactgtctgtcctgtaagccccccaggggctgatgccctcccagtctgcctgccctgttcttagcacagcccctggcaccccgtgtgatctcaggaaacacttgctaaacatggtatcggaggagaaacggagcccacagcttagtgcaaagacctggcggcgtggactgaggctgcagaaacgcagaaacgcgcttttcctgccagaaggggacatctgcgtggtcgggagtacctctggggcacgtgccctaattccagaaacatctaagctggagcgcagtggcactgtaatagcttactgcaaccttgaactcctggcttcaagtgatcctcccgtctgggcctcccaaaacactgggatgacaggtatgagctaccgctctcagccacaactgggttttaagagcactcctccagcccactccagtgtcttccatcattctgtgaaagcaccaaaagaggaccaagcccaggaagccgccagcaggcctctcaccagccaagatggctggaatcctaatatcaagaaatgaaactccagcaggccatggaaatgctaaggggttggcatttctgctctagagagagccaaagagaaagctctatttatatctccttgcgtttggtcgcagcctcatcaaccaaaagaaccttccgccccactcaacacatcaatcaaattggggagggggtgtgaacagcagcagcgggtgttacagaggagtctcaagggtatcttagagggtgcctctctgaacagtcgtcccctccaaatcccccccaagagaattactaggacattctccttcccccgcaagcaacggcacccccagatgattaaacgcgctggcgtcggaaagagctgggattctggagaaactacttgtaaactgtgtgggttggtgagttatttaacttttctgagccttcgtttccttaactgtaaaatgaagacaacaccactcagctcctacagttgtccaactgaaatcacctaggtaagaacgaccagttctttggggagtaatgtcccgatggtaccattcaattgtcaagaacaccaaggcaccgtcaggcacccgggcggtatcccactctcctggaagagagcagggggttagcccttggtttcaaagtccctagggagcagtaaaccttcccctccgagagccctgagagaggaataattgccccttcccactccaacccacggcacacccgcccacatccacgtgcggctgtgcccagcatctcagaggtaggacttctcaggaatcggcgggaagaagcccccttgatggagtctggtggggttcaagatctgcaggtcccaccttccagggaacacctgcacaagtgagacctgcccgatcagccccgcgctccatccgcaaactgggcagatcccaggggtgccacgcgaggaccctgcaccttggccgctccagggcgccccccacccgcgaccccggaaatctcgcccctacctgcttcaccctcgccccacccacagcgcacttttcgggacctcccagcggcccttccccggttctctggacccccgtctccccgccctgcaacgcccccatcctggtgcccacgaaaggtcgtcccagttcccctcttctctacctcaaaggaggaggtgcaaatgaggaagcctaaataaaaacaggaaactcg

SEQ ID NO: 1816 - DNA, 1593 bp, Homo sapiens
gcggtggcggcggcgacggcggccctggcagggaaggatggagacgctgaaggataagaccctgcaggagctggaggagttgcagaatgactcggaggcgattgaccagctggccctggagtcccctgaggtccaggacctacagctggaacgggagatggcactggccaccaaccggagcctggcagagcggaacttggagttccagggtcccctggagatcagccgctcaaacctctcggatagataccagaagctccggaagctcgtggagcggtgccaggagcagaaggcaaagctggagaaattttcttcagcactgcagccagggaccttgttagaccttctgcaggtggaaggcatgaagatcgaagaagagtccgaggtgagagggcgaggcgacacccctcttccctggacggggtgtcagtccctgcagcaggggcccttggaaggagaagcagatgtctgcaaagcatggaacaagggagctttcgtagatggcagaggtgaaggacatctttagtcctggggaggccttttgggtataaataacaggaacccagtcccactagctgaagcagaaacgggtgacagtggacaagggcagctcgcagccctggatggtagggcagcacagcaggaggcccccaggggctgaggccagctccctactccactctccctgcttcctgcttccctccggccacctcttcagcctctgtgggcaaactggtgctgtccactctgtgtctgggtggaagaagcttctaggccctcccagtccctgggctagtgctcatccaggtgttcagcacatatatgcagtggccactgtgggcctgacatgatgccaaggtgccaggacagaggtgaccacgacagagacagtcctcgccttcaagggactgacattctagtgagggagacagtgcatgtaccatatgtcagctgtgagaaggggcgtatgggcagggaagaggagggggtgcctgaggcggcgtgaggtgggagggctgcagctgaactcagaccctggggaaaatcaagaggccttgatcccagctgcccctgttgtcactggaccttatgtcttccaggccatggctgagaagttcctggagggcgaggtgcccctggaaacgttcctggagaatttttcctccatgaggatgctgtcccacctgcgccgggttcgcgtggaaaagctccaggaagtggtgaggaagcccagggcttcccaggagctggccggcgatgcccctccaccccgtccaccacccccggtgcgcccagtcccccagggaacaccccctgtggttgaagagcagccgcagccaccatcagccatgcctccctaccctttgccctacagcccatcccccagcctgcctgtgggcccccggcctacgtgccatccgcgtgacgctaggtcagcgctgccggttctttaccaaatgtgcttgcttctcctaagttatttataaagagaaatcactaatggactctactggtttgagtgcttctgagctggatgaccgaccgcctgtatgtttgtgtaattaattgccataataaactttgatgagtcac

SEQ ID NO: 1817 - DNA, 1944 bp, Homo sapiens
accctccttgagacagccctccagtccaggccaaatctcagcctgcccttggtccgctgtggttgggcctgcacccaagccatgagcacacgcagcaattgtggcagcagaagcttcctctgggctcagactcaggctgatgccgcgtcaggacctgccgcggtctcggctgggcttcctgggactcggtggttgtgggctgattgtaaagcacggaatgactcttagaaactgggcgtcattctttgtggttttccaagcttggtctctgatgatactccaggtcttaggagacatgctgaatatttattatgcttacattcaagcaacattaacccttaaggttgatgtagctccccgtctttttttcccagaaggaggagcactgaaggaacacttttccagtatggattctttccagctccgagaagctggaggcacacggatccctcggccagctctcatctatggacgtgctgtagtcacaaggactgtgactaaggctcagtccctgaggagtgccttggcatgggctgctttaggctgtaaacacccagttttatccactttatgtgaagaaagccaacaaggggcatggagtgagttccgcaggttttagcggctgcggcggctggtgctcagtggggatgatggagggaaggcgcctccctctgcgggccccgaggtctgtgcgggaatcagctctgcagctgtgtccagggggagccgtagaccacacacggcaggctcacagctctgttccatgagaactttatacacaaaagcagacgggctgggcttggcctctggatcataatctgctgacccctggggcaacgtcggctgcagctgagatggctgctccccggtggggtgtgtgctcggcctgcagtccccgccctccggactccgttcgcctccgctctcaggtttgcacctcgtcattgtcttctaattttgcatccctggactgcgtgacctacaaggctctcagcacaacaagactctatgattctgtctattggaacaaaaagccagtgaggcaagtgtatcatcctgttgacgaattcacagcattaactctgggagttggggacagtgtgtattcttcctccagacactctctgtttctcctggatggaaaggttctgctacttgtcccgtggtcaggcccagccaatggaacggaatggaagtgactctgccccttattggcagaaactttaaaagccacacaacgttcctgcaccctcccctctgccatgagcctggcagtgctcaggatgggaaaattatctcacctgggcctgaggatacaggagctacccccagcctgcagtggaagagaagcatggacaagtgattaaactttgtgttttcaagccacagaggttttttgaagttgtttgctaccatgctttgtccctacaaacacagtcatggagaaggccagtggcagagcctgagccgttcgcgcatctgttcaccagtatccagaataacaatagatttttgaaacattcctgagaaaattctgggagttgcataccggccagtcttattctctaaagttgttccttctaaagggtgtgatgaccgaaaatttcagaaaagcaaaccaccgctgaaaggcaacgttatttctgttggcagaaggcggcctgagcaatctagattttccacggttcaccaattagtttttaaggaaatatggctgtgagaggaataaaacatgattcctacctttaaggaactcagagaagtgaattaaaggaagtcacagatcagacaaccaaccacacaaagtttctaagagcaaactgttcaggtcggcaagtcactcttatccactgttttgccttctaaggtttcagttactctcagtcagtcatggtccaaaaacattaaatgaaaaattccagaaataaacaatacacacgtgtt

SEQ ID NO: 1818 - DNA, 1912 bp, Homo sapiens
cagcctcagctgtgcgttgagaagacaggactcaggacaatctccagcatggccagcttccctctcctcctcaccctcctcactcactgtgcaggatcttgggcccagtctggattgattcaaccaccctcagcgtctgggacccccgggcagacggtcaccatcacctgttcaggaaccagctccaacatcgaaggaaacgctgttaattggtaccagcaagtcccaggggaggcccccaaactcctcatctatgattcttatcgacggccctcaggggtcccttcccgattctctggctccaagtctggaacctcagcctccctggccatcagtggactccggtctgacgatgagggtttttatttctgtgcgccatgggacagcggcctgaatggtcttctcttcggcggagggaccaagctgaccgtcctgagtgagtcctctcccccgtctcctgcccccctcttgtttcaatgtcgctcttctcatcttgttctgaatcttttttccagatgtcctcggcctttcctcctgcctcccaggcctccctaagagtctctgccctccgtgttcagacacttccttgcctcagtaggtcagaaataccatctcgcctctgaccgcagggtccggggaccagcaacagagaccgtctgaggctcgtctgtctgtctgtctgtctctttctttgtctgtgtggctctccgtttgtctctccgtctgtctgcccggcgcagcagcctcagactcaggaaagcccggcaagagggagaggggagaagcagagtgtggacaccagaaagccagggaatgggtcggaaaaggagtggatgtgacgggagtctcttcaaaacgtattccctgtgcccagggggatcagaggggcagagtccactgcgtgaaagccccacttctatgaccaggtcgccgggccgtggggtggatgccagaagagacttcacggagtaagagagagcccaggacatcaggcaggctctccgatccccccggcccctgccccataaacgggctccagaacacacattgggctggaacagcctgagggaccaaaaggccccagtctcccacagagctgaggggccaggccagaaaagttaccccagagttcgctgtgcaggagagacacagagctctctttatctgtcaggatgactcgcggggacagggtcagggcgctgagggtcagatgtcggtgttgggggccaaggccccgagagatctcaggacgggtggtcaggtgtctaaggtaaaacagctccccgtgcagatcaggacaaagtggaaaacaccctgacccctctgcctggcatagaccttcagacacagagcccctgaacaaggacaccccaacacctcatcatatactgaggtcaggggctccccaggtggacaccaggactcagatcccctgcccctcatccgccccgcaggtcagcccaaggctgccccctcggtcactctgttcccgccctcctctgaggagcttcaagccaacaaggccacactggtgtgtctcataagtgacttctacccgggagccgtgaccgtggcctggaaggcagatggcagccccgtcacggcgggagtggagaccaccacaccctccaaacaaagcaacaacaagtacgcggccagcagctatctgagcctgacgcctgagcagtggaagtcccacagaagctacagctgccaggtcacgcatgaagggagcaccgtggagaagacagtggcccctacagaatgttcataggttctaaaccctcaccccccccacgggagactagagctgcaggatcccaggggaggggtctctcctcccaccccaaggcatcaagcccttctccctgcactcaataaaccctcaataaatattctcattgtcaatcag

SEQ ID NO: 1819 - DNA, 1607 bp, Homo sapiens
agctctgagagaggagccccagccctgagattcccaggtgtttccattcggtgatcagcactgaacacagagaactcaccatggactttggactgagctgggttttccttgttgccattttaaaaggtgtccagtgtgaagtggttttggtggaatctgggggaagtgtggtacaaccgggggggtccctgagactctcctgtgcatcctctggattcaagtttgatgactatgccatgcactgggcccgccaagttccagggaagagtctggagtgggtctctcttatcactgggggtggtgataggaccttctatgcagattctgtgaagggccgattcaccacctccagagacaacatcaagaacaccctttatcttcaaatgaccgatctgagaagtgaggacagcgccttgtatttttgtgcaaaagagaaatatccccggggtgcctttcacatgtggggccaagggacgatggtcaccgtctcttcagcatccccgaccagccccaaggtcttcccgctgagcctctgcagcacccagccagatgggaacgtggtcatcgcctgcctggtccagggcttcttcccccaggagccactcagtgtgacctggagcgaaagcggacagggcgtgaccgccagaaacttcccacccagccaggatgcctccggggacctgtacaccacgagcagccagctgaccctgccggccacacagtgcctagccggcaagtccgtgacatgccacgtgaagcactacacgaatcccagccaggatgtgactgtgccctgcccagttccctcaactccacctaccccatctccctcaactccacctaccccatctccctcatgctgccacccccgactgtcactgcaccgaccggccctcgaggacctgctcttaggttcagaagcgaacctcacgtgcacactgaccggcctgagagatgcctcaggtgtcaccttcacctggacgccctcaagtgggaagagcgctgttcaaggaccacctgagcgtgacctctgtggctgctacagcgtgtccagtgtcctgccgggctgtgccgagccatggaaccatgggaagaccttcacttgcactgctgcctaccccgagtccaagaccccgctaaccgccaccctctcaaaatccggaaacacattccggcccgaggtccacctgctgccgccgccgtcggaggagctggccctgaacgagctggtgacgctgacgtgcctggcacgcggcttcagccccaaggacgtgctggttcgctggctgcaggggtcacaggagctgccccgcgagaagtacctgacttgggcatcccggcaggagcccagccagggcaccaccaccttcgctgtgaccagcatactgcgcgtggcagccgaggactggaagaagggggacaccttctcctgcatggtgggccacgaggccctgccgctggccttcacacagaagaccatcgaccgcttggcgggtaaacccacccatgtcaatgtgtctgttgtcatggcggaggtggacggcacctgctactgagccgcccgcctgtccccacccctgaataaactccatgctcccccaagcagc

SEQ ID NO: 1820 - DNA, 1839 bp, Homo sapiens
gtgcaaatgaatgccttccactgaaccgagcttttaccctacgaaaggaaaacctggaaatgtttgaagcgattggttttttagctatcaaacttggtgttattccttcggattttagttatgcaggccttaaagacaagaaagccatcacctatcaagcaatggttgttagaaaagtgactccagagaggttgaaaaatattgaaaaagaaattgaaaagaaaagaatgaatgtctttaatattcggtctgtagatgattccctgagacttggtcagctcaaaggaaatcactttgatattgtcattagaaatttaaaaaaacaaataaatgattctgcaaacctgagggagagaattatggaagcaatagaaaatgttaagaaaaaaggctttgtgaattactatggaccacagagatttgggaagggaaggaaagttcacacagaccaaattggactagctttgctgaagaatgaaatgatgaaagccataaaattgtttcttacaccagaagacttggatgatcctgtaaatagagcaaagaagtattttcttcaaactgaggatgctaaaggcacactttcattgatgcctgaattcaaagtgcgtgagagagcattgttggaggcattgcaccgctttggcatgaccgaggaaggttgtatccaggcatggttctctttaccccattccatgcgcatattctatgttcacgcatataccagcaaaatttggaatgaggcagtatcttacagacttgaaacctatggagcaagagtagtgcagggtgatttggtctgtttggatgaagacattgatgacgagaatttcccaaatagtaaaattcacctggtaactgaagaggagggatcagctaatatgtatgcaatacatcaggtggttcttccagtacttggatacaatattcagtacccgaagaacaaagtagggcagtggtaccatgacatacttagcagagatggactacagacatgtaggtttaaagtacctactctgaaactgaatataccaggttgctatagacagattttgaaacatccctgtaatctctcataccaactaatggaagatcatgacattgatgtcaaaacgaaaggttcccacattgatgaaacagctttgtctcttttgatctcttttgatcttgatgcttcatgctatgctaccgtttgtctgaaggaaataatgaagcatgacgtttaaaactgatacccttggtataaccatatatatgtcactctttgaaggaaagggggctaaaatgtcttaagcaccttccatgtgttaggaacttcataattgttatctcttttaattttcacagcatcctgagaagttaggatttgatactgtaattttatagaggatatgtaagtgtcagggtccaaatttaaggtccatgtgaccccaaagcctgtgttttttttctattatatgtttcagtgacctttattctgtgtcataaagttacaatcttttaaaaccattaggaatatatataatactgcaagataacatttaagaaaaaaagttgtgaatattcatatcctccagctccttgcttagaacactagtaaaattaggtcgcagtgaagcaaatgttggagagaaagatagatgaagcattttgctaattattattgtccccctttcctgtttttgaaattattgatcagaacaatatacaagggaaatgccatacctctgtttgtgatagataccccagagtagttattacctctttgtgagataagtaatctttgatgaagattgaaatacaatttctcatccaatttttatatcttggcatacgctg

SEQ ID NO: 1821 - DNA, 1899 bp, Homo sapiens
agaagagctgctcagttaagacccagagggaaccatggaaaccccagcgcagcttctcttcctcctgctactctggctcccaggcttcaccggaaaaattgtgttgacacagtctccagacaccctgtctttgtctccaggggacagaggcgccctcttctgcagggccagtgagagtctgatttataataatttagcctggtaccaacagaagcctggccaggctcccaggctcctcattagtgctgcatcaagtagggccactggcatcccagacaggttcagtggcagtgggtccgggacagaattcactctcaccatcagtagactcgatcctgacgattttgcagtgtatttctgtcaccagtatgacactgcacctcagacgttcggccaagggaccaaagtagaggtcaaacgtgagtagagtcttgactttgattcttcagttttctgtgtcttctgtttcctgggcctttcaactgatctttcaggtgactctgggatcagcctgtgacgtccctcacgacaaacaagaagacaagtctgcagtcaagccggggaattgatcgcacattctgtgtgaacacctagcgaggtttagtcgttgggtgagaacagtttgtctggtcctggggttcagagatgtcctggggagcatgacatgttctggtcagagccttggacatttggcagagaagatcttttgtgtgggagggtgcttcagaggaaccattgtgtgtgcagttttggccaggggaccaaggcggaggacttgcgtagggcgtagggacttttctcctctgtgtcttcactttcaccgttgatggctagtacgctttgtgttctcttgtgtggagttccactggtcggtcgccgggactcagccacactgcagtcccaggattggctccgtggaggggaccttcttccacaggacgctcggttgcgacctactgttaagatttgtaattcaaactgagctcaatggggggaggcttgctgacgtttcaggcaacttttagtgaagggagaaacgaagacgaaccagtgtgactcactttcggccctgggaccaaagtgggtgtcgaccttgcgtacatctgtctcagtccttcgtgaggatgtcagtgccgttctatcatatgtgcaacttttgtgatcttctggtagagtagacctggtgacccagaggtaagtaataggacaccagaagacgaacttaaaaagctgagcaattagacgaatcgttgggtttgagaggagaataggattcatgggggaaatggggaagaaagaggtaggttttccccggaacagcgtcctatctcataatattggcttcacgagaggctcttattgcggggaaagagtgagatccctcactgtggctctctttcggcggcgggaccaggatggagatcaaacgtaagtgccctttcctaatgctttttcttataaggtctttactttggagcgtttgtgtgtttgagaagttaactcaggtcaattccaaagagtaccagattctttcaataagtcagctgagtaaggaatagaaaattagttcatctgagggaaagccaagcgctagccagttaagtgattaacagcgaaaagagatttttgttaaggggagagtaacaaacttaacactgtggatcaccttcggccaagggacacgactggagattaaaggtaagtaaatcttcactattgtcttctgaaatttgggtctgatggccagtattgacttttagaggcttaaataggagtttggtaaagattggtaaatgagggcatttaagatttgccatgggttgcaaaagttaaactcagcttcaaaaatggatttggagaaaaaaagattaaattgctctaaactgaatgacacaaagt

SEQ ID NO: 1822 - DNA, 2440 bp, Homo sapiens
acagccacggtggcgacccacagccctggtaatcgctcgctccatgcccgcagggatgtttgtgggggtggcgtcagcccagggagcgaacccctgcaggactcccgaggagacctttgagtcgggcgggctcgacgtgcagggcacggcgggctctctggatgaggaggaggaagaggaggagcgattccacactgtgctggagcagctgggggtggccccggtcctgggcaagtgagtcggcgctggccccgctcccactgcccgctctgctgtttctctgcctgcatgctgtctgcccttgtcacccgagtgctggttctgcacagggtctctaggccgggtcaggcccagcctagcgtcagctgcgattccctgggagggacccggcatgatttcccgcagaatttgcatttcatgaggcagcagccagggctgcagggaggaggggcagcgccgggcgcggggccacataccggcactgcccagggtacacacacctcaccgaccacgcacgccgggcaggggcgaaagcgctcacgggagggatgccctgcacgcagcaagtgctcctgtcctgcccaggggcgaagaagtctcctaagggtttgctgctggcggagggaagcctgcttcccgcttctgccagctccagcctcagttcccgcccgccctccaggcagcgggctgtgaggacgctctgggccaggctgcagcgcgagcgccccgagctgctgggctctttcgaggatgttctgatacgcgcgtcggcctgcctggaggaggcggcccgggagcgcgacggcctggagcaggcgctgcggaggtgagggccggggtggggtatgggggccaatggagggcctcagggcagcagcagaggcggtgccagggggctgtagcactggcaagttctcatccggggtcgcccagtcccccgaaggcgcgagagcgagcacgagagggaggtgcgcgctctgtacgaggagacggagcagcttcgggagcagagccggcgcccgccgagtcaggtgggcctcgggccccgcccctcccgccaggcccaatcccacctcgctggcctccctggctccgccttctctgaattaatccctccccgacggccccacctccgcgggtccaggctgccttcagcccgaggagatcccactgggcctcacgtatcacccccgtccggtcttctccacccgaccccgctccgcccgggcccactcccagcccctggccctccgtgtacctcttttgcatggccgagcggccggcggaggctcagtggtcctccgtgcgtcccagaacttcgcccgcggggagcggagaagccgtctggagctggagctgcagagccgcgagcaggacctggagcgcgcgggcctgcggcagcgggaggtgagcacccggcccctgccctgtccccacggtcacccgtgcactctccccctgtgccttagcgtccccgggttgtcgggagcctggggcacgcgcagcaccccggggaagagggggcgttcctcgccggtctccatccttccaccctccagttagagcagcagctgcacgcccaggctgcggagcacctggaggcacaggcccagaactcccagctgtggcgggcgcacgaggcgctgcgaacgcagctggagggggcgcaggagcagatccgcaggctggagagcgaagcacgaggccgccaggagcaaacccaacggtgccgtgggacggggctgggcgggccccggtgcgtgtcccgggggcggggccgacgggcgctcaggtctgggccactttcatccccatctcaagtcccaggcccgccccgtgggaaggaggatcttctagggggtccgggggctccccaaggagccttcctgcagccgggtcaccacctcccatccacagagacgtggtcgccgtctccaggaacatgcagaaagagaaagtcagcctgctacggcaactggagctgctcagggagctgaatacacggctgcgggatgacagggacgcctgcgaggccaggcgggcgggcagcggctgcaggaaggctctgacaacagcccgcctgcctgggcccacctgctgctgctgctgttgctgggctcggccccccagacgcggctctggccaccttcccagtgcccggtgaccagccccgagtgactcacggaccatgagctagaagctgcccttgcaggaggcttgtcatgggtcgggggtgcccactcaggatgcaggctctccccagtgggccccaggctcgcctgactgaagacatgaaggacctagcctaggagtggtcagggtcccgggagtggccagggtcccgtgtgtgccctctgccagtcttcgctctgtccccgttcaatcaaccccatctcagttcagcagaaaaccccctcgtcaaataaaacccactgactgc

SEQ ID NO: 1823 - DNA, 1823 bp, Homo sapiens
attcctcggggagagagggctgagttttgtgcgcctccgtccgctgcgcgcgccgctgctcgaggaaacgctttcggccgggagctgcggccgccgccagcagttttcatgtttgggattcaggagaatattccgcgcggggggacgaccatgaaggaggagccgctgggcagcggcatgaacccggtgcgctcgtggatgcacacggcgggcgtggtggacgccaacacggccgcccagagcggcgtggggctggcgcgggcgcacttcgagaagcagccgccttccaacctccggaaatccaatttcttccacttcgtgctggcgctctacgataggcaggggcagccggtggagattgaaaggaccgcttttgtggactttgtggagaaagagaaagtaagtgcaaacacacgatcacaccctctctctttctagaagcgggaggcaggcggtgccggtgcgcgggggttcgagtgcccccctaggcggcgggctcggctccgccaggccaccccgccgccgccacgtgcggccgcccgggaccgccgagggctgggcaacttctctgcgccctcggacttactcggggcgaggagaacgctgggcttccagcaggaaagtgacatcaccgcgctgcttcgagctaggaatcctgccatgtgtgaggccgagagcctcggtcgcggagggggaccgagcgtggtggccgcgcctgacaccgatcgcactaaatgcaattatttatcgttactttcaggagccaaacaacgagaaaaccaacaacggcatccactataaactccagttattgtacagcaacggtaagtgcctgctgcgtgctcgccgcccctgcagcggctggctctccttttctgcgctggtgaaaggacataaagatttgagattaaaatgacatggatgtaaacacgaaatcttctcatggcatagaaggaaaacaaaacataaacgatcaataagtcgatggcacttcacatgattaaccggtggggcttgaagtagaaagtaagaaaaagatcgatacgggctccagcagaacatcacttttaagtgacttttttcaattttgcaaattaatgttaattattaggatgggggtaactccataaacggagcataacttacttcctgtgaacgagttttttttttttaaatcctcgagagacattagaaagagttcagcctctcactcagtttccatttggtgctttttcttttctaaaaataaacgaccacatgggcccaccgcacacagctaccaggcctgctctccaccaggcaagttccttgcaccttgaaatgcaagccctaagagccttaaggttcttagttaagaaaaaaaaaaaaattaagcgagaagtggtggggttctctttctccctttcaaagggattgcctaagttctgctgcatcaccgtggcagcagtcctgagttacagacttcctgtgctccgtgtgccctccccgaggtgcagcactcaaatcctgatgagaatttgtctctgtttttttgcaggagtcagaacagagcaagatctgtatgttcgcctcatagattcaatgaccaaacaggtgagaaagtttatgcctctgcacgagttttcactgctgggcctgggttgtcctgggcttcagaggcaagggcactgacaaatggatctcgtgtatttgttttccattgagtttccttgacatgctaatgagaattccatatttattggaatgaatgaagcgattggtaaaatagtttatgttgtcattagaacaggacatatatgctttattaaatgtcttgtgattgg

SEQ ID NO: 1824 - DNA, 1899 bp, Homo sapiens
gtgctgcagggagcaggggaatgtgggagagacacttacacgggcccacaggccacctgaaagagggaagacggtcagggtggggactcagacagaatggggggccccagaggcagtggaggcagcggtggtggcggcggcagacgaggaagccagccatgtgaggaggtggatggagtggtgccccgggggcggacggacggacaagttggtgaatgcacggagggggcagctccccacaagcacagtccacaggggctctcgggagcccaggcagaagagagacggctggacagcacagatgggtgcaacatctgtctgaggacacaaacaaagtggagatggtcaaggcgatggcacacagagctggcaaaggacagaccaaatgcggcaggaagaaaacgcaaagaggaggcagacgaggctggcagaggggttcatgttctgagtgaagagggattgagcacacatttaaggtgatcaactagccaacacgttccaggaagcagctaactctctgtggccagaagcgcaggtgaaattagaatcctgggaaggggcttgcaggatcatctgacggaagtgtcctctgacggaagggtcctccgatggaagggtcctctgatggaagggtcatctgaccactgtctcagctgccctgcagatccccataaagccaccactcttgccccaactccagaagaaaaatgttgggaccaataatcaccatcatattctttccactttgaggtattaattactcaagtggggattacagtccaggtctcactgccatatctgtgggcctgctatctggtcccaggtgatataggggaagctattctgttttacctgggagtgttagacctcagcccagtcctttgcccacttgtggatgcccagtggccagcccacgggtcttcctgccctagccccaatccagccccagggaggcagtggtgccagcctcctgcccgcacctgcttagagactttgagccacgtctttttgagccggaagattgcactgcggttcatggacgaggtgatctccagtacggcattgtagttgtggaggcagcggcatatgtcagctacggccacccacttctcgatggcgctcaccctggcgttgatgtcctcattgcggatgattctgaagcaatcaagttactgatctttaagccgatgcaataagacagggaaaaagaggagtaagtattgcaaagatgataaatgatcactatttgcagatatgattgcctgcttgaaaatacaagaaggaattggaaaactacgagaacaactaacagagcttgctagggttgctggctaaaggttcaatatacaaaaatgaaaagtttatatatacattagcaataatcaattagaaaatacaacaaaaatacaaccttccaaataacaatgggaatctgtaaatacctaggaacttaatgagaactatgtaggatggaaaaaacaggtcaccaaaggatataaaaggcttgaataacagagaaagagatcaaattcccaaatgggaatgtaaatatgtcatttttctgacaactaatacatgtgtttaatgtaatccaataaaacactcaggccgggcgcggtggctcacacctgtgatcccagcactttgggaggccgaggcaggcgaatcatttgaggtcaggagttcgagaccggcctgaccggcatggtgaaaccctgtctctacaaaaaatacacacacaaaaaaaattagctgggcgtggtggcgcatgcctgtaatctcagctacttgaaagactggggcaggagaatcacttggacccaggaggtggatgtttcagtgagccaagattgcgctgctgcactccagcctgggtgacagagcgagactccatctcag

SEQ ID NO: 1825 - DNA, 1578 bp, Homo sapiens
agaaaaagaaagaaatcctagaaaacagaaagcaacaggaagatgtcttattgggaactacccccatcaacttcaccatgagtcaaacaaggaagaaaacttcctcagaaggagaaactaagccccagacttcaactgtcaacaaatttctcaggggctccaatgctgaaagcagaaaagaggacaatgaccttaaaacaagtgattcccaacccagcgactggatacagaagacagccacctcagagactgctaagcctctcagttcagaaatggaatggagatccagtatggagaaaaatgagcatttcctgcagaagctgggcaaaaaggctgtcaacaagtgtctagatttgaataactgtggattaacaacagcggacatgaaagaaatggttgccttgctgccttttctcccagacttggaagaactggatatctcctggaatggttttgtaggtggaaccctcctttccatcactcagcaaatgcatctggtcagcaagttaaaaatcttgaggctgggtagctgcagactcaccactgacgatgttcaagcactgggagaagcatttgagatgattcctgaacttgaagagctaaatttgtcttggaacagtaaagtgggaggaaatttgcctctgatccttcagaagttccaaaaagggagcaagatacaaatgattgagcttgtggattgctccctcacgtcagaagatgggacatttctgggtcaactgctacctatgctgcaaagtctcgaagtacttgatctttccattaacagagacattgttggcagtctgaacagtattgctcagggattaaaaagcacctcaaatctgaaagtactgaagttacattcatgtggattatcacaaaagagtgtcaaaatattggatgctgcttttaggtatttgggtgagctgaggaaattagatctttcctgcaataaggatctaggtggaggttttgaagactcgccggctcagttggtcatgctaaagcatctacaagtcctagatcttcaccagtgctcactaacagcagatgacgtgatgtcactgaactcttatctctcaatttgggaaaatgggaagaattcaagactttcatgaagattttaaaatgacaaaataatccctttttgagctttgcgtggagcattatgggttcctaccatcccctttacttatcatagcctgagcgtcatacctaggaagacattcagagttattagcccaccagattcccttggtacaactaaataacatgaataccacatctcattttgctcctcagtgctggagaacctcaattgttcccactagtataacggaggactaagctttccttacctaggttcacagccactgacatgggtgaatggccctggaaaactaataattatttgataactgtaatgaattgcattgctttccttctgcttaattctgaaaagatggaaatgaaaatacatcctgctttgtactttacgctgttaaataattgaacattcttttatccgatcattgtaaattgctccaaagaaatggaattatagatcctttaagcaat

SEQ ID NO: 1826 - DNA, 1849 bp, Homo sapiens
attctgcaaaccgaaacttgggtcatgtgacctgatgggattatgggactccctccaggtgcccgagacaaggttgatatttccaaaatattttggtgatttagtgggacaagcaaatgacagaataccggagaaggcagggatcgtgggtgtcaggagccagaggggagggggacagatgtgctgtgtacaggacaaggtgtcaggtgactccttcccagcagggcctcgcagatgcacaagcacggagctggtgggttttgcccaagaaaggtcacgcggcacatgcagggattggaactcccaggccagggctctaggtcgctcccaccttttcatgtttctttctgtggccatgggtatagtggaaagacataaagctaaagccaacttttaatcctgaatgcactgcttgccaggtaaatgcccttggttgtggtatcttgttgagacttagttttcacagagggataatgaaccgttgcagaggtttattgagatcattaacagagtggaattcagcacccgccacagcagccagccatggggtgcccaagaggttggttcccgttgccacttgaaatatgcaaacaggtagctagaaaccatctgggcttgacaaagtctaatgccttgaacaaataagcttatccctctgaaaacaaaatggtgcttgtaatgacccacgttaaatatgttttattggccagttaatcattgtggttgaatacttgcctaaggcggtaagaaatcaaataagtaaatcctaaaacaggaagaaaggaatcatattcattcctgaattcagaaaactaaatgaacaggccacaggtcagaagtggtgggaagcaggcccagtggatacctttagacacatgtcctagtagggatgctcgggctttgcttctctgcggacggggctgtgagtctcagaggctccatctgcattccggggcaggggctaggctgctgagtatgccttggggtactgcagggcagtgctatgccaccacctgacgtggcagaaggctggtaggatgggctggcctgaggatggccctgcctggcagaggagtggactccagtggtcgagcttgggctaccctgcccgtctctggagacagattaagtggtggcaagacccttcctaagttcctcactccttctgtggtcaatgtcttccatttcccggagtttctgcaaagggcatcagggaaagcaggtgtatcagggctaggaacctgaggagctgtcgcagcagtgagctagagcctgacccctgaaccctgccacagcagaccctgtatttccattcgcacttggcgctgggcccttcccctccccactttcctggttgtttctcctacctgggagatttcagcaaggatgattcctcggtactgtttgccctgtcccagggcctccatgtcagccaggaattctttcctctcctggatttccttcaccactggacagaggagagggctgtcaggttcccatgagggatgcaggcagcgggttgcctctcttgaggagaggaagtggttctattgtcaaatagtgtttctaggccgggcgcggtggctcacgcctgtaatcccagcactttgggaggccaaggcgggtggatcgcgaggtcaggagttcgagaccagcctgaccggcatggtgaaaccccgtgtctactaaggatacaaaaattagccaggcatggtggcgggcgctggtagtcccagctactcaggtggctgaggcaggagggattgcttgaacctgggaagtggaggctgcagtgagcccagatcacgccactgcactctagcctgggcaataagagcaagactgtctc

SEQ ID NO: 1827 - DNA, 1972 bp, Homo sapiens
aatagcaggagtggcctgtgcctcaacaacatgcttttgctgcagataatcagccagagcctgtttctctactcctcgctaagaatgctttgtttcccgtaaggaaagcttttagctaatctataatctatagaaactatgcttatcattggctgtcagtaaatatgtgggtcagactctgtttgtggctttcagctctgaaggctgtcagctccctgatcccactctgcactctatttctgtgtctgtctttaattcttctagtgctgctgggttagggtcttcacgaccgaactggtctcggcagtggaagaacatggaaacactaggctgacttagtctcccagcctacatctttctcccatgctggacgctgcctgccctcaaacatcagactgcaagttcttcagcttttggactcttggacttacaccagtgatttgccaggagctctcaggccttcagcaacagactgaaggctgtgctgtcggcttccctacttttgaggttttgggactcagactggcttcctggctcttcagcttgcagatggcctattgtgggacttcaccttgtgatcatctcgcccgtgcttcgtgggggaatggagcccctggagtggttgtgcagaccagtgcaagcctacaacccgtgtgcggaggcgctcggtgcagcaggagcctcagaacggcggggcgccctgcccacccctggaagagagagctggctgcctggagtactccaccccgcagggccaggactgcgggcacacctatgttcctgcctttataactacctctgcattcaacaaggagagaacacgacaagctacgtctccacactggtctacacacacagaggatgctggatactgtatggagtttaagacagagtccttgactcctcactgtgctctggaaaaccggcccttgactagatggatgcagtatctccgagagggatacacggtgtgtgtggattgtcagcctccagctatgaactctgtgagccttcgttgttctggagatggcctggactccgatggaaatcagactctccattggcaagcaattggtaatcctcggtgtcaaggaacttggaaaaaagttcggcgagtagaccagtgttcttgtccagctgttcacagttttatttttatatagatggtgatataaatatttccaaatgcatttgtaaacattctaaatattctcaagtcatgttcaatgtttcctaaaccttcaattttggccaaagtccccaaacacatcattgccacactctgaagtagagaaagaaaatttaggggccagttctcaaggaacacaggtcctttatttttattttaactaagttgaagacccactcaaaaagctcttgtggttttatgttcttgacctttcaactggagtcctctcattcagcaggtggcccgtgagacacagaatacatgtctgtttgctaaagtaaaattactgtaactcagtccgattattggtgacggaagtgtcatttaaggggatctatgttttgaaccttgcagtctattttataatcttttaaaagtttctcactttaaaacatgtatacaggtatgcacactctacacatatatttccatatacttaatattccataaattctgaaataatttcaagcaaattatcacaaataatttttccacagggcaaattatttaaaattttagtaagcattctgtaatgaaaaaccaagttatactaaaaacattttttgaagaagaaattttttttttgcttaagaagtgaaaggatcaaatgctcattgtaggtcaatgggagttcttttaaatgttataattttcatgaaaagaaatgttgacaccagtgaatgaaacaattgctttcattctgaaaattctaccaccatttgcatctaagattatttccaaggcttaaagcctgaagctgaataaaataatctttcagagtcc

SEQ ID NO: 1828 - DNA, 2227 bp, Homo sapiens
ttgtaccactgcactccagcctggacaacagagtgagactctgtctccaaaaataaataaataaggaaaaaaaaaaaagtgcagatggggcggggccagagctgggatggagctgactgttagcatccgttcagggcgtcggcaccatgggggcactatccagcgcagatctgcaagcccagcattcagcactccctcccccagccccagctgttgccagctgcatggggccagctgtgttgggtggggactgtgtagggtccagctatgagttggtggagtctgcgtggggactgtgtagggtccagctatgagttggtgaggcttaacaagcagtgcaggtgattccaatgcacactcatctgtggttttggaccacagatgtagatgttccagggaccacatggacaggggccattgcagacaggcctgaggacctcctgggcctgattgacttgaaggctagtttggggtctgggagctacagagatttggtggcagctctttcccatagggctaagacagatggggccaggaatacacctttcctccagcataggagccggaacaggtacctcaggaccctcttcaccccacagctggtgtctctcacccacatgggagcaagacccagcgccaggcagagaattcaggtttcaagactccaaatcagggctggttgcagtggctcatgcctttaatcccagtgctctgggagactgacatgggagaactgcttgaggccgagggttcgagagcagccctggcaacgtagtgagaccccccccccgccccggccaccatctctacaaaaaaaaaaaaaagactccaaatcagaccggccagactagatgcctagagagatgtgtgggcacacccagagccatgtcctccgccagggaagccagcaactgtgatgctgggggtatggtagtgacaggcggtcgactcggggtaatattcttggaggagccgggcatggtggctcacacctataatcccggcactttgggaagccgaggcgggtggatcacgaggtcaggagattgagaccatcctggctaacatgatgaaaccccgtctctaataaaaatacaaaaaattagccgggcacggtggcgggctcctgtagtcccagctactcgggaggctgaggcaggagaatggcgtgaacccgggaggcagagtttgcagttggccgagatcacgccactgcactccagcctgggcgacagagcgagactccgtctcaaaaaaaaaaaaaaagattcttggaggaagggggcctgggagctatgtcagacaggtagtagcagctctgtgtggctgactctccactggccctagcatttccctaaacaattggaagtaggagggtcttgagaaggggatccccctctgtgaagccccagcaccatccaaggtcagcaggggcctcgttcccatgcccagaggcagggtgagataaggggctcaggtctggctgtcccaggctgctcctggggcccagccagagggggcagaggagccgaggggggagttgggggggatctggcagtcccagccctgcaggaagtgtttgtgcatccgccccggcggaacctggctcccaatccccgactgtgagaccgcctgttcttccttccagtccgaaggagcttacgacatcatcctcccacgggccaccgccaacagccaggtgatgggcagtgccaactcgaccctgcgggctgaagacatgtactcggcccagagccaccaggcggccacaccgccgaaagacggcaagaactctcaggtctttagaaacccctacgtgtgggactgagtcagcggtggcgaggagaggcggtcggatttggggagggccctgaggacctggccccgggcaagggactctccaggctcctcctccccctggcaggcccagcaacatgtgccccagatgtggaagggcctccctctctgccagtgtttgggtgggtgtcatgggtgtccccacccactcctcagtgtttgtggagtcgaggagccaaccccagcctcctgccaggatcacctcggcggtcacactccagccaaatagtgttctcggggtggtggctgggcagcgcctatgtttctctggagattcctgcaacctcaagagacttcccaggcgctcaggcctggatcttgctcctctgtgaggaacaagggtgcctaataaatacatttctgctttatt

SEQ ID NO: 1829 - DNA, 1801 bp, Homo sapiens
ttttgtagagacaggggtcttactatgttgcccagactggtcttgaactcctgtcaagtgagcctcccacctcagcctcccaaagtgctatgattacaggtgtgagcctccatgcttggatgagatgttgtttttaatgtttttggttttttggttttgttgttttgtttttttgagacagggtctcactctgtggcccaggctggagtgcagtggcaccataatggctcactgcagcctcgacctcccaaggctcaggtgatcctcttgcctcagccaccccttccccggccaccaagtagctgggactatgggcttgtgccaccatgcctggctaatttttttatttttagtagagatggggttttaccacgttggccaggctagtgtccaactcctgacctccaaacagctaatttttgtatttttaatagagacaggttttcgccatgttgcccagcctcgtctcgaactcctgggctcaaatgatccacccacctcggcctcccaaagtgctgggattataggcatgagccaccacacctggccttttcagtttttttatttttattttttctttgagacggagtctcgctctgtcgcccaggctggagtgcagtggcgtgatcttggctcactgaaacctccatctcctgggttcaagcagttctcctgcctcagcctcctgagtagctgggattacaggtgcctgccaccatgcctggctaatttttgtatttttagtagagacagggttttgccacattgcccaggctggtgttgaactcctgggctcaaatgatccacctgccttggcctcccaaagtgctgggattacaggcgtgagccactgcacccggccctttgtagtgtttttaactaaagaatttgtagagttgcccaggccaggaagcctggtggctctaaagggtaatagaccttgtcagtaacagataaggagtggtaagaggacattactcatattgaagatgaagaccagactttgctgcttcacaggccatgcgctgggttgggccacttcagctccactccattcgttttcctttcctaacttgacaatcagctcactcaccctcccttagtgcctccagtgcctactcctgtcactccaatgtcaacccattgggagttgaggcctgtcactccaatgtcaacccgtgggctgttactttgcgtcatatgatgctgtgagaggccttgctggaatgtcctaggaatccctagtagcagtggctattagtcttctagaaaagaactattgctgctgccttgtgcacatgccccaccttctgggcaagtggcagcattgcgctcatgaggggctttgcattcttagccaagggcaataaactgggtgggtgatctggcccaaacttgcccctaggctctgctagccctgaatcagcaggcttcagagacgagggtgggtgttataaaagccagtctgtaaagggtaaattccaaatcttgtgccttgttataccaatccttcctgattcccgtttaaaccaactactctatttctgtgctgcctacattttcaatcctcccacgcattagcaaattcctgaaatttcctcatttggtaggccttccataggagtcagctatggacttccataggagttggcagctaaaaccagactgtgagcttctgtctccgttctgatttttgctgcacctcccaggggacagtccccacatgattacaaaagccaggtgccctcatcacccgttacccctgacctgtccacttgttttgaataaaccttcattctcc

SEQ ID NO: 1830 - DNA, 2497 bp, Homo sapiens
ctaattgaagtttttattttttatggaggcataacatatctagaataaggtacacagatttttttttttttttttttgaggtggagttttgctcatgttgcccaggttggagtgcagtggcgcagtctcggctcactgcagcctccgcctcccaggttcaagcgattctcctgcctcagccttccaaagtgctgggaatacaggcgtgagccacctcgcctggcactcagatcttaatacatttttaggctgggcatggcggctgacacctgtggtctcagcactcaggaggccaaggagtgaggtttgtttgagcccaggagttcgagaccagcctgggcaacatggcaagaccctgtctctacaacaaatcttaaaaattagccgggtgtggtggcatgtgcctgctgtcccagctattcgggaggctgaggtgggaggatcgtttcaacctgggaggtcaaggctgctgtgagccgtgattgcatcgctgcactccagctcgggtgacagtgtgagactttgtctcaaacaacaaaacaaaacagttttccacatacacagcactattgtaaccactgcccaaatcaacttcattgatttttctttttttgaggcggtcttcctctgtcacccaggctggagtgcaatggcatgatctcggctcactgcaacctccgcctcccgggttcaagagatttcctgcctcagcctcctgagtagctgggattgcgggcatctgccaccacgcccggctactttttgtatttttagtagagatggggtttcaccgtgttggtcgggctggtctcgaacccttgacctcaggtgatccatctgccttggcctcccaaagtgctgggattacaggtgtgagctactgtgcctggcctggtttttcaattgaggtgggggaatggggaaggctagagggcttccccacttccagagtagctgtgcgccttgtacttgctttattcactgatggtccttctaataatgcctgcggaaacccattttgtcaactgtggccacatgtaatctgtttgctctgtctgcagtgggctcgggatgagtttgaaggcctcttcaagcagccagcagaaaatgtcaaccagtacctcacagaccccaagtttgtggagcgaacactgcggctggcaggcactcagcccttggaggtgctggaggctgtgcagcgcagcctggtgctgcagcgaccacagacctgggctgactgcgtgacctgggcctgccaccactggcacacccagtactcgaacaacatccggcagctgctgcacaacttccctcctgaccagctcacaagctcaggagcgccgttctggtctgggcccaaacgctgtccacacccgctcacctttgatgtcaacaatcccctgcatctggactatgtgatggctgctgccaacctgtttgcccagacctacgggctgacaggctctcaggaccgagctgctgtggccacattcctgcagtctgtgcaggtccccgaattcacccccaagtctggcgtcaagatccatgtttctgaccaggagctgcagagcgccaatgcctctgttgatgacagtcgtctagaggagctcaaagccactctgcccagcccagacaagctccctggattcaagatgtaccccattgactttgagaaggatgatgacagcaactttcatatggatttcatcgtggctgcatccaacctccgggcagaaaactatgacattccttctgcagaccggcacaagagcaagctgattgcagggaagatcatcccagccattgccacgaccacagcagccgtggttggccttgtgtgtctggagctgtacaaggttgtgcaggggcaccgacagcttgactcctacaagaatggtttcctcaacttggccctgcctttctttggtttctctgaaccccttgccgcaccacgtcaccagtactataaccaagagtggacattgtgggatcgctttgaggtacaagggctgcagcctaatggtgaggagatgaccctcaaacagttcctcgactattttaagacagagcacaaattagagatcaccatgctgtcccagggcgtgtccatgctctattccttcttcatgccagctgccaagctcaaggaacggttggatcagccgatgacagagattgtgagccgtgtgtcgaagcgaaagctgggccgccacgtgcgggcgctggtgcttgagctgtgctgtaacgacgagagcggcgaggatgtcgaggttccctatgtccgatacaccatccgctgaccccgtctgctcctctaggctggccccttgtccacccctctccacaccccttccagcccagggttcccatttggcttctggcagtggcccaactagccaagtctggtgttccctcatcatccccctacctgaacccctcttgccactgccttctaccttgtttgaaacctgaatcctaataaagaattaataactcc

SEQ ID NO: 1831 - DNA, 1879 bp, Homo sapiens
cagcttcactcttgtcctcattgaggagcgagtcacccgagccaagcacctgcagctcatggggggcctgtcccccaccctctactggcttggcaactttctctgggacatgtgtaactacttggtgccagcatgcatcgtggtgctcatctttctggccttccagcagagggcatatgtggcccctgccaacctgcctgctctcctgctgttgctactactgtatggcacagcctatgtggtgctcacctgcataaacctctttattggcatcaatggaagcatggccacctttgtgcttgagctcttctctgatcagaagctgcaggaggtgagccggatcttgaaacaggtcttccttatcttcccccacttctgcttgggccgggggctcattgacatggtgcggaaccaggccatggctgatgcctttgagcgcttgggagacaggcagttccagtcacccctgcgctgggaggtggtcggcaagaacctcttggccatggtgatacaggggcccctcttccttctcttcacactactgctgcagcaccgaagccaactcctgccacagcccagggtgaggtctctgccactcctgggagaggaggacgaggatgtagcccgtgaacgggagcgggtggtccaaggagccacccagggggatgtgttggtgctgaggaacttgaccaaggtataccgtgggcagaggatgccagctgttgaccgcttgtgcctggggattccccctggtgagtgttttgggctgctgggtgtgaatggagcagggaagacgtccacgtttcgcatggtgacgggggacacattggccagcaggggcgaggctgtgctggcaggccacagcgtggcccgggaacccagtgctgcgcacctcagcatgggatactgccctcaatccgatgccatctttgagctgctgacgggccgcgagcacctggagctgcttgcgcgcctgcgcggtgtcccggaggcccaggttgcccagaccgctggctcgggcctggcgcgtctgggactctcatggtacgcagaccggcctgcaggcacctacagcggagggaacaaacgcaagctggcgacggccctggcgctggttggggacccagccgtggtgtttctggacgagccgaccacaggcatggaccccagcgcgcggcgcttcctttggaacagccttttggccgtggtgcgggagggccgttcagtgatgctcacctcccatagcatggaggagtgtgaagcgctctgctcgcgcctggccatcatggtgaatgggcggttccgctgcctgggcagcccgcaacatctcaagggcagattcgcggcgggtcacacactgaccctgcgggtgcccgccgcaaggtcccagccggcagcggccttcgtggcggccgagttccctggggcggagctgcgcgaggcacatggaggccgcctgcgcttccagctgccgccgggagggcgctgcgccctggcgcgcgtctttggagagctggcggtgcacggcgcagagcacggcgtggaggacttttccgtgagccagacgatgctggaggaggtattcttgtacttctccaaggaccaggggaaggacgaggacaccgaagagcagaaggaggcaggagtgggagtggaccccgcgccaggcctgcagcaccccaaacgcgtcagccagttcctcgatgaccctagcactgccgagactgtgctctgagcctccctcccctgcggggccgcggggaggccctgggaatggcaagggcaaggtagagtgcctaggagccctggactcaggctggcagaggggctggtgccctggagaaaataaagagaaggctggagagaagccgtggtggtg

SEQ ID NO: 1832 - DNA, 1608 bp, Homo sapiens
aggtctcagagaggagccttagtcctggactccaaggcctttccactgggtgatcagcactgagcacagaagactgaccatggagtcggggctgagctgggtcttcctggttgctattttagaaggtgtctactgtgacgaacagctggtggagtctgggggaggcttggtccggccgggggggtccctcagactctcctgcgaagcctctggattcactttcagtgacttttggatgacgtgggtccgccaggctccagggaagcgactggagtgggtggccagcgtccaccaaaatggacgtgagaggtatgatgcggcctctttggggggccgattcaccatttctagggacaacaccaagaattcactgtatctgcaaatgaagagcctgggacccgaggacacggccgtgtattattgtgggagggactacggatacagtagcggcgatgaagcttttaccttatggggccaagggacaaaggtcaccgtctcttcagcatccccgaccagccccaaggtcttcccgctgagcctctgcagcacccagccagatgggaacgtggtcatcgcctgcctggtccagggcttcttcccccaggagccactcagtgtgacctggagcgaaagcggacagggcgtgaccgccagaaacttcccacccagccaggatgcctccggggacctgtacaccacgagcagccagctgaccctgccggccacacagtgcctagccggcaagtccgtgacatgccacgtgaagcactacacgaatcccagccaggatgtgactgtgccctgcccagttccctcaactccacctaccccatctccctcaactccacctaccccatctccctcatgctgccacccccgactgtcactgcaccgaccggccctcgaggacctgctcttaggttcagaagcgaacctcacgtgcacactgaccggcctgagagatgcctcaggtgtcaccttcacctggacgccctcaagtgggaagagcgctgttcaaggaccacctgagcgtgacctctgtggctgctacagcgtgtccagtgtcctgccgggctgtgccgagccatggaaccatgggaagaccttcacttgcactgctgcctaccccgagtccaagaccccgctaaccgccaccctctcaaaatccggaaacacattccggcccgaggtccacctgctgccgccgccgtcggaggagctggccctgaacgagctggtgacgctgacgtgcctggcacgcggcttcagccccaaggacgtgctggttcgctggctgcaggggtcacaggagctgccccgcgagaagtacctgacttgggcatcccggcaggagcccagccagggcaccaccaccttcgctgtgaccagcatactgcgcgtggcagccgaggactggaagaagggggacaccttctcctgcatggtgggccacgaggccctgccgctggccttcacacagaagaccatcgaccgcttggcgggtaaacccacccatgtcaatgtgtctgttgtcatggcggaggtggacggcacctgctactgagccgcccgcctgtccccacccctgaataaactccatgctccccc

SEQ ID NO: 1833 - DNA, 1740 bp, Homo sapiens
atttagtagtagtaggaggagtattatgtttgagatggagtctcgctctgtcgcccaggctggagtgcagtggcgcagtctcagctcactgcaacctctgcctcccgggttcaagcaattcttgtgcctcagcctcctgagtggctgggattacaggcgcccgccaccgcgcctggctgacttttgtatttttagcagagatggggtttcaccatgttgcccaggctggtcttgaactcccgacctcaggtgatccatccgcattggcctcccaaggtgctgggatcacaggcgtgagccaccgcacctggcctcaagccagtatttccctggccctaaatcattcctggctgggtcccagcccagtagagccagccccccagcccggagtgctgctgaagtgttcaaaagttgtcaatcctcagccgttccctagtcctgttgcccggttctgccgaagccccttgaaggctgtggcctgggctgttccctcattcattcctgcctcccgagccaaacccaggtatccgcttgtgccctgcgtggtgtggcagcgtcttctctcgggaagggtcaggagtaatttcttctttcagtggcctctctgtgctagtcccggtcacctccgtgaattaaagtcctacaggtacaagggagacccccccccacggaaggcgcccccagtccgtgtgggagactcgcacaccggttttctgcacaggtttctttctgcctctgaggcgtgaacggtcctagtttcagacgcagatcctgcaaatacttttttttgtttttttgagatggattttccctcttgttgttcaggctggagtgcagtggcacgatctcagctcactgcagcctctgcctcccgggttcgggtgattctcctgcctcagcctcccgaggagctgagattacaggcgcgtgccaccgtgcctggttaattttgtatttgtatttttatttatgttttgagacggagtttcgctctcgttgccgaggctggagtgtagtagtgtgatcctggctcactgcaacctccacctcccgggttccagcaaattctcctgcctcagcctcccaagtagctgggattgcaggcgcccgccaccacgcccggataatttttgtgtgtttggcggagacggggtttcaccatgttggccgggctggtctcaatctcctgacctcaggtggtccacccgcctcggcctcccagggtgctgggatgacaggcgtgagccaccgcgcccggcctatacctcattttctacatgtcgcttgttggagctgctggttcaagttcccagccagccaatggatgccagcaccatttttactcccctttcccaagcaaatcgtgcatttttgtctaacgagagacatcagtttctcaggatgatcctcaagaacgttatggagtccatgttgcaataggttctctttgggacctaatgactcattttccaaaaatccgcttctacttttggtacccggttgctacggtgaaatgaaggtgccccgcatccagaaagacgcactcctggaccacaaccggcggctacctcagccccacggctctgcaggatcagggctcgggcaggccccgcggagatgaagaatttgcagggagcctccctgacttccgtcggctgtgaatccttgtctgtcaggggcgtatccacaaaatcaccgaattcatacagatcgtttaaataaatgaacatcattaaagtc

SEQ ID NO: 1834 - DNA, 1583 bp, Homo sapiens
aacaaccacatccctcctcagaagcccccagagcacaacgcctcaccatggactggacctggaggatcctctttttggtggcagcagccacaggtgtccactcccaggcccagcttgtgcagtctggggctgaggtgaagaagcctggggcctcactgaagatttcctgcaaggcttctggatacattttcagtacttttgctgtccattgggtgcgccaggcccccggacaaaggcttcagtggctgggatggatcgacgctgccactggaaacacaagatttccacccgagtttctggacagagtcatcttgaggagggacacatccgcgagcaccgtgtacatggagctggccagcctgacatctgaggactcggctctatattactgcgcgcgaggaacaccgctacgtatggagacggaatttgcttatgatgtttggggccaagggacaagagtcaccgtctcttcgacatccccgaccagccccaaggtcttcccgctgagcctctgcagcacccagccagatgggaacgtggtcatcgcctgcctggtccagggcttcttcccccaggagccactcagtgtgacctggagcgaaagcggacagggcgtgaccgccagaaacttcccacccagccaggatgcctccggggacctgtacaccacgagcagccagctgaccctgccggccacacagtgcctagccggcaagtccgtgacatgccacgtgaagcactacacgaatcccagccaggatgtgactgtgccctgcccagttccctcaactccacctaccccatctccctcaactccacctaccccatctccctcatgctgccacccccgactgtcactgcaccgaccggccctcgaggacctgctcttaggttcagaagcgaacctcacgtgcacactgaccggcctgagagatgcctcaggtgtcaccttcacctggacgccctcaagtgggaagagcgctgttcaaggaccacctgagcgtgacctctgtggctgctacagcgtgtccagtgtcctgccgggctgtgccgagccatggaaccatgggaagaccttcacttgcactgctgcctaccccgagtccaagaccccgctaaccgccaccctctcaaaatccggaaacacattccggcccgaggtccacctgctgccgccgccgtcggaggagctggccctgaacgagctggtgacgctgacgtgcctggcacgcggcttcagccccaaggacgtgctggttcgctggctgcaggggtcacaggagctgccccgcgagaagtacctgacttgggcatcccggcaggagcccagccagggcaccaccaccttcgctgtgaccagcatactgcgcgtggcagccgaggactggaagaagggggacaccttctcctgcatggtgggccacgaggccctgccgctggccttcacacagaagaccatcgaccgcttggcgggtaaacccacccatgtcaatgtgtctgttgtcatggcggaggtggacggcacctgctactgagccgcccgcctgtccccacccctgaataaactccatgctcccccaagc

SEQ ID NO: 1835 - DNA, 1627 bp, Homo sapiens
agctctgggagacgagcccagcactggaagtcgccggtgtttccattcggtgatcagcactgaacacagaggactcaccatggagtttgggctgagctgggttttcctcgttgctcttttaagaggtgtccactgtcaggggcagctggtgcagtcggggggaggcgtggtccagcctgggaggtccctgagactctcctgtgaagcgtctgggttttccttcaagttctttaacatgcactgggtccgccaggctccaggcaaggggctggaatgggtggctgttatctcatttgatggaactaagaaatactatgcagactctgtgaagggccgattcaccgtctccagagacaactccaggaacaccctcgatttgctaatggacggactgagacctgaagacacggctgtatattcctgtgcgaaagctccattcaacctggttcggggagtacacggcgcttttgatctctggggccaagggacacttgtcaccgtctcctcagcctccaccaagggcccatcggtcttccccctggcaccctcctccaagagcacctctgggggcacagcggccctgggctgcctggtcaaggactacttccccgaaccggtgacggtgtcgtggaactcaggcgccctgaccagcggcgtgcacaccttcccggctgtcctacagtcctcaggactctactccctcagcagcgtggtgaccgtgccctccagcagcttgggcacccagacctacatctgcaacgtgaatcacaagcccagcaacaccaaggtggacaagagagttgagcccaaatcttgtgacaaaactcacacatgcccaccgtgcccagcacctgaactcctggggggaccgtcagtcttcctcatccccccaaaacccaaggacaccctcatgatctcccggacccctgaggtcacatgcgtggtggtggacgtgagccacgaagaccctgaggtcaagttcaactggtacgtggacggcgtggaggtgcataatgccaagacaaagccgcgggaggagcagtacaacagcacgtaccgtgtggtcagcgtcctcaccgtcctgcaccaggactggctgaatggcaaggagtacaagtgcaaggtctccaacaaagccctcccagcccccatcgagaaaaccatctccaaagccaaagggcagccccgagaaccacaggtgtacaccctgcccccatcccgggaggagatgaccaagaaccaggtcagcctgacctgcctggtcaaaggcttctatcccagcgacatcgccgtggagtgggagagcaatgggcagccggagaacaactacaagaccacgcctcccgtgctggactccgacggctccttcttcctctatagcaagctcaccgtggacaagagcaggtggcagcaggggaacgtcttctcatgctccgtgatgcatgaggctctgcacaaccactacacgcagaagagcctctccctgtccccgggtaaatgagtgcgacggccggcaagcccccgctccccgggctctcgcggtcgcacgaggatgcttggcacgtaccccgtctacatacttcccaggcacccagcatggaaataaagcacccaccactgccctggg

SEQ ID NO: 1836 - DNA, 1820 bp, Homo sapiens
agacgtggtccaggtttctgcacaggaatatcgagagcgtcatgaacccgagctatagagaaaggagatgaggtcagagaagtcgaaggggtgctggcgagacgggggtgatgcccacccgggcgagaaagcttcccaaagttctgggattacaggcgtgagccaccgcacccggctgacaagtgtccttctaagaaacacacagaggagaagacacagaagaggagagcaccatgtgatggtagacacagaaattggagttctacagccacaagccaaggaactcctggagccaccaggagatggaagatgcaaagaactgattttctctcagagcctctggagggagtgtggccctggtgacaccttgattttggacttctggcctacagaaccatgcacacaggaggacttcatttcccaggtctccttgcagtgaagttgaggccatgtgactggtcttgggccaatggaatgggtgcagaagggacacagcccatttctagactcagcctgaaatgtcctccataatccttactctttctcccttcactcactggctgcaggaagctgagaattatccttggacttacataaagcattttggactttatgtaagtaacaacctgttgtattaagctactaagattttacggttgtttgttaaatcagctaaccttaaacagcctgaccaacatagtgaaaccccgtctctactaaaaatacaaaaattagctggatgtggtcccacctgtagtcccagctactcgggaggctgaggcaggagaattgcttgaacctgggaggcggaggttgtggtgagctgagatcgcaccactgcactgcagcctgggcaacagagcaggactctatctcaaaaaaaaaacacaataaacatttcttacctactgtagtttttgtgggtcaggaatctgggagcagcttagttggatgatttctgctcacagtgttttatgaggttgcagtcaagatgttggctggggctgtagtcatctggagatttaactacggctggaggatccacttcaccatggttcactcacctggtgctggttgctggcaggaaatttcagctcttctcttatatggatctcttcacagattgcttgagtgtcctcaccgtatggtgactggcttcctttacagaaatcagttgaagggaatgggcaagtaagaaacagcaatgctttttatgacctagtcctgaagttccccaccattacttatgttcattggaagccagttgctaaggagagcctgcactcaaagattggggaaatagactttatctttcaaagtgttgaagaatttgcagacgtattttaaaaccaccacacaatccatcaacacatcatgtcggctctattcttgaaatagatccagaatttgaccacttttcaccatctccattgctattacccagatctaatcaacaccatcacttgcctggactagagatttcctcctcactgggctctctgcttctatctttagcccattgctatgatttggctgtgtccccacccaaaatctcatcttgaattataatcttcataatccccatgtgtcaaaggagagaccaggtggaggtaactgaatcatgggggtggtttccccaggctgtttttgtgatagtgagtgagttctcatgagatctgatggttttataaggggctcttccctcctttgcttgtgaagaaggtgccttttttcccctttgccttctgccatgattgtaagtttcctgaggcctccccagccaagctgaactgtgagtcaattaaacctcttttcttcgt

SEQ ID NO: 1837 - DNA, 2329 bp, Homo sapiens
agtgttgctgcggttgcctaagttgttttactatttctggagagagccgtgagcttgtccaggggccccaatcctgaggccgacccggtttctggcgcggtgcgatggaggtagtggaggccgccgccgctcagctggaaactctgaaattcaatggcaccgactttggagttggggaaggtccggcggctccgtctccgggctctgcccctgtgccagggacacagccgccgctacagtcgtttgaggggtccccggacgctgggcagaccgtggaggttaagcctgccggggagcagcctctgcagcccgttctgaacgccgtcgcggccgggaccccggcgccgcagccacagccaccggctgaatcgccggcctgcggagactgcgtcacctccccaggagccgcagagcctgcgcgggcgccggactccttggagacctcggactcggattcggactcggacagtgaaacagattcagatagttcaagttcatcgtcttcctcttcatcttcctcatcgtcgtcttcttcctcttgtatatcacttcctccagtgctgtcagatggagatgatgatttacaagttgagaaggaaaataagaattttcctcttaaaacaaaagatgaattacttcttaatgaactgccttctgttgaagaactcactattattctgcctgaagatattgagttaaagcctcttgggatggtttcaagtattattgaacaactagtaataattgaatctatgactaacctacctccagttaatgaggagactgtaatttttaaaagtgatcgacaagcagcaggaaagatattcgagatatttggacctgttgcacatccattttatgtgttacggtttaattcttcagatcacattgagagtaaaggtattaaaataaaggagactatgtattttgctccatcaatgaaagatttcactcaatatatattcacagaaaaactaaaacaggataagggatcagatgcatcatggaagaatgatcaggaaccaccaccagagacatgggggtctcagtgtgttgcccaggctggtctcaagctcttggcctcaagtgattctccagccctcaagcaagcttctgccttggctccccaaagtgctgggattacaggcatgagccccttgcccagccagtattacagatttttgatacttaccgatttaaccttggccattttagatgtttaaagcaatcgtaaatcatgatctgtgtttctaattttactgaggtatgaatcaggtttatgcccacttggagggttctatacaggtatgaatcacttaaccagtgaatgatccttgcttagtatctgaattgaaatggaattatgttttctaattaatgttatgtatttatgtgatttcagttaaggctctgaatattcacttaatgttctgaattaagttttagagtatctatagcatcttattactggaattacatgttttaaacgtgtttagagattcataaacatctcaaatcatatttcttttaaaatccagatattctttttttctttttttgggtaggggatggagttttgctctttctgcccaggctgcaatgcagtggcacggtctcagctcaccgcaaactctgcctccgggttcaagcaattctcctgcctcagcctcctgagtagctgagattacaggcgcatgccaccacgcccagctaattttgtatttttattagagacggggtttcacaatgttgtccaggctagtcttgaactcctgacctccagtaatccacccctctctgcctctcaaagtgctgagatttcaggcgtgagccaccgcacctggccaaaatccagatattctaatgaatccctcttgtttcggacctaagcattgaagttaccaattacaacaatgcgagttatttgtaaaattggtttgactaggttaattgcaaaattacatctcacctagttcatggtgtttgttttttccaggtagcttgaactggatcattaagtatcttgggatttaattttgtaatatttgttggtgaaactttgtagtctagaattattgcctggtattgatcatagattaaaattagaaatttgtgaggtttaaacttaaaaagagaaaaaggagaaacattgcgtgatgtgaaaatagaaagcttgcataaaggaaaataagagaaattatgtgctatgaaatgttgggctgcataaaggacctaaaaattacctacggttgtatcatgttcatcttcatagccatttttaatatgccaccgtatactttatggttgaataaatgtatttaatgaatgg

SEQ ID NO: 1838 - DNA, 929 bp, Homo sapiens
agtcagtcccaaccaggacacagcatggacatgagggtccctgctcagctcctggggctcctgctgctctggctctcaggtgccaggtgtgacactcagatgacccagtctccgacctccctgtctgcatctgtgggagacagagtcaccatcacttgccaggcgagtcacgacattgaaagttttttaaactggtatcagtacaaaccaggcaaagcccctaagcgcctcatccacgatggctccagatcagaaaaaggagtcccacgaagattcagtggaagtggatttgggacagattttagtcttttcatcaacaacctacaacctgaagatgttgcgacatattactgtcaacaatttggttctctgcctcggacctttggccaggggaccaagcttcagatcaatcgaactgtggctgcaccatctgtcttcatcttcccgccatctgatgagcagttgaaatctggaactgcctctgttgtgtgcctgctgaataacttctatcccagagaggccaaagtacagtggaaggtggataacgccctccaatcgggtaactcccaggagagtgtcacagagcaggacagcaaggacagcacctacagcctcagcagcaccctgacgctgagcaaagcagactacgagaaacacaaagtctacgcctgcgaagtcacccatcagggcctgagctcgcccgtcacaaagagcttcaacaggggagagtgttagagggagaagtgcccccacctgctcctcagttccagcctgaccccctcccatcctttggcctctgaccctttttccacaggggacctacccctattgcggtcctccagctcatctttcacctcacccccctcctcctccttggctttaattatgctaatgttggaggagaatgaataaataaagtgaatctttgc

SEQ ID NO: 1839 - DNA, 1613 bp, Homo sapiens
atccaacaaccacatcccctctctacagaagcctctgagaggaaagttcttcaccatggactggacctggagggtcttctgcttgctggctgtagctccaggtgctaactcccaggcgcagctgctgcagtctgggcctgaggtgaggaagcctggggcctcagtgaaggtttcctgcaaggcatctggattcgatttcaccagagattttcttcagtgggtgcgacaggcccctggacaagggcttgagtggatgggatttatcgacccgagtggcggtagtacactttatgcacagaatttccagggccgagtcaccatgaccagggaaaggtccacgaccacggtgtatatggaactgagcagcctgaaatctgaggacacggccacatatttttgttgtgggtcagtgaatatcgtgtcaacgactagtgggggtgatccttgtgatctttggggccaaggcacagtggtcaccgtttcctcagcctccaccaagggcccatcggtcttccccctggcaccctcctccaagagcacctctgggggcacagcggccctgggctgcctggtcaaggactacttccccgaaccggtgacggtgtcgtggaactcaggcgccctgaccagcggcgtgcacaccttcccggctgtcctacagtcctcaggactctactccctcagcagcgtggtgaccgtgccctccagcagcttgggcacccagacctacatctgcaacgtgaatcacaagcccagcaacaccaaggtggacaagaaagttgagcccaaatcttgtgacaaaactcacacatgcccaccgtgcccagcacctgaactcctggggggaccgtcagtcttcctcttccccccaaaacccaaggacaccctcatgatctcccggacccctgaggtcacatgcgtggtggtggacgtgagccacgaagaccctgaggtcaagttcaactggtacgtggacggcgtggaggtgcataatgccaagacaaagccgcgggaggagcagtacaacagcacgtaccgtgtggtcagcgtcctcaccgtcctgcaccaggactggctgaatggcaaggagtacaagtgcaaggtctccaacaaagccctcccagcccccatcgagaaaaccatctccaaagccaaagggcagccccgagaaccacaggtgtacaccctgcccccatcccgggatgagctgaccaagaaccaggtcagcctgacctgcctggtcaaaggcttctatcccagcgacatcgccgtggagtgggagagcaatgggcagccggagaacaactacaagaccacgcctcccgtgctggactccgacggctccttcttcctctacagcaagctcaccgtggacaagagcaggtggcagcaggggaacgtcttctcatgctccgtgatgcatgaggctctgcacaaccactacacgcagaagagcctctccctgtctccgggtaaatgagtgcgacggccggcaagcccccgctccccgggctctcgcggtcgcacgaggatgcttggcacgtaccccgtgtacatacttcccgggcgcccagcatggaaataaagcacccagcgctgccctgggcccctgc

SEQ ID NO: 1840 - DNA, 1763 bp, Homo sapiens
gttctgggagaggagcccagcactggaagtcggcggtgtttccattccgtgaggagtactgaacacagaggactcaccatggagttcgggctgacctgggttttcctcattgctcttttaagaggtgcccagtgtcgacagcagttggtggagtctgggggaaatgtggtccagcccgggacgtccctgagactctcctgcgtggcctcaggtctcgacttcagaaaatatggcttgcattggctccgccagactccaggcaggggtctggagtgggtggcggtcatttggcacgatggaagcaatagtttttatgcggactcagtgaggggccggtttaacatatccagagacaattccaagaacgccctgtttttgacaatgaacaatctgcaggccgaagacacggctatatattactgtgtcaaagggtatagtctttggtatggttcttttcatctgtggggccaagggacggcggtcactgtttcttcagcttccaccaagggcccatcggtcttccccctggcgccctgctccaggagcacctctgggggcacagcggccctgggctgcctggtcaaggactacttccccgaaccggtgacggtgtcgtggaactcaggcgccctgaccagcggcgtgcacaccttcccggctgtcctacagtcctcaggactctactccctcagcagcgtggtgaccgtgccctccagcagcttgggcacccagacctacacctgcaacgtgaatcacaagcccagcaacaccaaggtggacaagagagttgagctcaaaaccccacttggtgacacaactcacacatgcccacggtgcccagagcccaaatcttgtgacacacctcccccgtgcccacggtgcccagagcccaaatcttgtgacacacctcccccatgcccacggtgcccagagcccaaatcttgtgacacacctcccccgtgcccaaggtgcccagcacctgaactcctgggaggaccgtcagtcttcctcttccccccaaaacccaaggatacccttatgatttcccggacccctgaggtcacgtgcgtggtggtggacgtgagccacgaagaccccgaggtccagttcaagtggtacgtggacggcgtggaggtgcataatgccaagacaaagctgcgggaggagcagtacaacagcacgttccgtgtggtcagcgtcctcaccgtcctgcaccaggactggctgaacggcaaggagtacaagtgcaaggtctccaacaaagccctcccagcccccatcgagaaaaccatctccaaaaccaaaggacagccccgagaaccacaggtgtacaccctgcccccatcccgggaggagatgaccaagaaccaggtcagcctgacctgcctggtcaaaggcttctaccccagcgacatcgccgtggagtgggagagcaatgggcagccggagaacaactacaacaccacgcctcccatgctggactccgacggctccttcttcctctacagcaagctcaccgtggacaagagcaggtggcagcaggggaacatcttctcatgctccgtgatgcatgaggctctgcacaaccgctacacgcagaagagcctctccctgtctccgggtaaatgagtgccatggccggcaagcccccgctccccgggctctcggggtcgcgcgaggatgcttggcacgtaccccgtgtacatacttcccaggcacccagcatggaaataaagcacccagcgctgccctgggcccctgcg

SEQ ID NO: 1841 - DNA, 1613 bp, Homo sapiens
atcacataacaaccacaatcctcctctaaagaagcccctgggagcacagctcatcaccatggactggacctggaggttcctctttgtggtggcagcagctacaggtgtccagtcccaggtgcaactggtgcagtctggggctgaggtgaagaagcctgggtcctccgtgagggtctcctgcaagtcatctggagacactttcagaaactacgctatcagctgggtgcgacaggcccctggacaagggctcgaatggatggggggggtcatccctttctttggtacaatccactatgcacagaacttccagggcagactcacacttaccgcggacgtgcccacgagcacatcgtacatggacctgagaagcctgcaatctgaggacacggccctttatttctgtacgggagtcccttattacgatcttttgactagttatcacccgggtgactactggggccagggaaccctggtcatcgtctcctcagcctccaccaagggcccatcggtcttccccctggcaccctcctccaagagcacctctgggggcacagcggccctgggctgcctggtcaaggactacttccccgaaccggtgacggtgtcgtggaactcaggcgccctgaccagcggcgtgcacaccttcccggctgtcctacagtcctcaggactctactccctcagcagcgtggtgaccgtgccctccagcagcttgggcacccagacctacatctgcaacgtgaatcacaagcccagcaacaccaaggtggacaagaaagttgagcccaaatcttgtgacaaaactcacacatgcccaccgtgcccagcacctgaactcctggggggaccgtcagtcttcctcttccccccaaaacccaaggacaccctcatgatctcccggacccctgaggtcacatgcgtggtggtggacgtgagccacgaagaccctgaggtcaagttcaactggtacgtggacggcgtggaggtgcataatgccaagacaaagccgcgggaggagcagtacaacagcacgtaccgtgtggtcagcgtcctcaccgtcctgcaccaggactggctgaatggcaaggagtacaagtgcaaggtctccaacaaagccctcccagcccccatcgagaaaaccatctccaaagccaaagggcagccccgagaaccacaggtgtacaccctgcccccatcccgggatgagctgaccaagaaccaggtcagcctgacctgcctggtcaaaggcttctatcccagcgacatcgccgtggagtgggagagcaatgggcagccggagaacaactacaagaccacgcctcccgtgctggactccgacggctccttcttcctctacagcaagctcaccgtggacaagagcaggtggcagcaggggaacgtcttctcatgctccgtgatgcatgaggctctgcacaaccactacacgcagaagagcctctccctgtctccgggtaaatgagtgcgacggccggcaagcccccgctccccgggctctcgcggtcgcacgaggatgcttggcacgtaccccgtgtacatacttcccgggcgcccagcatggaaataaagcacccagcgctgccctgggcccctgc

SEQ ID NO: 1842 - DNA, 1605 bp, Homo sapiens
atccaacaaccacatcccttctccacagaagcctctgagaggaagattcttcaccatggactggacctggagggtcttctgtttgctggctgtgatttcaggtggtcagtcccaggtgccgttggtgcagtctgggactgaggtgaagaagcctggggcctcagtgaatatttcctgcaaggcacctggatacaccttcacgactttctatatgcactgggtgcgacaggcccctggacaagggcttgagtggatggggatccgcaaccctagtagtgggcgctcaagtgtgtcacagaagtttgagggcagactcactttgaccgccgacacgtccacgaccacagcccacatggagctgaggaacctaacatctgacgacacgggcgtctattattgtacaacaactcgatggaagtgggtcgttcgaggggaggataactactggggccagggatccctcgtcatcgtctcctcagcctccaccaagggcccatcggtcttccccctggcaccctcctccaagagcacctctgggggcacagcggccctgggctgcctggtcaaggactacttccccgaaccggtgacggtgtcgtggaactcaggcgccctgaccagcggcgtgcacaccttcccggctgtcctacagtcctcaggactctactccctcagcagcgtggtgaccgtgccctccagcagcttgggcacccagacctacatctgcaacgtgaatcacaagcccagcaacaccaaggtggacgagaaagttgagcccaaatcttgtgacaaaactcacacatgcccaccgtgcccagcacctgaactcctggggggaccgtcagtcttcctcttccccccaaaacccaaggacaccctcatgatctcccggacccctgaggtcacatgcgtggtggtggacgtgagccacgaagaccctgaggtcaagttcaactggtacgtggacggcgtggaggtgcataatgccaagacaaagccgcgggaggagcagtacaacagcacgtaccgtgtggtcagcgtcctcaccgtcctgcaccaggactggctgaatggcaaggagtacaagtgcaaggtctccaacaaagccctcccagcccccatcgagaaaaccatctccaaagccaaagggcagccccgagaaccacaggtgtacaccctgcccccatcccgggatgagctgaccaagaaccaggtcagcctgacctgcctggtcaaaggcttctatcccagcgacatcgccgtggagtgggagagcaatgggcagccggagaacaactacaagaccacgcctcccgtgctggactccgacggctccttcttcctctacagcaagctcaccgtggacaagagcaggtggcagcaggggaacgtcttctcatgctccgtgatgcatgaggctctgcacaaccactacacgcagaagagcctctccctgtctccgggtaaatgagtgcgacggccggcaagcccccgctccccgggctctcgcggtcgcacgaggatgcttggcacgtaccccgtgtacatacttcccgggcgcccagcatggaaataaagcacccagcgctgccctgggcccctgcg

SEQ ID NO: 1843 - DNA, 2510 bp, Homo sapiens
gaggcgtgtcttcccttccagctgacctgcctaggatccctgagttccaggtcccgtgagagactccactcagaggagggctgtcattcttttctgagcatcccggggatcccagggcccgtccagggttcacagatgacatatccccatgctgagcctgcaacagagcgcaaggcagatactcccacccacacaggagtcgcactcaagccgagtgagccaagattccggattccacgttcctttgccctctgcaaggggtcctgctgctcacgtgtctctggcccccaaaagcgtgaccatgttgactgtttgtttcccgagctctgtggggacacagaaacctccagcgaagcatggaaacgcagcatcgtgtcttcgctctcctttcgtttccaaacaggccattttggagactccccatgtttcaggaaacaggaatccctcatcagtccgtgatgactcagtcccctgcccagactacaggcccaccaggcggcctcccttttgctgacactccaggccttcccccggctcgcgagctcccgagtttccaacacatcgggcaggctcaggacagggtgtgcttggaggcctcagggcccggggcccacagttctgggatcccctctggtcctccaccttgccgcggaaaaattgttttggatccctcaccacccctcctgcaaggccccctcttggcccacacacccagagccgtcagggttgcccaggggcgaacagccggcccagccccgcaggacctttttctcacaatgcccacaccatcatcgcttgtcccgacgaggacccgcccgtggccaacgggacaggaagggcctgctttgccccgcgctggcactaaagccccggcagcctgatcacgggaaaggggctgacggacgcccagacacaccccaacactactacgagcaaacccaccccgacacacacacaggcacacatggacacacacacagacacacacacacacacggacacacaaagacacacacacggacacatggacacacgcacacggacacacacggacacacacacaaggacatacagacaaagacacagacacagcttgaaagagagctagggagaccgggatggagagatagaaatgcggggagagagagaaaagtagagggggagagagacagaaggtgacagaagagcgagagttggagggggatgtagagaaagggagagggtgaggaagttgtagagcgacagagacacagccttggagagggaggctctgctcaggtagacagggcactttgagcaggccggggtgaggtggagggtgcttgggccaggctagaacacggggtcagggccgcccacgcgggaaaaccaacggagccctgagacgtgttttttttttttcttggattggttggtttctttggaggtgcgtttcatatggtccttcctttgtttgcttctttctgtctccttgatgcggtgggccccgagatttgtagagtgcacccgtccaactggtggaactatagcaccgagcttgtccacggggccaggtctgggtctctctcgtgtcctcgggactagagtttacacgacgttggtggcaatgggaaacagggtgcacagggacggatttcttcgtggctggcgaagacaatgtccttcccccggggaaagcagcccacgggttctggagccgaggtcttggctggcaactgtgggacctgctgccccaacttcgatggttgcggcggcgcttgatgaatgaattgaattgcctggggtccggggagcgggaagacaccccggagggcaggaaacccgcacctgcgccttccaggtctactacctgctgcagcgccctggctggagccgggctcctggtggggctgcagccaggcaaaagaggtgggatgctgccacctggcggtattgcagctgcagacccccacgaggaggtttcatctcgacataaatcgttttctttcttcagctgatctgtatccctaattttagattaatggtaactccacaaatttagaggcacaaaatatggttgcccacaccttataatcgcattaccacctcccattaccaccacctttcccgctcctccccaccctcatcccgtagactaggtctcgcgatgtttcccaggctggcctcaaactcctgcgcttaagttatttgcctgccttggcctctcaaagtgctgtgatcagccctgtgagtcaccatgcccagccaaccaccacgaagttttgattcagcagcactgggttgtggagctaaggacccacaaatttagaaaagtttttaaatatcataacgtttctgtgaggaaatagtatttggtattacatttttagactcttttataatgttctggttttttccactgagtacagtactaagtagtaattggaaaatcacagcataagtcatattactttttctaatacagagtacttggctgttctctaagctaaacctgatcacctacattgagt

SEQ ID NO: 1844 - DNA, 1622 bp, Homo sapiens
agctctgagagaggagccttagccctggattccaaggcctctccactaggtgatcagtactgagcaccgagggctaaccatggaactgggtctccgctgggttttccttattgctactttagcaggggcccggtgtcaggtgcgtctggacgaatccggggggggcctggtcccgccgggggggtcccaaagactctcctgtgtggcgtctgggttcaccttcggtggtcactccatgagttgggtccgccacgctgcagggaagggactggaatggatcgcggccatcagcagtgactccgtagacgtaagatatgcagactcaatgaggggtcgcctcatcatctctagagacaattccaggaggtcagtctttctggaaatgaacagtctaagggccgaggacactggcgtctattactgtgcgaaagggcaggccggttacagttatggagttgatggctggggcccgggaacactgctcatcgtctcctcggcctccaccaagggcccatcggtcttccccctggcaccctcctccaagagcacctctgggggcacagcggccctgggctgcctggtcaaggactacttccccgaaccggtgacggtgtcgtggaactcaggcgccctgaccagcggcgtgcacaccttcccggctgtcctacagtcctcaggactctactccctcagcagcgtggtgaccgtgccctccagcagcttgggcacccagacctacatctgcaacgtgaatcacaagcccagcaacaccaaggtggacaagaaagttgagcccaaatcttgtgacaaaactcgcacatgcccaccgtgcccagcacctgaactcctggggggaccgtcagtcttcctcttccccccaaaacccaaggacaccctcatgatctcccggacccctgaggtcacatgcgtggtggtggacgtgagccacgaagaccctgaggtcaagttcaactggtacgtggacggcgtggaggtgcataatgccaagacaaagccgcgggaggagcagtacaacagcacgtaccgtgtggtcagcgtcctcaccgtcctgcaccaggactggctgaatggcaaggagtacaagtgcaaggtctccaacaaagccctcccagcccccatcgagaaaaccatctccaaagccaaagggcagccccgagaaccacaggtgtacaccctgcccccatcccgggatgagctgaccaagaaccaggtcagcctgacctgcctggtcaaaggcttctatcccagcgacatcgccgtggagtgggagagcaatgggcagccggagaacaactacaagaccacgcctcccgtgctggactccgacggctccttcttcctctacagcaagctcaccgtggacaagagcaggtggcagcaggggaacgtcttctcatgctccgtgatgcatgaggctctgcacaaccactacacgcagaagagcctctccctgtctccgggtaaatgagtgcgacggccggcaagcccccgctccccgggctctcgcggtcgcacgaggatgcttggcacgtaccccgtgtacatacttcccgggcgcccagcatggaaataaagcacccagcgctgccctgggcccctgc

SEQ ID NO: 1845 - DNA, 1618 bp, Homo sapiens
cataacaaccacattcctcctctgaagaagcccctgggagcacagctcatcaccatggactggacctggaggttcctctttgtggtggcagcagctacaggtgtccagtcccaggtgcagctggtgcagtctggggctgaggtgaagaagcctggctcctcgctgacggtctcctgcaacgcatctggaggcaccttcagttaccatgctatcaattgggtgcgacaggcccctggacaaggatttgagtggatgggagggatcatccctagcattggcaaacgaaggtacgcggggaacttccaggacagagtcaaggttaccgcggacggatatagcgacacagcctacatggagttgcgcagcctgagatctgaggactcggccctatattactgtgcgagagacaccacagcttattttgacgatgctggttatcgcccttactactttgacctgtggggccagggaaccctggtcacagtttcctcagcctccaccaagggcccatcggtcttccccctggcaccctcctccaagagcacctctgggggcacagcggccctgggctgcctggtcaaggactacttccccgaaccggtgacggtgtcgtggaactcaggcgccctgaccagcggcgtgcacaccttcccggctgtcctacagtcctcaggactctactccctcagcagcgtggtgaccgtgccctccagcagcttgggcacccagacctacatctgcaacgtgaatcacaagcccagcaacaccaaggtggacaagaaagttgagcccaaatcttgtgacaaaactcacacatgcccaccgtgcccagcacctgaactcctggggggaccgtcagtcttcctcttccccccaaaacccaaggacaccctcatgatctcccggacccctgaggtcacatgcgtggtggtggacgtgagccacgaagaccctgaggtcaagttcaactggtacgtggacggcgtggaggtgcataatgccaagacaaagccgcgggaggaacagtacaacagcacgtaccgtgtggtcagcgtcctcaccgtcctgcaccaggactggctgaatggcaaggagtacaagtgcaaggtctccaacaaagccctcccagcccccatcgagaaaaccatctccaaagccaaagggcagccccgagaaccacaggtgtacaccctgcccccatcccgggatgagctgaccaagaaccaggtcagcctgacctgcctggtcaaaggcttctatcccagcgacatcgccgtggagtgggagagcaatgggcagccggagaacaactacaagaccacgcctcccgtgctggactccgacggctccttcttcctctacagcaagctcaccgtggacaagagcaggtggcagcaggggaacgtcttctcatgctccgtgatgcatgaggctctgcacaaccactacacgcagaagagcctctccctgtctccgggtaaatgagtgcgacggccggcaagcccccgctccccaggctctcggggtcgcgcgaggatgcttggcacgtaccccgtgtacatacttcccgggcgcccagcatggaaataaagcacccagcgctgccctgggcccctgc

SEQ ID NO: 1846 - DNA, 1628 bp, Homo sapiens
gcatcacagaacaaccacattcctcctctaaagaagcccctgggagcacagctcatcaccatgggctggacctggaggttcctctttgtggtggcagcggctgcaggtgtccagtcccaggtgcagctggagcagtcaggggctgaggtgaagaagcctggggcttcggtgaaggtctcctgcaaggtttctggagacaccttcaacaactttgctataaactggctgcggcaggccccaggacaagggcttgagtggataggagggatcattcctatgttagaaacggctacgtacggacagaagttccaggccagagtcacgattaccgcggacgaatccacgagcactggctacatggagatgaccagcctgagatctaacgacacggccatatattactgtgcgagagatgctacctcctttttcgatgttttgactggctatcgtccctactactttaattattggggccagggagccctaatcaccgtctcctcagcctccaccaagggcccatcggtcttccccctggcaccctcctccaagagcacctctgggggcacagcggccctgggctgcctggtcaaggactacttccccgaaccggtgacggtgtcgtggaactcaggcgccctgaccagcggcgtgcacaccttcccggctgtcctacagtcctcaggactctactccctcagcagcgtggtgaccgtgccctccagcagcttgggcacccagacctacatctgcaacgtgaatcacaagcccagcaacaccaaggtggacaagaaagttgagcccaaatcttgtgacaaaactcacacatgcccaccgtgcccagcacctgaactcctggggggaccgtcagtcttcctcttccccccaaaacccaaggacaccctcatgatctcccggacccctgaggtcacatgcgtggtggtggacgtgagccacgaagaccctgaggtcaagttcaactggtacgtggacggcgtggaggtgcataatgccaagacaaagccgcgggaggagcagtacaacagcacgtaccgtgtggtcagcgtcctcaccgtcctgcaccaggactggctgaatggcaaggagtacaagtgcaaggtctccaacaaagccctcccagcccccatcgagaaaaccatctccaaagccaaagggcagccccgagaaccacaggtgtacaccctgcccccatcccgggatgagctgaccaagaaccaggtcagcctgacctgcctggtcaaaggcttctatcccagcgacatcgccgtggagtgggagagcaatgggcagccggagaacaactacaagaccacgcctcccgtgctggactccgacggctccttcttcctctacagcaagctcaccgtggacaagagcaggtggcagcaggggaacgtcttctcatgctccgtgatgcatgaggctctgcacaaccactacacgcagaagagcctctccctgtctccgggtaagtgagtgcgacggccggcaagcccccgctccccgggctctcgcggtcgcacgaggatgcttggcacgtaccccgtgtacatacttcccgggcgcccagcatggaaataaagcacccagcgctgccctgggcccctgcg

SEQ ID NO: 1847 - DNA, 1559 bp, Homo sapiens
aaatactttctgagagtcctggacctcctgtgcaagaacatgaaacttctgtggttcttccttctcctggtggcacctcccagatgggtcctgtcggaagtgcagctgcgggagtcgggccctggactgatgaagccttcggggaccctgtccctcatttgcagtgtctccggtgactccatgaatggttactattgggcctggatccggcagtccccggataagggactggaatggattgcctatatcgactacactgggcacagcacttacagtccctccctcaagagtcgagtcaccatttcagtggacgtgtcgcagtcccagttctccctgcgggtgacgtctgtcacctctgcggacacggccaaatattactgtgcgacctcggtcatgggaggagggcgccactttgactactggggccagggagtcctggtcaccgtctcctccgcatccccgaccagccccaaggtcttcccgctgagcctctgcagcacccagccagatgggaacgtggtcatcgcctgcctggtccagggcttcttcccccaggagccactcagtgtgacctggagcgaaagcggacagggcgtgaccgccagaaacttcccacccagccaggatgcctccggggacctgtacaccacgagcagccagctgaccctgccggccacacagtgcctagccggcaagtccgtgacatgccacgtgaagcactacacgaatcccagccaggatgtgactgtgccctgcccagttccctcaactccacctaccccatctccctcaactccacctaccccatctccctcatgctgccacccccgactgtcactgcaccgaccggccctcgaggacctgctcttaggttcagaagcgaacctcacgtgcacactgaccggcctgagagatgcctcaggtgtcaccttcacctggacgccctcaagtgggaagagcgctgttcaaggaccacctgagcgtgacctctgtggctgctacagcgtgtccagtgtcctgccgggctgtgccgagccatggaaccatgggaagaccttcacttgcactgctgcctaccccgagtccaagaccccgctaaccgccaccctctcaaaatccggaaacacattccggcccgaggtccacctgctgccgccgccgtcggaggagctggccctgaacgagctggtgacgctgacgtgcctggcacgtggcttcagccccaaggacgtgctagttcgctggctgcaggggtcacaggagctgccccgcgagaagtacctgacttgggcatcccggcaggagcccagccagggcaccaccaccttcgctgtgaccagcatactgcgcgtggcagccgaggactggaagaagggggacaccttctcctgcatggtgggccacgaggccctgccgctggccttcacacagaagaccatcgaccgcttggcgggtaaacccacccatgtcaatgtgtctgttgtcatggcggaggtggacggcacctgctactgagccgcccgcctgtccccacccctgaataaactccatgctccccc

SEQ ID NO: 1848 - DNA, 1613 bp, Homo sapiens
gcagcacataacaaccacattcctcctctaaagaagcccctgggagcacagctcctcaccatggactggacctggaggttcctctttgtggtggcagcaactacaggtgtccagtcccaggtgcaactagtgcagtctggggctgaagtgaggaagcctgggtcctcggtgaaggtctcctgcaacggatctggattccacttcggggcaaccggaattaactgggtgcgacaggcccccggacagggacttgagtgggtgggaggaatcatccgtctctttggcacaccattctacacacagcaattcaagggcagagtcacgattaccgcggacgattccacggccacgacctatttaggactgaacagcctgagatctgaggacacggccgtctactactgtgcggcaggccttggaagtagatacccctatgagtactttcttcaacactggggacagggaaccctggtcaccgtctcttccgcctccaccaagggcccatcggtcttccccctggcaccctcctccaagagcacctctgggggcacagcggccctgggctgcctggtcaaggactacttccccgaaccggtgacggtgtcgtggaactcaggcgccctgaccagcggcgtgcacaccttcccggctgtcctacagtcctcaggactctactccctcagcagcgtggtgaccgtgccctccagcagcttgggcacccagacctacatctgcaacgtgaatcacaagcccagcaacaccaaggtggacaagaaagttgagcccaaatcttgtgacaaaactcacacatgcccaccgtgcccagcacctgaactcctggggggaccgtcagtcttcctcttccccccaaaacccaaggacaccctcatgatctcccggacccctgaggtcacatgcgtggtggtggacgtgagccacgaagaccctgaggtcaagttcaactggtacgtggacggcgtggaggtgcataatgccaagacaaagccgcgggaggagcagtacaacagcacgtactgtgtggtcagcgtcctcaccgtcctgcaccaggactggctgaatggcaaggagtacaagtgcaaggtctccaacaaagccctcccagcccccatcgagaaaaccatctccaaagccaaagggcagccccgagaaccacaggtgtacaccctgcccccatcccgggatgagctgaccaagaaccaggtcagcctgacctgcctggtcaaaggcttctatcccagcgacatcgccgtggagtgggagagcaatgggcagccggagaacaactacaagaccacgcctcccgtgctggactccgacggctccttcttcctctacagcaagctcaccgtggacaagagcaggtggcagcaggggaacgtcttctcatgctccgtgatgcatgaggctctgcacgaccactacacgcagaagagcctctccctgtctccgggtaaatgagtgcgacggccggcaagcccccgctccccaggctctcggggtcgcgcgaggatgcttggcacgtaccccgtgtacatacttcccgggcgcccagcatggaaataaagcacccagcgctgccctgggcccctgcg

SEQ ID NO: 1849 - DNA, 1602 bp, Homo sapiens
acataacaaccacattcctcctctaaagaagcccctgggagcacagctcatcaccatggactggacctggaggttcctctttgtagtggcagcatctacaggtgtccagtcccaggtgcagctggtgcagtctgggactgaggtgaagaagcctgggtcctcggtgaaggtctcctgcaaggcttctggaggcagtttcagtagttatgttttcacatgggtgcgacaggcccctggagaaggccttgaatggatgggaagtatcatccccatccttgggagaccaaactacgcacagaaattccaggacagagtcaccatttccgcggacgagtcgtcgagtattgtctacatggacctggaccgcctgaccattgaggacacggccatatatttctgtgcaatcttgttagagcatgaagtacgcgccttgtttgaccactggggccagggaaccctggtcaccgtctcctcagcctccaccaagggcccatcggtcttccccctggcaccctcctccaagagcacctctgggggcacagcggccctgggctgcctggtcaaggactacttccccgaaccggtgacggtgtcgtggaactcaggcgccctgaccagcggcgtgcacaccttcccggctgtcctacagtcctcaggactctactccctcagcagcgtggtgaccgtgccctccagcagcttgggcacccagacctacatctgcaacgtgaatcacaagcccagcaacaccaaggtggacaagaaagttgagcccaaatcttgtgacaaaactcacacatgcccaccgtgcccagcacctgaactcctggggggaccgtcagtcttcctcttccccccaaaacccaaggacaccctcatgatctcccggacccctgaggtcacatgcgtggtggtggacgtgagccacgaagaccctgaggtcaagttcaactggtacgtggacggcgtggaggtgcataatgccaagacaaagccgcgggaggagcagtacaacagcacgtaccgtgtggtcagcgtcctcaccgtcctgcaccaggactggctgaatggcaaggagtacaagtgcaaggtctccaacaaagccctcccagcccccatcgagaaaaccatctccaaagccaaagggcagccccgagaaccacaggtgtacgccctgcccccatcccgggatgagctgaccaagaaccaggtcagcctgacctgcctggtcaaaggcttctatcccagcgacatcgccgtggagtgggagagcaatgggcagccggagaacaactacaagaccacgcctcccgtgctggactccgacggctccttcttcctctacagcaagctcaccgtggacaagagcaggtggcagcaggggaacgtcttctcatgctccgtgatgcatgaggctctgcacaaccactacacgcagaagagcctctccctgtctccgggtaaatgagtgcgacggccggcaagcccccgctccccgggctctcgcggtcgcacgaggatgcttggcacgtaccccgtgtacatacttcccgggcgcccagcatggaaataaagcacccagcgctgccctgggcccctgcg

SEQ ID NO: 1850 - DNA, 1566 bp, Homo sapiens
ctgagagccctggacctctgtgcaacaccatgggacacccgtggttcttcctccttctggtgacagctcccagatgggtcctgtcccaggtccgattacaggagtcgggcccagggctcgtgaagccctcacaaaccctgtccctcacctgcagtgtctccggtgaccccctctatgatagtcatcactactgggcctggatccgccagcagccagggaagggcctggagtggattggacacatcaattcctatgcctacaagttctacaatcagtccctcgagagtcgactttccatgtcaatggacacatctcggaatcagttctccctgaagatgacctctgtgactgacgtagacacggccgtgtatttctgtgcgttgtttaagtctacgtggttcgacccctggggcccgggaacactggtcatcgtctcctcagcctccaccaagggcccatcggtcttccccctggcaccctcctccaagagcacctctgggggcacagcggccctgggctgcctggtcaaggactacttccccgaaccggtgacggtgtcgtggaactcaggcgccctgaccagcggcgtgcacaccttcccggctgtcctacagtcctcaggactctactccctcagcagcgtggtgaccgtgccctccagcagcttgggcacccagacctacatctgcaacgtgaatcacaagcccagcaacaccaaggtggacaagaaagttgagcccaaatcttgtgacaaaactcacacatgcccaccgtgcccagcacctgaactcctggggggaccgtcagtcttcctcttccccccaaaacccaaggacaccctcatgatctcccggacccctgaggtcacatgcgtggtggtggacgtgagccacgaagaccctgaggtcaagttcaactggtacgtggacggcgtggaggtgcataatgccaagacaaagccgcgggaggagcagtacaacagcacgtaccgtgtggtcagcgtcctcaccgtcctgcaccaggactggctgaatggcaaggagtacaagtgcaaggtctccaacaaagccctcccagcccccatcgagaaaaccatctccaaagccaaagggcagccccgagaaccacaggtgtacaccctgcccccatcccgggatgagctgaccaagaaccaggtcagcctgacctgcctggtcaaaggcttctatcccagcgacatcgccgtggagtgggagagcaatgggcagccggagaacaactacaagaccacgcctcccgtgctggactccgacggctccttcttcctctacagcaagctcaccgtggacaagagcaggtggcagcaggggaacgtcttctcatgctccgtgatgcatgaggctctgcacaaccactacacgcagaagagcctctccctgtctccgggtaaatgagtgcgacggccggcaagcccccgctccccgggctctcgcggtcgcacgaggatgcttggcacgtaccccgtgtacatacttcccgggcgcccagcatggaaataaagcacccagcgctgccctgggcccctgc

SEQ ID NO: 1851 - DNA, 1620 bp, Homo sapiens
cctctgggagaggagcccaccgctagaagtcggcggagttttcattcggtgatcagcactgagcacagaggcctcaccatggagtttggactgaactgggttctcctcgttgcacttttaagaggtgtccagtgtctggaactcctggtcgagtctgggggaggcgtagtccagcctgggaggtccctcagactctcctgtacagcctctgggttcaccttcggccactttggcatgcactgggtccgccaggctcccggcaagaggctggagtggctggctctcataacctacgacggacttaataaattttactcagactccatgaaggggcggtgcaccatttccagagacaactccaagcagacagtgtatttggaaatagacaccctggaaactgaagacacggcggtatattcctgtgtgaaacactttggaccggggaattttctgggattcttcgcttcttggggcctgggaaccctcgtcaccgtctcctcagcctccaccaagggcccatcggtcttccccctggcaccctcctccaagagcacctctgggggcacagcggccctgggctgcctggtcaaggactacttccccgaaccggtgacggtgtcgtggaactcaggcgccctgaccagcggcgtgcacaccttcccggctgtcctacagtcctcaggactctactccctcagcagcgtggtgaccgtgccctccagcagcttgggcacccagacctacatctgcaacgtgaatcacaagcccagcaacaccaaggtggacaagaaagttgagcccaaatcttgtgacaaaactcacacatgcccaccgtgcccagcacctgaactcctggggggaccgtcagtcttcctcttccccccaaaacccaaggacaccctcatgatctcccggacccctgaggtcacatgcgtggtggtggacgtgagccacgaagaccctgaggtcaagttcaactggtacgtggacggcgtggaggtgcataatgccaagacaaagccgcgggaggagcagtacaacagcacgtaccgtgtggtcagcgtcctcaccgtcctgcaccaggactggctgaatggcaaggagtacaagtgcaaggtctccaacaaagccctcccagcccccatcgagaaaaccatctccaaagccaaagggcagccccgagaaccacaggtgtacaccctgcccccatcccgggatgagctgaccaagaaccaggtcagcctgacctgcctggtcaaaggcttctatcccagcgacatcgccgtggagtgggagagcaatgggcagccggagaacaactacaagaccacgcctcccgtgctggactccgacggctccttcttcctctacagcaagctcaccgtggacaagagcaggtggcagcaggggaacgtcttctcatgctccgtgatgcatgaggctctgcacaaccactacacgcagaagagcctctccctgtctccgggtaaatgagtgcgacggccggcaagcccccgctccccgggctctcgcggtcgcacgaggatgcttggcacgtaccccgtgtacatacttcccgggcgcccagcatggaaataaagcacccagcgctgccctggg

SEQ ID NO: 1852 - DNA, 1633 bp, Homo sapiens
agctctgggagaggagccccagccctgagattcccaggtgtttccattcagtgatcagcactgaacacagaggactcaccatggagttgggactgagctggattttccttttgggcattttaaaagatgtccagtgtgtggagcaactggtggagtctgggggaggcttggttcggcctggcgggtccctgagactctcctgcgctgccagtggattcatcttcgaacactttggcttgcactgggtccggcaagctccagggaagggcctggaatgggtctcctttataaattggaataatgagaccataacttacgcggactctgtgaagggccgattcaccatctccagggacaacgccaagaacctcctatatctgcagatgaacactctgacagtcgaggacacggccttatatttttgtgcaaagtttgcatctaatagtgggggctacgtagttccttctgagttttggggcccgggaacccacgtcaccgtcacctcagcctccaccaagggcccatcggtcttccccctggcaccctcctccaagagcacctctgggggcacagcggccctgggctgcctggtcaaggactacttccccgaaccggtgacggtgtcgtggaactcaggcgccctgaccagcggcgtgcacaccttcccggctgtcctacagtcctcaggactctactccctcagcagcgtggtgaccgtgccctccagcagcttgggcacccagacctacatctgcaacgtgaatcacaagcccagcaacaccaaggtggacaagaaagttgagcccaaatcttgtgacaaaactcacacatgcccaccgtgcccagcacctgaactcctggggggaccgtcagtcttcctcttccccccaaaacccaaggacaccctcatgatctcccggacccctgaggtcacatgcgtggtggtggacgtgagccacgaagaccctgaggtcaagttcaactggtacgtggacggcgtggaggtgcataatgccaagacaaagccgcgggaggagcagtacaacagcacgtaccgtgtggtcagcgtcctcaccgtcctgcaccaggactggctgaatggcaaggagtacaagtgcaaggtctccaacaaagccctcccagcccccatcgagaaaaccatctccaaagccaaagggcagccccgagaatcacaggtgtacaccctgcccccatcccgggatgagctgaccaagaaccaggtcagcctgacctgcctggtcaaaggcttctatcccagcgacatcgccgtggagtgggagagcaatgggcagccggagaacaactacaagaccacgcctcccgtgctggactccgacggctccttcttcctctacagcaagctcaccgtggacaagagcaggtggcagcaggggaacgtcttctcatgctccgtgatgcatgaggctctgcacaaccactacacgcagaagagcctctccctgtctccgggtaaatgagtgcgacggccggcaagcccccgctccccaggctctcggggtcgcgcgaggatgcttggcacgtaccccgtgtacatacttcccgggcgcccagcatggaaataaagcacccagcgctgccctgggcccctgcg

SEQ ID NO: 1853 - DNA, 1920 bp, Homo sapiens
attattccacaacaccccttgggtgccccaacgcgcctagcaccctgtaagtgctccccagctgtggatacaggtttctctcagggcagcccgcaagcagtgcagccccagccagaagagctggaaggctgggcggccaggcccgctgtgtccccagttttcctgttggagtccatctgctgtgctctcaggagagaaggctgggtctctgggagctcacatcctgtatgccctccctccatgccaagcaactttggggagtcctggcagtggtgccaggcgttgctcttacctgtaccataaccaggaggctgatggttgctcaggcctccctcaaactagccaatgagaagtgcacgggtcctggtcgcctaggaaaccgcgtgacaacaagatggcggcgctgcgggacggctagcggccctgcgtgggagttcctgacagctggattctagaagtagaactatgagctcacctttggcctcccttagcaagacccgaaaagtgcccctgccctcggagcctatgaatcctgggaggcgaggaatccgcatctatggagatgtccctgcatcccatgactcggagctgatggccttcatgacgaggaagttgtgggacctggagcagcaggtgaaggcccagactgatgagatactgtccaaggatcagatgatagcggccctagaggacctggtgcagaccctccggccacacccagccgaggcaaccctgcagcggcaggaggaactggagacgatgtgtgtgcagctgcagcggcaggtcagggagatggagcggttcctcagtgactatggcctgcagtgggtgggcgagcccatggaccaggaggactcagagagcaagacagtctcagagcatggcgagagggactggatgacagccaagaagttctggaagccaggggactcattggcgccccctgaggtggactttgacaggctgctggccagcctgcaggatcttagtgagctggtggtagagggtgacacccaagtgacaccagtgcccggcggggcacggctgcgtaccctcgagcccatcccgctgaagctctaccgggatggcatcatgatgttcgacgggcccttccagcccttctacgatccctccacacagcgctgcctccgagacatattggatggcttctttccctcagagctccagcgactgtaccccaatggggtcccctttaaggtgagtgacttgcgcaatcaggtctacctggaggatggactggaccccttcccaggcgagggccgtgtggtgggcaggcagcggatgcacaaggccttggacagggtggaggagcacccaggctccaggatgactgctgagaaatttctgaacaggctccccaagtttgtgatccggcaaggcgaggtgattgacatccggggccccatcagggacaccttgcagaactgctgcccattgcctgcccggatccaggagattgtggtggagacgcccaccttggccgctgagcgagagaggagccaggagtcacccaacacaccggcacccccgctctccatgctgcgcatcaagtctgagaatggggaacaggccttcctactgatgatgcagcctgacaacaccattggggacgtgcgagctctgctagcgcaggccagggtcatggatgcctctgcctttgagatcttcagcacattcccgcccaccctctaccaggacgatacactcacgctgcaggctgcaggccttgtgcccaaagcagcactgctgctgcgggcacgccgagccccgaagtccagcctgaaattcagtcctggtccctgtcccggtcccggtcccggccccagtcccggtcccggtcccggctccagtccctgtcccggacccagtcccagcccccaataaagcacccaccccctc

SEQ ID NO: 1854 - DNA, 2715 bp, Homo sapiens
ctttgggcttgctggtgtgacaaaaaatacatttgaggtaattccagtgaattctgcaggctctcctgttggggatgtgccattcatccgatcaggattgctggggtttgtagggccgggtagtttggtgttcgtggttgggaaaatggatggcttactgatggttagtggtcgaagacataatgctgatgacattgttgctactggattggctgtagaatcaataaagactgtttatagaggaagaattgctgtgttttctgtgtctgtattttatgatgagcgcattgtggtggttgcggaacaaagacctgatgcttctgaggaagatagtttccagtggatgagccgcgtgctgcaggcgatcgatagcattcatcaagtgggggtttattgtcttgctctggtgccagccaatacattgccaaaaactccactaggaggaatccatatatctcagacgaaacaactctttctggagggatcactgcatccttgcaacatcctcatgtgcccccatacatgtgtgacaaacttgccaaagccccggcaaaaacaaccaggtgtaggccctgcttccgtgatggttgggaatctggttgctggaaaacgtatagcacaagctgctggaagggatctgggacaaatagaagagaacgatttggtgaggaagcaccagtttctggcagagatcctacagtggcgagcccaggcgactcctgaccatgtactcttcatgctgttaaatgccaagggaaccactgtatgcacagccagctgccttcagcttcataagcgagcagagaggattgcatctgttcttggtgataagggacatctaaatgcaggagataatgtggtgttgctctatccacctggcattgagttaatcgccgccttctatggctgcctgtatgcgggctgtatacctgtgaccgtcagacctccacatgctcagaacctcacggccacgctgcccactgtccgaatgattgttgatgtcagcaaagcagcctgtattctcaccagtcagaccctaatgaggctactgaggtcccgagaggcagcagcagctgtggatgtgaaaacctggccaaccatcattgacacagatgatttacccaggaaaaggttacctcagctgtataaaccgcccactcctgagatgttggcatatcttgattttagtgtctccacaactggcatgcttacaggagtgaagatgtcccactctgcagtgaacgctctgtgtcgagccatcaagctccagtgtgagttgtactcttctcggcagatcgccatctgccttgacccttactgtggacttggcttcgcgctctggtgtctctgcagtgtctattcaggccaccagtctgtcttaattcctcctatggagttagagaacaaccttttcctctggctctccacagtcaaccagtacaaaataagggacactttctgctcctattcagtgatggagctctgcaccaaaggtcttgggaaccaagtggaagtgctaaagaccagagggatcaacctctcctgcgtccggacctgtgtggtggtggcggaggagaggccccgcgttgcactccagcagtccttctctaagctcttcaaagacatcgggctgtccccgcgggctgtcagcaccacttttggatcaagagtcaatgtagcaatatgtttacagggaacctcagggcctgatccgactactgtgtatgtggatctgaaatcactaagacatgacagggttcgtctcgtggaacgtggcgcccctcagagtttgcttctctcagagtctggaaagattttacctggagtgaaagtggttattgttaatcctgagaccaaagggccggttggagactctcaccttggagagatttgggtgaacagtccccatacagccagcggctactacaccatctatgatagcgagactcttcaagctgatcatttcaacactcgcctcagctttggagatgcagctcagacactccgggctcggacaggataccttggttttgtccgccggaccgagctcacagcggccactggagagcgtcatgatgcattgtatgtggtgggagcgctggatgaaacactggagctgagaggattacgataccacccaatcgatattgagacctcggtgtcccggatccacagaagcattgctgaatgtgccgtgttcacatggaccaacttgcttgtggtggttgtggaactgtgcggctctgaacaggaagccctagatctggtcccattagtgaccaacgtggtcctggaagagcattacctcatcgttggcgtcgtggttgtggtggacccaggtgtcatcccgatcaactccagaggagagaagcagaggatgcacctccgtgatagcttcctagctgaccagttagaccccatctacgtggcttataacatgtaaccagccttgtggggactgcagtgggccattctgaagaatcacaaagacagaagacctctggctaagagcaggcttcaaacgatgtgaaataagctgagatggctacatgatattcttcatctcatcctgtgggattctgcaatcataaaacacaggaaaggggaattctgtgatggcaaatgaaaaaaatgttaacatttggtagacatgtgctttgacatagcgtgagcagcacattactaaagcaattacatgcatgttgcatttttttc

SEQ ID NO: 1855 - DNA, 2237 bp, Homo sapiens
aattttgcacttggagcgcttaagaagttcgggttgggtacgcggaccgtcgaggcgcgcgtcctggaggaggcggcttgtctgctagacgaatttcaagccaccattgcttcggcctggccgggagagcggaagggcctggtgtgggagagtcccttgcactgccaagacggggccactggaaggagccccgtttgaccccgtgcggctactgggtaatgctgtatccagtgttatctgttcttgtcttcgggaaccgctatcgctatggggacccggagttcctgaggctcctgaacctcttcagtgacaacttctgcatcattagttccagatggggcgaggtgagagggccggccacaatctttccttggtgcgtccagccttatgccaaatcccgagtacacagacctacctacaatggatcattagaatgggacagattcctggaagagttctagaacatccagtatcaaagtcctagtccaatctccctgtagggaaactaaggcctagtggccttgtgcagggcccatgttgagacagaccctgtctctccagatgtacatttgcctgtccctcatggactggctcccgggcccgcatcaccgaatcttccgaaacttttcggagctgcgggtcatctctgagcaaattcaacgacactggcagatgcggcagccagcggagccccgcgatttcattgattgcttgaccagatgggtaaggcatgggtcccagctctctaaactctatccatgccgcccaccaacaggtgcctggcacgcggcagcacatctcctctgcccacagtaacagcaggacccggagagccatttccaggagtagacgtcggtaatgacgacgcattttttttttggcgtcaccgaaaccacgagcaccaccctgtgctatgggctcctcattctgcttaagtacctagaggtggcaggtgtgcaacccggagagacccagaatgggaggctgcagtctggggatggctggagggtcctggaagtgcgcagctcacagcctcccccggcctgagccaaggtgcaggagctggaccctgtggtagggtggaggcccgccccaagcctggactatcgcgtgtgcctgccctacgccaacgcagtgctgctcgagatccagtgcttcatcagcgtggtgcccctggggctgccgcgcaccctcaccctcgacacccacctgcacagccactgtctgcccaaaggtacccactgagtctggggatcccgtgcgggacgcgggtgcatgagatcagccagaatcagcaggtgtgcgctgtgcagaccaaaacacaatcagttacccctggagcaggaaggcacctctgccttcccttaggctttttgttgttgttgtttgagacggagtctggctctgtcattcaggctagaatgcagtggcatgatcttggctcactgcaacctccacttcctgggttcaagcgattgtcctgcctcagcctcctgagtacctggtattacaggcacccaccaccacgcctggctaatttttgtatttttagtagagacaggtttcgccatgttggccaggctggtctcgaacttctgacctcaagtgatctgtcctcagcctcccagagtgctgggattacaggcgtgagctacttgcccggcctattcccttgggcttttaaaaagcgtcttggatggaggtggtgcaggtgctcaccaagcccgcaggtaacccaagttgcatgtatccccagggcacttttgtgattcccctgcttgcgactgcacaccgggaccccactcaattcaaagacccagactgcttcaaccctaccaacttcctggacaagggcaagttccagggcaatgatgctttcatgccctttgcctcaggtgcaggcagaggaggaaggggaccagcctggactggctctggggtacctggtgctcactgtgcacctgtgtacccggcaaagcagatgtgcctgggcacaggcctggcccactcgggtatcttcctattccttacggccaccttacagaggttctgcctgctccctgtggtacgccctggcaccatcaacctcacctgcagtgcactggcctgggcagtgtccccccagacttccagctccagccagtggcctgctgaggtcaggctccactatggtgggctcactggccctcaaacctccataccctcctcggtcaataaaggccctaaattgcagatgg

SEQ ID NO: 1856 - DNA, 2317 bp, Homo sapiens
aacggctctgcggccatggcgagcggcgagcattcccccggcagcggcgcggcccggcggccgctgcactccgcgcaggctgtggacgtggcctcggcctccaacttccgggcctttgagctgctgcacttgcacctggacctgcgctgcctggagcccgagggcgccgccgagctgcggctggactcgcacccgtgcctggaggtgacggcggcggcgctgcggcgggagcggcccggctcggaggagccgcctgcggagcccgtgagcttctacacgcagcccttctcgcactatggccaggccctgtgcgtgtccttcccgcagccctgccgcgccgccgagcgcctccaggtgctgctcacctaccgcgtcggggagggacccggggtttgctggttggctcccgagcagacagcaggaaagaagaagcccttcgtgtacacccagggccaggctgtcctaaaccgggccttcttcccttgcttcgacacgcctgctgttaaatacaagtattcagctcttattgaggtcccagatggcttcacagctgtgatgagtgctagcacctgggagaagagaggtccaaataagttcttcttccagatgtgtcagcccatcccctcctatctgatagctttggccatcggagatctggtttcggctgaagttggacccaggagccgggtgtgggctgagccctgcctgattgatgctgccaaggaggagtacaacggggtgatagaagaatttttggcaacaggagagaagctttttggaccttatgtttggggaaggtatgacttgctcttcatgccaccgtcctttccatttggaggaatggagaacccttgtctgacctttgtcaccccctgcctgctagctggggaccgctccttggcagatgtcatcatccatgagatctcccacagttggtttgggaacctggtcaccaacgccaactggggtgaattctggctcaatgaaggtttcaccatgtacgcccagaggaggatctccaccatcctctttggcgctgcgtacacctgcttggaggctgcaacggggcgggctctgctgcgtcagcacatggacatcactggagaggaaaacccactcaacaagctccgcgtgaagattgaaccaggcgttgacccggacgacacctataatgagaccccctacgagaaaggtttctgctttgtctcatacctggcccacttggtgggtgatcaggatcagtttgacagttttctcaaggcctatgtgcatgaattcaaattccgaagcatcttagccgatgactttctggacttctacttggaatatttccctgagcttaagaaaaagagagtggatatcattccaggttttgagtttgatcgatggctgaatacccccggctggcccccgtacctccctgatctctcccctggggactcactcatgaagcctgctgaagagctagcccaactgtgggcagccgaggagctggacatgaaggccattgaagccgtggccatctctccctggaagacctaccagctggtctacttcctggataagatcctccagaaatcccctctccctcctgggaatgtgaaaaaacttggagacacatacccaagtatctcaaatgcccggaatgcagagctccggctgcgatggggccaaatcatccttaagaacgaccaccaggaagatttctggaaagtgaaggagttcctgcataaccaggggaagcagaagtatacacttccgctgtaccacgcaatgatgggtggcagtgaggtggcccagaccctcgccaaggagacttttgcatccaccgcctcccagctccacagcaatgttgtcaactatgtccagcagatcgtggcacccaagggcagttagaggctcgtgtgcatggcccctgcctcttcaggctctccaggctttcagaataattgtttgttcccaaattcctgttccctgatcaacttcctggagtttatatcccctcaggataatctattctctagcttaggtatctgtgactcttgggcctctgctctggtgggaacttacttctctatagcccactgagccccgagacagagaacctgcccacagctctccccgctacaggctgcaggcactgcagggcagcgggtattctcctccccacctaagtctctgggaagaagtggagaggactgatgctcttcttttttctctttcctttttcttgctgattttatgcaaagggctggcattctgattgttcttttttcaggtttaatccttattttaataaagttttcaagcaaaaatt

SEQ ID NO: 1857 - DNA, 2608 bp, Homo sapiens
agttctctcaggctttccagagctcaggacctctgagaagaatggagccctcctggcttcaggaactcatggctcaccccttcttgctgctgatcctcctctgcatgtctctgctgctgtttcaggtaatcaggttgtaccggaggaggagatggacgatcagagccatgcacctgtttcctgcaccccctgcgcactggttctatggccacaaggagtcttacccagtaaaagagtttgaggtgtatcctgagctgatggaaaaatacccatgtgccgttcccttgtgggttggaccctttacgatgttcttcaatatccatgacccagactatgtcaagattctcctgaaaagacaagatcccaaaagtgctgttagccacaaaatccttgaatcctgggttggtcgaggacttgtgaccctggatggttctaaatggaaaaagcaccgccagattgtgaaacctggcttcaacatcagcattctgaaaatattcatcaccatgatgtctaagagtgttcggatgatgctgaacaaatgggaggaacacattgcccaaaactcacgtctggagctctttcaacatgtctccctgatgaccctggacagcatcatgaagtgtgccttcagccaccagggcagcatccagttggacagtaccctggactcatacctgaaagcagtgttcaaccttagcaaaatctccaaccagcgcatgaacaattttctacatcacaacgacctggttttcaaattcagctctcaaggccaaatcttttctaaatttaaccaagaacttcatcagttcacagagaaagtaatccaggaccggaaggagtctcttaaggataagctaaaacaagatactactcagaaaagacgccaggattttctggacatacttttgagtgccaaaagtgaaaacaccaaagacttctctgaagcagatctccaagctgaagtgaaaacgttcatgtttgcaggacatgacaccacaactactgctatctcctggatcttttactgcttggcaaagtaccctgagcatcagcagagatgctgagatgaaatcagggaactcctaggggatgggtcttctattacctgggaacacctgagccagatgccttacgccacaatgtgcatcaaggaatgcctccgcctctacgcaccggtagtaaacatatcccggttactcgacaaacccattacctttccagatggacgctccttacctgcaggtcttaaaacaactttttttttttttaacaatgcagctatgtttggattgaaatgtcttaacacactcatgtctttaacagttatttatccttagactctgtggaacctagggccattcttatttcccagagagggagaaagaggagagagctctcaggactatctaaacaggcacaggattatgcaggtgcaaaggtacagaatcctgccatatggactgaggagtgggtgaggaggccttcatgaagcatcatggctttaatgctgaaccttaaaggactagatttatatcagcaaagatgagagaggcgcattgttggcagagagaagagcagacacaaagcagcaggcagcctgccttctcccttccctcaggcacaccagcagggcatgtcactggagcaattgctgtaatccaccagactccaggattcacagagggaagttgtgggactatacctggagccatgatgtagccagatcatagttttctgaaggccaacctttgtgttcagcctttctcaatcaagcagcagatttaagacatctaagctgggtagcacgattatagttattttttagaaagattaatacattggtgggatgcaagatggattgaaagatgacattagagatataaaggaatgagccagaatttatctttgacctatgttgaggtgtgtttctacaccttcctccaatttaaccatctttcaaatactggatttgattgggcatttgtagtagtctaattaaatatttgtttcctacaaaatcaactttactattgtaacaacaaaaggaaaaaattatttagcacttactaggagctgagaattgttccatatgttttgcatgtgttaactcattttatccacccatcctcctgccccccagttctgctgtggaaatactagtgttatgcacattttagcaaacagggacaaaaaggtaaaacttcatctctggtaaatggtagaactaggacttgaacccaagaaatgggactctagagtgtgctcttaactactacactacagcaacaacttaagctttctctgggatctctccagagaaagatctttgctatcatggggatctttgcaatcatctagtatctaaagaagtttcctctttttaattcagtgttatttttcacatagtatttattgtaatatttattacctacataatattgcatctatgcacataatgttccacgcacctagttgttcaaacaagacagctcagagtcaacttttactaccttttcccttaaccttgcatttcaataatacttaaatcctgtcaataatctctggtttttttcaatatcaataaaatgatgatttattgctgccttcc

SEQ ID NO: 1858 - DNA, 4412 bp, Homo sapiens
gtttattgtttttacctgtagccaaccacctccatgaaagtgatgctcaaattgaaaactgcaataatatcttggccaaagagagaagattacagtttcatcagaaagggagaagtatgaattccactggatctgggaaaagtagtgggacagtttcaagtgtttcagaattgttggaactttatgaggaagatcctgaagaaattctttataatcttggatttggacgtgatgaaccagatattgcttctaaaattccttccagattttttaattcatcatcctttgccaaagggatagatattaaagtatttttgagtgctcagatgcaacggatggaagtagaaaacccaaattatgctttaacaagccgttttcgtcaaattgaagtgcttactactgtggccaatgcgttttcttctttatattctcaagtctccgggacgcccctgcagagaattggaagtatgtcctcagtgacctctaacaaggagacagacccacctccacctttaactcgaagtaacactgcaaatcgtttaatgaaaacactctcaaaactgaatttatgtgttgataaaacagagaaaggagaaagtagtagtccttctccatcagctgaaaaaggaaagattctaaatgtttcagtgattgaagaaagtggcaataaaaacgatcaaaagtctcaaaaaattatgaagaagaaagagtcaccttctatgttggctacagttaaagaagaagtctctggtagttcagcagctgttacggagaatgctgatagtgatagaatttctgatgaagcaaatagtaattttaaccaaggaactgaaaatgaacaaagtaaagaaactcaaagtcatgagagtgaactgggtgaggaatctggtattgtagaatccaaattagatagtgatttcaacatatccagccacagtgagctggaaaatagcagtgagctgaaaagtgtccatatatccacacctgaaaaagagccttgtgcaccactgacaataccatccataagaaatataatgacacagcagaaggactccttcgaaatggaagaggttcaaagtacggagggagaagctcctcatgttccagccacttaccagctaggtcttacgaagtcgaaaagagatcatctgttacgtactgcaagtcagcattccgatagcagtggttttgctgaagattctacagactgcctatcccttaatcatcttcaggttcaggagtccttgcaggctatggggagtagtgctgatagttgtgacagtgagacaacagttacgtcacttggtgaagaccttgccacaccaacagcacaagaccagccttattttaatgaatcagaggaggagtctcttgtccctcttcagaagggactagagaaggcagcagcagttgcagacaaaagaaaatcaggtagccaggatttccctcagtgcaacaccattgagaatacaggaactaaacagtccacctgtagtccaggggatcatatcattgaaattactgaagtggaagaggatttgtttccagcagagacagtagagctactgagggaagcaagtgctgaaagtgatgtgggtaaaagcagtgaaagtgaatttactcagtataccacacaccatattctgaaatcattggcttctattgaagctaaatgcagtgatatgagctctgaaaatacaactgggcctccctcttccatggacagagttaatacagctttgcaaagagctcaaatgaaggtttgcagtctgtctaatcaaaggatggggcgtagcctgctaaaatcaaaagatttgttaaaacaaaggtacttatttgcaaaagctggctatcctctaagaaggtctcagtctttaccaaccaccttattgagcccagtaagggttgtgtcctctgtcaatgttcgattatctccaggaaaagagaccagatgcagcccaccttccttcacctataagtacacacctgaagaggagcaggaattggaaaagcgggtgatggaacatgatggtcagtctttagttaaatcgaccattttcatctctccatcatctgtgaagaaagaagaagccccccagagtgaggcgccgcgggtggaggaatgccatcatggaaggactcctacctgttcacggcttgctctaccaccaatgtctcagtctacctgttcccttcattccatccactctgagtggcaagaaaggcccctgtgtgagcacacaagaactctgagcactcacagtgttcccaacatatcaggggctacttgtagtgccttcgcttcccctttcgggtgtccttactcacatagacatgccacctacccttaccgagtgtgctctgtgaatcctccttcagccatagaaatgcagttgcgaagagtattacatgatattagaaactcactgcagaatctttcacagtaccctatgatgagaggacctgatcctgctgctgctccatatagtactcagaaatcatctgttctacctctttatgaaaatacttttcaggagctccaggtaatgaggcggagcctgaatttgtttagaacacaaatgatggatttagaattggcaatgctgcgtcagcaaaccatggtttatcatcatatgactgaggaggagaggtttgaagttgatcagctccagggtttgagaaattcagtccgaatggaacttcaggacctggaactgcagctggaggagcgcctgctgggcctggaggagcagcttcgtgctgtgcgcatgccttcacccttccgctcctccgcactcatgggaatgtgtggcagtagaagcgctgataacttgtcatgcccttctccattgaatgtaatggaaccagtcactgaactgatgcaggagcagtcatacctgaagtctgaattgggcctgggacttggagaaatgggatttgaaattcctcctggagaaagctcagaatctgttttttcccaagcaacatcagaatcatcttctgtatgttctggtccctctcatgctaacagaagaactggagtaccttctactgcctcagtgggcaaatccaaaaccccattagtggcaaggaagaaagtgttccgagcatcggtggctctaacgccaacagctccttctagaacaggctctgtgcagacacctccagatttggaaagttctgaggaagttgatgcagctgaaggagccccagaagttgtaggacctaaatctgaagtggaagaagggcatggaaaactcccatcaatgccagctgctgaggaaatgcataaaaatgtggagcaagatgagttgcagcaagtcatacgggagattaaagagtctattgttggggaaatcagacgggaaattgtaagtggacttttggcagcagtatcttcaagtaaagcgtctaattctaagcaagattatcattaaacagaaattataggttggcatggatcctattagctgtgtaatactggaattatcaatgatatgcactggtggaggtgttatttgtgctttagaagatacttgctgttgagctgggctactgtatacagtgtacaatgtgtatttcttcaaccatatattttaaaaagacgtacatagaaacttaggcactttgctatttcttttctaaactatcaaaaactctagcagtttgaaaagcctaatatttatttgtatgtcaatatttttcatttgattccctattagaattaattttaaaacttgaagacttccagacttatccaacttataaataacatatttcttcagactaacatcttaaaacactgacctctatgaggtatttactgtgcaataactgattcatttttttcagagcttgaagcatccaatgatttttccctccactgctgttaattaatgtcacttccaagaagaaaaactgttctgttgtaaaaaatataattgctcttaattcttggggaggttactaatagcagtaggatagaattttatgaggttacctacaactacttaatgtacttacactgtaagccttgttgctttacccaagacaaatgtaattttatcattgcttatgtagtatttttcttttggaaatgtgccttatgttaaacactatgtacttttactttttgcattgtccagacttctttattagatggagatgtttctttttctgtcttctagactaaatagagtatcatccaaataatggggcctatgacttgaatgaatagaaatgaataagctggtgtttgttttttcaaaatggaagtaatttagatttgttctcctcatacataaaatgattttagttcagttttaaccagtgaaaactttgtttttatgaaaaaaaaggaaaatggtttcccatttggttttatatgtgttaaataaatgtgtaaagtaacc

SEQ ID NO: 1859 - DNA, 1589 bp, Homo sapiens
actcgatcccggccccacttccaggccagtgtccggccgaccagcctgccttgggccagggccccacgactccctgctgcgggacaagaggccgtctgtgcggctgtggtcgtgggagggtgtggtgaggccgtgaaggtggggacggtgcctgggcctgtggccgccagagctgctgcggctcagaaggtagcaccaggccccgtgggtgctgtgggggccatcgcctgcccaccatggggaccctcagctgcgactccaccccacggctggccacagccccccttggccggcgagtgacggagggccagattccggagaccggcctgaggaagtcctgtgggacggccaccctggagaacggctcggggccaggcttgtatgtcctgccgtccaccgtgggcttcatcaaccacgactgcaccagggtggccagtcccgcctactcgctcgtccggaggcccagtgaggcaccacctcaggacaccagcccgggccccatctacttcttggaccccaaagtcacacgctttggccgcagctgcacccctgcctactccatgcagggccgggccaagtctcggggtccggaggtgacgccaggccctggggcctacagcccagagaaggtgccccctgtgcgccatcggacaccgccggctttcaccctgggctgccgcctccccctgaagcccctggacacctcagcccctgcccctaatgcctacaccatgccccctctgtggggctcacagatcttcaccaagcccagcagccccagctacacggtggtgggccgcaccccccccgcccgccccccgcaggatcctgctgagataccaggcccgggccagtacgacagcccggacgcaaacacctaccgccagcgcctgcctgccttcaccatgctggggcggccccgggccccgcgacccctggaggagacccccggccctggcgcccactgcccagagcaggtcaccgtgaacaaagccagggctccagcgttctctatgggcatccgccactcgaaacgggccagcaccatggccgccaccacgccctcccggcctgcggggcacaggctgcccggccgctgctgctaggccaggcctgtttcccacacagtgaacgggggctggcgggcctctcctggggcctggctttggctggaggggctagaaggcgagaggggctgggaaaggagtcttccctcccctttcctgaactgtccaggtccttctaggacacctgatccttccagtccctgggggctgtgacccatggccctgtgcagggtacagggtgagtctccttccagtgccccagtttcttccaggtcacgccaggccaggccaggccaggtggggaaagggacaccttccggccctccccagtagctggctggagatggagcttctggtgtcccagaactcggcgtccagctccactagggcctagatccccatcacagcttgggttagccccggtcccagcccaagctcaggctggaggcagccccgaggcctgtgcctttcccactccaccttctacagttgcttagccaataaacctttcctgggctggag

SEQ ID NO: 1860 - DNA, 3144 bp, Homo sapiens
agacttcagcagaacagtcccgatggtgccagagctctggcgcgtcccttgtgagtcatagctctggcgtgtagggctgtggaggggaggctgttaccgtgctcccggcatgagcttagtgtgtcctggccgtttgaggctctggccgatttttttttcccaagtccccatggagaatcagggactgtcctgtgccatcttccgagagcctggaagggtccgcccgtgggctttccgagcgccgaaggggccacatgctgctctgagggtgccgcagagatgctgtctcaccatgttggccccggatagtcttggactcctgggttccaggtatcctccgtggcctccaaaagtgctgggattacaggtcctgcctacagaagatcttgtgacatatccctgcacccatcacacaggatattgtgacattgctgagcccagcatctaggtgatgtgactcttctctactgtttggtctctacccaaaaagggattgtgacatatcactctgtcaagaacctagaagaggtgactctcctctccagcctgggacctccatacagaggggattgtagcatattcctaatggagcaccaaggtgatgtgacactgctgcctggtccctgccctcagagaagattgtgacatatcactgccccgaaacccaggtgtgattgttacatacacctctgcccagcacctgagtgatttgactcttctgcttgggcccagcgtacagatgggattgtgccgcattgctggacccagcacttaggtgatgtgatataattctcctcttctgcctggccctgccaaaaagtgggagattatggcaaatcactgaacccagcacctagggaccttgtgacatatatctgcacccatgacctagaagatgtgacatttattttttgcctgcaccctgccctgcacaggaatgattgtgacatatccttggaaccagacaccagaattgtaacatatccctggctgagcactcaggtgatgtgacactcctgcttggcttcttccctcagcagattatgagatatccatggctgaaatccagggggaattgtgacatatcacttggcccagtaccaagcaagtgtgactcttctattcatcataagtcctgctttcaagggagattgggacatattgtggggctcaaaaccaatgtgacattactgttttgccttggcccagaccttaaaggcactgtgacgtattgctcggctcagcaacaaggtgacgagagatcctgtgtggacattgacaacagagagcattgtgacatatctttgggagcatcagctatttgatgtgactctccttttataccaaggctttgctcacaggggagaccgtgatgtatcttctggcccagaaatcaggcgatgtgtttctcctgcctgagctttgctcacagggagcattgtgacatatcactgagcccagcacccaggtgatgggactctactgcctgtcccctgctttcaggaggaaattgtaacatatctctgaccaagcacccaggtgataagtcttctgcctggtgcctgttctcagggaagattgtgacatatccctggcccagcaaccagatgatgcagatgacgtatttctcctgctcactctctatccacaggttctgcccacaaaggagattgtggcatactgctgggcctaacactaaggtgatgttacttctctgctttggctatgtccttagaaggcattgagacacactgctgggcccagcaccaagatgatgtgagtcctctgcctgaaccctgaccacagggagcattgtgacatatttcttgacccactgcaatctctcctatggacaaagcccaggttggattgtgacatatactttagcccagctcacagttgtgataatgacatactgacaaatcagtcagtaggagagatactggcacttgtagctaaacttagagaaacaggttatgtaactctccttgctgggtcctgcctacaggaagctttatgatctatctgtgtattcatcatccaggtgttatgactctcgtcttttcactggaacctgccaaaaagggtgattgtgacatatcactggacccagcaccttggtgatgtgactctcctctcctccttaggccctgcttacattgtgtctgttgaaatacggctggtccaacacctaggtaatgtgactctcctgcataggccttgctaataggggatgtatgacatatgctttgtttatcacttaagtgatgttactctccttttcttcctgaatcctgtaaaaggtgggggattgtgaccctatcactggacccagcacataagtaatatgagtttcctgcataggctctgttcagaagggtattatgacatatctttttgttcatcactttgtgacttgtcttttgactggaacctgccaaaaagggtgattgtgacatattgctggacccagcacctaggtgatgtggctctcctttttttctgggcctcacatattttgggtattgtgatgtatagctgggctcaacacctagcagttggggagctcctttcttgaccattcccacaaatgacatatctctgctatgaccgcctatgacacatgacctaaatatgtgacccttcttttctgcctgtaccctgctaacagagaagattgtgacaaattgctaagtgcattgtatcttgtgctaaccttctatctcagcctgtgaccaagaatgcctaactgccggggaatgcagccctgtaggtctcaacctcaatttgcccagccactattcaaaatagagtcactctggtttaaatgcttctgacattaagatacactgtaaaattatgaaaaaagttgatttgaattttagcaaatgagaaatgaaataattagaatgggctattctgaaagatatagcattagttatatttgtgtttgagttttctattaacctatatttgttacttatgaatagataccttgttttattctgtctaaacagatacactaggtggggtgcggtggccatgcctgtaatcccagcactttgggaggccgaggggagtggatcacctgaggtcaggaatttgagacaagcctgaccaacatggcaaaaccctgtctctact

SEQ ID NO: 1861 - DNA, 2261 bp, Homo sapiens
gtgcggagcggcgcggcacagagcctgttgttgagctcagtatgtcgtgggaatccggggccgggccaggtctaggttcccaggggatggatctcgtgtggagtgcgtggtacggaaagtgcgttaaagggaaagggtcgttgccactctcggcccacggcatcgtggtcgcctggctcagcagggccgagtgggaccaggtgacggtttatctgttctgtgacgaccataagttgcagcggtacgcgcttaaccgcatcacggtgtggaggagcaggtttgtgaatcttatctcagagaggaagacaaagtttgccaaggtccccctcaagtgtctggctcaagaggtaaatattccggattggattgttgaccttcgccatgagttgacccacaagaaaatgccccatataaatgactgccgcagaggctgctactttgtcctggattggctccagaagacctattggtgccgccaactggagaacagcctgagagagacctgggagttggaggagttcagggaagggatagaggaagaggatcaagaggaagataagaacattgttgttgatgacatcacagaacagaaaccagagcctcaggatgatgggaaaagtacggagtcagatgtaaaggccgatggagacagcaaaggcagcgaagaggtggattctcattgcaaaaaggccctgagtcataaagagctatatgaaagagcccgagaactgctggtatcatacgaagaggagcagtttacggtgctggagaaatttaggtatttacctaaggccattaaggcgtggaataacccgtccccacgtgtagaatgtgtcctggcagagctcaagggcgttacatgcgagaacagggaggctgtgctggatgcttttctggatgatggcttccttgtccccacatttgaatagttggcagctttgcagatagaatatgaagaaaacgtggacttgaatgacgtcctggtgccaaagccgttctctcagttctggcagcccctgctcaggggcctgcactcccagaacttcacgcaggccctattggagaggatgctctctgaactgccagccttggggatcagcgggatccggcctacctacatcctcagatggaccgttgaactgatcgtggccaacaccaagactggacggaatgctcgccgattttctgcaggccagtgggaagcaagaaggggctggaggctgttcaactgctccgcctcccttgactggccccggatggttgagtcctgcttgggctcaccttgctgggccagcccccaactccttcggatcatcttcaaagccatggggcagggcctgccagacgaggagcaggagaagctgctgcgcatctgttccatttatacccagagtggagaaaacagcctggtgcaggagggctctgaggcctcccccattgggaagtctccatatacactagacagcctgtattggagcgtcaagccagccagctccagcttcgggtctgaagcaaaggcccagcaacaggaggagcagggcagtgttaatgatgtcaaggaagaggagaaggaggagaaagaggtcttgccagaccaggtagaggaggaggaagaaaatgatgaccaagaggaggaagaggaggatgaagatgatgaagatgatgaagaggaagacagaatggaggtggggcctttctctacagagcaagagtcccccactgccgagaatgctaggcttctggcccagaaaagaggagctttgcagggctctgcatggcaggttagctcagaagacgtgcgatgggacacatttcccctaggccgaatgccaggtcagaccgaggacccagcagagctcatgctggagaattatgacaccatgtatcttttggaccagcctgtgctagagcagcggctggaaccctcaacatgcaagactgacaccttgggcctgagctgtggtgtcggcagtggcaactgcagcaacagcagcagcagcaacttcgagggccttctctggagccaggggcagctgcatgggctcaaaactggcctgcagctcttctgatggccatccctggtgcaagtgttcatccagccgtgccagggcaacagcccaccccctagtacaactgatgctccctgagacaacctgggagacagcctggatcagccacatcaactcagttgtccaccacaggggaattttgaatgtcttttgtttttgttttgttttgaaaaataataaacaggcaactgt

SEQ ID NO: 1862 - DNA, 2391 bp, Homo sapiens
tagcggggatggctccaccttaacaacaaggtggtggcacagaactttctgctccagctgcctgcagcctcgccttggttccgcagtagcggtgttcactggcggctgcagatccgaaatgcctgagggcttaaaaaaatgcatgggcttctcccctaactagttaaatgggaatcactggcgattctcatttcagagaactggtggtgtttttaagtaccttagggaagtttagcgtctgctcagttgagaatcagtgttctacccggaagggcattcgtagcctggtctggtatggacatgaacaggagagcctcctgtcttctcccggatctttgtgggcaggggtggggctggcggttattccctgcaagctgtgcttatctagggagcgtcccttggagggtttggggtctgggaggtctgctcgcaccacttgctgcagctgggggtgggtccacgagtggcctcgggcacttgggtagcacacagtggtctggagagctggtggtgcttctctcagaggttttcattacaggctgtcttttcagctgtaatggtggctatcctgctgaagcttggaacttctggacaagaaaaggcctggtttctggtggcctctatgaatcccatgtagggtgcagaccgtactccatccctccctgtgagcaccacgtcaacggctcccggcccccatgcacgggggagggagatacccccaagtgtagcaagatctgtgagcctggctacagcccgacctacaaacaggacaagcactacggatacaattcctacagcgtctccaatagcgagaaggacatcatggccgagatctacaaaaacggccccgtggagggagctttctctgtgtattcggacttcctgctctacaagtcaggagtgtaccaacacgtcaccggagagatgatgggtggccatgccatccgcatcctgggctggggagtggagaatggcacaccctactggctggttgccaactcctggaacactgactggggtgacaatggcttctttaaaatactcagaggacaggatcactgtggaatcgaatcagaagtggtggctggaattccacgcaccgatcagtactgggaaaagatctaatctgccgtgggcctgtcgtgccagtcctgggggcgagatcggggtagaaatgcattttattctttaagttcacgtaagatacaagtttcagacagggtctgaaggactggattggccaaacatcagacctgtcttccaaggagaccaagtcctggctacatcccagcctgtggttacagtgcagacaggccatgtgagccaccgctgccagcacagagcgtccttccccctgtagactagtgccgtagggagtacctgctgccccagctgactgtggccccctccgtgatccatccatctccagggagcaagacagagacgcaggaatggaaagcggagttcctaacaggatgaaagttcccccatcagttcccccagtacctccaagcaagtagctttccacatttgtcacagaaatcagaggagagatggtgttgggagccctttggagaacgccagtctcccaggccccctgcatctatcgagtttgcaatgtcacaacctctctgatcttgtgctcagcatgattctttaatagaagttttattttttcgtgcactctgctaatcatgtgggtgagccagtggaacagcgggagacctgtgctagttttacagattgcctcctaatgacgcggctcaaaaggaaaccaagtggtcaggagttgtttctgacccactgatctctactaccacaaggaaaatagtttaggagaaaccagcttttactgtttttgaaaaattagcttcaccctgtcaagttaacaaggaatgcctgtgccaataaaaggtttctccaacttgaagtctactctgatgggatctcagatcctttgtcactgcctatagacttgtagctgctgtctctctttgtccctgcagagaatcacgtcctggaactgcatgttcttgcgactcttgggacttcatcttaacttctcgctgccccagccatgttttcaaccatggcatccctcccccaattagttccctgtcatcctcgtcaaccttctctgtaagtgcctggtaagcttgcccttgcttaagaactcaaaacatagctgtgctctatttttttgttgttgttgtgactgacagagtgagactccagcctgggggacaagagtgaatctgtgtctcaccaaaaaaaaaaagaaaaagaaagatgcttaacaaaggttaccataagccacaaattcataaccacttatccttccagtttcaagtagaatatattcataacctcaataaagttctccctgctccc

SEQ ID NO: 1863 - DNA, 1838 bp, Homo sapiens
gcatctccgcggcggaactcagggaaggagctagctggggcgggggtgatgatccaggctgggttccagcatagggctcttggtgggcacgctggggtcgggtggaatgcaggagagagaggaggtgggacaggtgggtacctgggctggaggcagggcctgaggtgggcaggtgcagagggctgcacttctcggctgaagccgggaatgaggaccccgctctcgggtgggattggaggggacccgcggctgaggcgctgggctgcgacagggacatcaccgttctcctcctcagggagatggtgctcgtcgtgcacggcttcccgtcctccgtggccgcccttcgggatgaagaggggcccttgtgttgcccccaccctggctgcctgctaagggcccatgtgatctgcctggcagaggagtttcttcaggaagaaccagggcagcttctgcccctagagggccaatgcccttgctgtgagaagtcactgctttggggagacctgatctggctgtgccagatggacactgagaaagaagtagaagactcagaattagaagaggaacatggagctgatccaggacacctcccgcccgccactggagtacgtgaagggggtcccgctcatcaagtactttgcagaggcactggggcccctgcagagcttccaagcccgacctgatgacctgctcatcaacacctaccccaagtctggcaccacctgggtgagccagatactggacatgatctaccagggcggcgacctagagaagtgtaaccgggctcccatctacgtacgggtgcccttccttgaggtcaatgatccaggggaaccctcaggtggtctatgttgcccgaaacccaaaggacgtggcggtctcctactaccatttccaccgtatggaaaaggcgcaccctgagcctgggacctgggacagcttcctggaaaagttcatggctggagaaggtgggcttgactggaggaaggagggtgtgaagccgaggggtggtggctataacgtacagcaaccctgtgtcggtgccccctgcccgcttctctagtgtcctacgggtcctggtaccagcacgtgcaggagtggtgggagctgagccgcacccaccctgttctctacctcttctatgaagacatgaaggagaaccccaaaagggagattcaaaagatcctggagtttgtggggcgctccctgccagaggagaccatggacttcatggttcagcacacgtcgttcaaggagatgaagaagaaccctatgaccaactacaccaccgtcccccaggagctcatggaccacagcatctcccccttcatgaggaaaggcatggctggggactggaagaccaccttcaccgtggcgcagaatgagcgcttcgatgcggactatgcggagaagatggcaggctgcagcctcagcttccgctctgagctgtgagaggggctcctggagtcactgcagagggagtgtgcgaatctaccctgaccaatgggctcaagaataaagtatgatttttgagtcaggcacagtggctcatgtctgcaatcccagcgatttgggaggttgagctggtaggatcacaataggccacgaatttgagaccagcctggtaaaatagtgagacctcatctctacaaagatgtaaaaaaattagccacatgtgctggcacttacctgtagtcccagctacttgggaagcagaggctggaggatcatttcagcccaggaggttgtggatacagtgagttatgacatgcccattcactacagcctggatgacaagcaagaccctccctccaaagaaaataaagctcaattaaaat

SEQ ID NO: 1864 - DNA, 1827 bp, Homo sapiens
cactctctgctgtcgcccgtcccgcgcgctcctccgacccgctccgctccgctccgctcggccccgcgccgcccgtcaacatgatccgctgcggcctggcctgcgagcgctgccgctggatcctgcccctgctcctactcagcgccatcgccttcgacatcatcgcgctggccggccgcggctggttgcagtctagcgaccacggccagacgtcctcgctgtggtggaaatgctcttctgtggcttcatcatcctggtgatctgtttcatcctctccttcttcgccctctgtggaccccagatgcttgtcttcctgagagtgattggaggtctccttgccttggctgctgtgttccagatcatctccctggtaatttaccccgtgaagtacacccagaccttcacccttcatgccaaccgtgctgtcacttacatctataactgggcctacggctttgggtgggcagccacgattatcctgatcggctgtgccttcttcttctgctgcctccccaactacgaagatgaccttctgggcaatgccaagcccaggtacttctacacatctgcctaacttgggaatgaatgtgggagaaaatcgctgctgctgagatggactccagaagaagaaactgtttctccaggcgactttgaacccattttttggcagtgttcatattattaaactagtcaaaaatgctaaaataatttgggagaaaatattttttaagtagtgttatagtttcatgtttatcttttattatgttttgtgaagttgtgtcttttcactaattacctatactatgccaatatttccttatatctatccataacatttatactacatttgtaagagaatatgcacgtgaaacttaacactttataaggtaaaaatgaggtttccaagatttaataatctgatcaagttcttgttatttccaaatagaatggacttggtctgttaagggctaaggagaagaggaagataaggttaaaagttgttaatgaccaaacattctaaaagaaatgcaaaaaaaaagtttattttcaagccttcgaactatttaaggaaagcaaaatcatttcctaaatgcatatcatttgtgagaatttctcattaatatcctgaatcattcatttcagctaaggcttcatgttgactcgatatgtcatctaggaaagtactatttcatggtccaaacctgttgccatagttggtaaggctttcctttaagtgtgaaatatttagatgaaattttctcttttaaagttctttatagggttagggtgtgggaaaatgctatattaataaatctgtagtgttttgtgtttatatgttcagaaccagagtagactggattgaaagatggactgggtctaatttatcatgactgatagatctggttaagttgtgtagtaaagcattaggagggtcattcttgtcacaaaagtgccactaaaacagcctcaggagaataaatgacttgcttttctaaatctcaggtttatctgggctctatcatatagacaggcttctgatagtttgcaactgtaagcagaaacctacatatagttaaaatcctggtctttcttggtaaacagattttaaatgtctgatataaaacatgccacaggagaattcggggatttgagtttctctgaatagcatatatatgatgcatcggataggtcattatgattttttaccatttcgacttacataatgaaaaccgattcattttaaatatcagattattattttgtaagttgtggaaaaagctaattgtagttttcattatgaagttttcccaataaaccaggtattct

SEQ ID NO: 1865 - DNA, 2149 bp, Homo sapiens
gattcctcgaaaagggcggggactctgggcagcggttgtggagtgccgcgggtccacagtgctgcactgagcagagaggaaggggcgtcccgggatatttggaggataaaggtgtgggcaagggtgatgaccacacctgccggctccggcagcggcttcggctccgtgtcctggtggggcctgtccccggcgctggacctgcaggctgaaagtcctcctgtggacccagactcccaggccgatacagtgcacagcaaccccgagctagatgtgctgcttctgggctctgtggatggacggcacctgctgcggaccctgtcccgagcgaagttctggcctcgcaggaggttcaacttctttgtgctggagaataatctggaagctgtggcccgacacatgctgatcttcagcctagccctggaggaaccggagaagatggggctgcaagagcgaagcgagaccttcctggaagtgtgggggaacgcgctgctgcgcccgccagtggccgccttcgtgcgtgcccaggccgacctgctggcgcacctggtccccgagcccgaccgcctggaggaacagctgccctggctcagcctccgcgccctcaagttccgcgagcgggatgccctggaggccgtattccgcttctgggctggcggcgagaaagggccccaggcgttccccatgagccgcctctgggactcgcgcctgcgccactacctgggctcccgctacgacgcccggcgcggtgtcagcgactgggacctgcgcatgaagctgcatgaccgcggggctcaagtcattcacccccaggagttccgacgctggcgggacacaggcgtcgcctttgaactcagggactccagcgcctatcatgtgcccaaccggaccctggcgtccggtcgcctcctgagctaccgtggggagcgcgtggcagcgcgcgggtactggggggacatcgccacggggcccttcgtggccttcggcatcgaagcggacgacgagagcctcctgcggacgagcaacggccagccagtcaagacggccggggagatcactcaacacaacgtgacggagctgctccgcgacgtggccgcctgggggcgcgcgagagccaccgggggggacctggaggagcagcagcacgcggagggaagcccggagccagggactccagcagccccaaccccggaatctttcaccgtccacttcctgccgctcaattctgctcagactctccaccacaagagctgctacaacggccgattccagctcctctatgtggcctgtggtatggtccatcttctcatccctgagcttggggcctgtgtggcacccggagggaacttgattgtggaattagcccggtacctggtggacgtgcggcaggagcagctgcagggattcaacacccgggtcagggagctagctcaggcagctggatttgctccacagaccggggccaggccttcagagaccttcgcacgtttctgcaagtcccaggaatcagctctgggcaacactgtcccagctgtggaacccggaactccgccccttgacatcctggcccagcctcttgaagccagcaacccagcccttgagggcctgacccagcctctgcagggtgggaccccacactgtgagccctgccagctgccctctgagtctccaggttcactctcagaggttctggctcagcctcagggggccttggctccgcccaactgtgagtcagactccaaaactggagtctgacccaacccctagacaccccttatctccaacttccaaagtcaggttgtaggatgagaacccgctgataccattctaagtccgctgctagagtcctcaattttattctaatcattcccactcagtacccgccacccccaccccgggagtgttggtagactttcaaattccatttctgagattctatggtctattcctagaattctagattgttctctcagaattccaaattccacttctgaggctctaagcccagcctaggatctgacactgagtctcaggcccttgactttggcccccttgttcccaggcaccctgtggctgactaggggctggggtgtctcctcaccagggcctggtcagcacccagatggttcaagtaaagcaagttgtgtccacc

SEQ ID NO: 1866 - DNA, 2015 bp, Homo sapiens
gaaatctccgcccccagctggagcggctgtgcgggctgcgtagcggtgctgggtcgggccgacgtgccacccacccggagccggtccatggaaagaaattattccttagatttgatctagatgaagaaatggggccccctggcagcagcccaacaccagagcctccacaaaaagaagtgcagaaggaaggggctgcggacccaaagcaggtcggggagcccagcgggcagaagacccttgatggatcctcacggtctgcagagctcgtcccccagggcgaggatgattctgagtatttggagagagacgcccctgcaggagatgctgggaggtggctgcgtgtcagctttggtttgtttggcagcgtttgggtgaacgatttctccagagccaagaaagccaacaagaggggggactggagggacccttccccgaggttggtcctgcactttggtggtggtggcttcctggcattttataattgtcagttgtcttggagctcttccccggtggtcacacccacctgtgacatcctgtctgagaagttccatcgaggacaagccttagaagctctaggccaggctcagcctgtctgctatacactgctggaccagagatacttctcagggctagggaacatcattaagaatgaagccttgtacagagctgggatccatcccctttctctcggttcagtcctgagtgcctcgcgtcgggaggtcctggtggatcacgtggtggagttcagtacagcctggctgcagggcaagttccaaggcagaccgcagcacacacaggtctaccagaaagaacagtgccctgctggccaccaggtcatgaaggaggcgtttgggcccgaagatgggttacagaggctcacctggtggtgcccgcagtgccagccccagttgtcagaggagccagagcagtgccagttctcctaaggagctggtggtgctcctcatggaaccttgccgttggggaacctgacgtctaagtgtccagaaaggaggatgtgggcagggacggggtacagaggatagtgtgggtcagaggtgccagtagtataatattcatctccctggagttatgttgaaggcagagttttcatagggttagattttttttatccttttctagttcagttaattcatcctgttgaattgcaccatcgtgaaagatgggaaaaatcgtgatgatgggtaaggggaaaacttcccggaaggcaatggggcaaggaaaaagaaagcctatgggaaatggctgtgctcccaacatagctttgcagatgatgtgggttttttttttttttttggttgtttgttttgagagagagtcttgctctgtctccctggctggggtgtggtggtgtgatcttggctcacggcagccttgccctccctggctcaagcagtcttcatctcagcctccagagtagctgggactacaggcatgtgatatgatgctcggctgatttttgtttactttttagagagatggggtcttgccatatttgccaggctggtttgaactcctacaactcaagcattcctcccaccttggtctcccaaaatgttgggaccacgggtgtgagccaccgcgcccagctagctcctgtgttttgtttttgttttgtaactttggttgatgttaaggccctccattttggaaagcaggaaaacaggatttttttttttttatcttgttccctggaggatccagggatgaggatagagtggcctgagagcagtgcttggattcagcctcctgctgggtccttctgctggatacaggcaccaagaggcgggggtggagcagggagctgcgccttcctggggtgcccggtggtgtgtagagaaaagctgcttgtttactccttaagtcaatgtattggtgactgttgatttgttgaacaattcaggaatcaagggctgtggagaaactccctcatgttgttggcaacaggtgaatgaacctagagcggtgacatgaaaataaagctcactgttactcgc

SEQ ID NO: 1867 - DNA, 1692 bp, Homo sapiens
atgcgcgtcgggcacagcgcgtgcagcctcgtgcagctcttctggtctccggcgcccgcccctcagacgtaatgttgaattaaagaaaatactttatcagaagaagatggccactgcccagttgcagaggactcccatgagtgcactggtatttcccaataagatatcaactgaacaccagtctttggtgttagtgaagaggcttctagcagtttcagtatcctgtatcacgtatttgaggggaatattcccagaatgcgcttatggaacaagatatctagatgatctttgtgtcaaaatactgagagaagataaaaattgcccaggatctacacagttagtgaaatggatgctaggatgttatgatgctttacagaaaaaatatctaaggatggttgttctagctgtatacacaaacccagaagatcctcagacaatttcagaatgttaccaattcaaattcaaatacaccaataatggaccactcatggacttcataagtaaaaaccaaagcaacgaatctagcatgttgtctactgacaccaagaaagcaagcattctcctcattcgcaagatttatatcctaatgcaaaatctggggcctttacctaatgatgtttgtttgaccatgaaacttttttactatgatgaagttacacccccagattaccagcctcccggttttaaggatggtgattgtgaaggagttatatttgaaggggaacctatgtatttaaatgtgggagaagtctcaacaccttttcacatcttcaaagtaaaagtgaccactgagagagaacgaatggaaaatattgactcaactatactatcaccaaaacaaataaaaacaccatttcaaaaaatcctgagggacaaagatgtagaagatgaacaggagcattatacaagtgatgatttggacattgaaactaaaatggaagaacaggaaaaaaaccctgcatcttctgaacttgaagaaccaagtttagtttgtgaggaagatgaaattatgaggtctaaagaaagtccagatctttctatttctcattctcaggttgagcagttagtcaataaaacatctgaacttgatatgtctgaaagcaaaacaagaagtggaaaagtctttcagaataaaatggcaaatggaaatcaaccagtaaaatcttccaaagaaaatcggaagagaagtcaacatgaatctgggagaatagtcctccatcactttgattcttctagtcaagagtcagtgccaaaaaggagaaagtttagtgaaccaaaggaacatatataaaaattatttttgttctgcaggcttgcagagttcttctcaccatttaaactgaaggaccctatattatatttccctaactctgaagatgtatatgtagtttaaagcagtttgtacactaaaactaagtttttggctgactgtcatattgtggtccttaatcttgagataaatccaatagaacttttgaataaaagcaaaagtacaaatgtcataattgattcggtaataagtaaaatttcaaaattgattttgttcattacctacttaatatttcctttaaatatatactaactgttaaggccctctaatgccatttttctaaacagtaatgtttactttggtattaaaatttggtatggattcactttttacttatgttaaaattataccatttaactggc

SEQ ID NO: 1868 - DNA, 2177 bp, Homo sapiens
agcggggacggcagcagtagcgggagcagcagcgtggacgcggctggcgctggcgccatgaacccgctgtaaggcgcaggctgtgcagcacggggtgcgggggaggaggaggagggcgccgcggtgaagttctccgccatgaacctgaggggcctcttccaggacttcaacccgaggttgtgtgtgtcccgctgtggattctcatgtcctttctgtgcctggtggtcctctactacattgtgtggtccgtcttgttcttgcgctctatggatgtgattgcggagcagcgcaggacacacataaccatggccctgagctggatgaccatcgtcgtgccccttcttacatttgagattctgctggttcacaaactggatggccacaacgccttctcctgcatcccgatctttgtccccctttggctctcgttgatcacgctgatggcaaccacatttggacagaagggaggaaaccactggtggtttggtatccgcaaagatttctgtcagtttctgcttgaaatcttcccatttctacgagaatatggaaacatttcctatgatctccatcacgaagataatgaagaaaccgaagagaccccagttccggagccccctaaaatcgcacccatgtttcgaaagaaggccagggtggtcattacccagagccctgggaagtatgtgctcccacctcccaaattaaatatcgaaatgccagattagatgccacttccggggacagagcttaagtggactgggacgcactctctccgccttcctctgccccctcgttcaccccgcagaccagaaccagtactggagctgggtctccaggtacgtccatctcatgccttgtttgcatccagcgcctatcagccactcaccacgacgggacgcggaagtggcaggtgacgggggtgtgtgccagcagatgcggatgccaggaagagtgtgagaacaggggtgggattaccgtctgtctgggaggggctccaggtacccctcttccccgtcagacccactgggagatggctgcttgccaggcccccagaaggaacatctgtctatacggtgctgaaatcccaatcaaaagtattgtttagaaatgtatttctccacagggctgacctcctgcagctcgctgagcactcccaggtcctcagcactcccaggtcgtggctggggcagtcagtaggaactgtaactatgtctctgatgcaccacgtgtttagacacagcacagtccttttttctgttcctactgtggaagtagtttctctttgggcatgctgacagcagtttttcatagcctcacggatgagccctttctacgggagtgactccatgcttgtatacagagtatttatacaaatgttttagcatcttcatatgcggtgttaacccctagttctgtacagcatattctgttcaagtatttttttacaagcttgtgctgtaggcacatgccttctgctgcagaagtggacgcccgtggcacactcccccccccccccgtggggtgccatgccttcatgggacattgccacttctgccctggaactcgtgcaggtacgtagtagctgctactgccacaacggcaacaccaagcaagagatggtccatgcttttctgacgttctcagaatagtggctagcttcaaacctgacaagcgctgcttgaagccggaactctagagaatgttgctgagagcagaaacggccacgcgggtcacgactatgcgtgggaaagtctcaagcttccctcctgccagcaacaagaaggctttggagtaggcatgatgttttcacgtgtgcgtgccgtttctccaagcactgcaggttccaccgtgtgtcagaggctgcaagtttaacatcctcctgcctgaaaacaaataggtcctttgctgaaaagagggtaaaaaaagagctttgatcttctcagccaggagaagagggtggtgttttcacgcgggcaactgctcgccggcctacatggggttaattcaagtctgctgcgagcacgactccgcccttggcactggcctccagcaagccctgttctctttggggtacaggggaacgggatggtttagactttcctgctcagtgtgtaaaaaatgtagctaaagccactatttttgctctccttaagctgttcaataaaccggttcctcatttt

SEQ ID NO: 1869 - DNA, 2187 bp, Homo sapiens
aagcgggactagcagcccagcggggcgagacgggggagtaggaattgcgggggcctggtatttccccagagcctcctcccaggccagggagatgccacagtgcccgactttggaaagccaggaaggggaaaactccgaagagaagggggacagttccaaagaagatccaaaagaaaccgtcgcgctggcttttgtgagagagaacccaggggcacaaaacggacttcagaatgcccagcagcaaggcaagaagaagaggaagaaaaagagattggtgatcaatctatccagctgccggtatgagagtgtgcgcagggctgcccaacagtacggctttagagagggaggggaagacgatgactggactctctattggacagattactcagtgtcactggagcgggtgatggaaatgaaaagttaccagaagatcaatcacttccccgggatgagtgaaatctgccggaaggacttgctggccaggaacatgagccgcatgttaaagatgttccctaaagatttccgctttttccctaggacctggtgtcttcctgctgactggggagatttgcagacctacagcaggtcaagaaaaaataagacatacatttgtaagccggattcgggctgccaagggaaaggtatattcatcacccggacagtgaaagaaatcaaaccaggggaggatatgatctgtcagctgtatatttcaaagccctttatcattgatgggtttaagtttgacctacggatttatgtactggtgacatcctgtgaccctctcaggatttttgtgtacaatgaaggactggcccgctttgcgacgacctcttactcccgcccttgcacagacaacctggatgatatctgcatgcacctgactaattattccattaataagcacagttcaaatttcagtcgagatgcacactctggcagtaagaggaagctctccaccttcagtgcatacttggaggaccacagctacaacgtggagcagatatggagggatattgaggacgtcatcatcaagaccctcatctcggcccaccccatcatcaggcataactaccacacctgcttccccaaccacacactcaacagcgcctgctttgagatcctgggctttgacattttgttggaccacaaactcaaaccctggctgctggaggtcaaccactctccaagcttctccaccgactctcggttggataaagaggtgaaagatggtctgctgtatgacaccttagtcctgatcaacctggaaagctgtgacaagaagaaagtcttggaggaggagagacaacgggggcagttcctgcagcagtgttgttctcgggagatgaggattgaggaagccaagggtttccggaccgtgcagttaaagaaaactgaaacgtatgagaaggaaaactgtggagggttccgactgatttaccccagtctgaattcggagaagtatgagaagtttttccaggacaacaactccctcttccagaatactgttgcttccagggctcgggaggagtatgcccggcaactgatccaggagctgagactaaaacgggagaaaaagcccttccaaatgaagaagaaggtagagatgcagggggaatcggcaggcgagcaagtgagaaagaagggcatgaggggctggcaacagaaacaacagcagaaagacaaggccgccacccaagcctccaaacagtacatccagccattgacattagtatcctacacacctgacttgctcttgagtgtcagaggtgaaaggaaaaatgaaacagacagcagcctcaaccaggaggctcccacggaggaggccagctctgttttccccaagctgacgtctgcgaagcccttcagttctctacccgatctgaggaatatcaatctcagcagctcgaagttggagcccagtaaacccaacttcagcatcaaggaggccaagtctgcctctgcagtgaacgtattcactggcactgtgcacttaacctccgtagaaaccaccccagaatccaccacccaactctcaatctccccaaagtctccgccaaccctggctgtgaccgccagctctgattacagtggcccagagacggacagggtggtatcctttaaatgcaagaagcagcagacccctccacacttaacccagaagaaaatgttaaaatcttttctgcccac

SEQ ID NO: 1870 - DNA, 1837 bp, Homo sapiens
gaactctaatggttaccttgttttctacttcttttccaagatcatgactgagagattgttaataaaagcattgagtggtggtaaaaatacgaagatcattactttgaatgggaagaagatgacaaagatgccctcagcattaggaaaactgcctggcctgaagactctagtccttcagaataacctaatccccaaagtgtgtccagagttatgcaacttgacccaggccgggtgcggtggctcatgcctgtaatcccagcactttgggaggctgaggcaggcggatcacttgaaaccaggagttcgagaccagcctggccaacatggcaaaaatcccatctctactaaaaatgcaaaaaaaaaaaaaaaaaaagccaggcgtggtggcacatacctactacttgggaagctgaatgagaatcacttcaacccaggaggcagaggttgcagtgagccgagatcatgccaatgcacgccagcctgggtgacagagtgagactgtctcaaaaagaaaaaaaaattcttctaattatggcttacaaaatttaatcctgcttaatctgaacaacaatcatcttacgcagcttcctcaagaagtcagcagagtctggccctactcacccaggctggagtgcaatggcatgatctcggctcactgcaacctccgccttccaggttcaaatgattctcctgcctcagcctcccgagtagctggtattacaggagtaaaacagaaatttatttctcatagttctggaagttgggaagtgaagaccaaggtgctggcagatgtgatgtctgattaaaaagtcttacttatatgagtataaattataaccaactagccagcattcctagagaactttgttttcttgagaatcttgttgaacttcaacttaactacaatcagctgatatgcatacctgaagagattaaattcttgaagaagcttcagaagcttttgctagccagaaacaacattggagttttgccggaggaactttgtgatcttaaaaaactaagaatcctagacatagctggaaatattattcagatatttccatcaggatttcaggatctgaagctgagggaattctactgtgagggaaacccactgttcctgcagcagccagtgatttctacacagcaggagaacgtctggggtctacaggaaataacatcaagatttgtaatgaatcagctagcagaaaataaccctttcctaatggatgacatagaacggtacccacaagtcaggagcatgatctctcagggaaaaacatgtgcaatatgtggacagtactttataaccgtatggctggaatgtgttcgatttgttcctccaccaaagaaactacaacctaatacaagcaacaacagccagaatttatttggtactgagtgtgcatctggtgctctgctaaatatgtcacctggaatacctcaattaatgtccaaaataaccccatgacaccagtaagaaatccaaggactggaagataagcaagaatctgaagctggtgcctctccaagtattaatttgttcttacaaatgttttactcaacgtgaccctaacctctttggaattgctcaggtgtagaacaggtgaggtgctcattcatagcctcactccacttgccctgtcagctctgcatacacagattatgccctacttaagataccatgcctgttctctttgtcaacacattaaataaaggaagaaaaataattccattataacgttcccaatctaagcactacaatctgccttcagcttgcttagattctaggtgtgctttttttggcttaaaaaagtacaaaaaaaaattgaaaaat

SEQ ID NO: 1871 - DNA, 1555 bp, Homo sapiens
aaagcatcgggtctcgggacttctgagtggcctgggttaccgcgcgatctacactgagacaaggaagttggaaaagccgagtagttataccagaagatcagggtctcacagactcgcaacttctcttccattttccccaatggcgcatgtcttacaaaaacccaagcactctgggactcactccatagtccaggagttccaggttccggattatgttccatggcagcagtccaagcaggaaaccaagccatctactctgcctccagtccaacaagccaacagccttcatacaagcaaaatgaagactttgactagggtccaaccagtgtttcacttcaagcccactacggtggtgacaagctgccagccgaagaatccaagagaactacatagaaggcggaagttggaccctgggaagatgcatgccaaaatctggttaatgaagacgtcgctcaggagcgggagggccgctctgcgagagctccgaagccgtgagaacttcctcagcaagctcaaccgggagctgatcgagaccatccaggagatggagaacagcacgaccctgcacgtgcgggccctgctgcagcagcaggacaccttggcgaccatcatcgacatcttggagtactcaaacaagaagaggctgcagcaattgaaatctgagcttcaggagtgggaagaaaagaagaaatgcaagatgagctatcttgagcagcaggcagagcagctgaatgccaagattgagaagacccaggaggaagtgaacttcctgagcacttacatggaccatgagtattccatcaagtctgtccagatctccactcttatgcgccagctgcagcaggttaaggacagccagcaggatgagctggatgacctcggtgagatgcgcagaaaggtcctggaatccttgtccgacaagattcagaagaagaagaaaaaaattctgagttctgtggtggcggaaacccagcgtccctatgaagaggctctcctacagaagatgtgggaaagccaggacttcctgaaatgcatgcaaaggttcagagaatttattgaccagtttgaggagaacatgcctgtattaagggccgaggtggaagagctccaagcccagacccgggaaccccgagaggtcatatttgaggatgttctgcttcggagacccaagtgcaccccagacatggatgtcatcctcaacattcctgtggaagagccactacccttctagatggcagtgccatgggccgccctcccctcctgctctcttcccagcacctggagccttggatcatttacttccaggaccggatctccattcagaccctgatctacagtctccctgctccctctgcccttcctccctctttctttccctccctccctccctcccttcttccccccttcccttccctcctccttccttcctcctctccctccctccctcctttctttcttcctgtggttttttcctctcttcttcccttctttctggttggtgctgctgggccaggtgggaatttctgattaaatctgctattccttttttaccaat

SEQ ID NO: 1872 - DNA, 2335 bp, Homo sapiens
gtacaagtgctgtgacagaaaaaccgccggctccgcgcagcggcaaaagagccaacgggaacgccgggtgctgcgaccatgaccccggcactggaggacgtgggatggagaatgggacacacggagcgagaagggaaacgtttcgtgcagaccaactagcgccgccgccaccggaaaactgactcgccagtgctgccaatgaagtgcgtgtgagaaaccgatgactggtgggaggagcagcgctgggcgctggacccgcgagtgtgagaatctggcggcgctaggacccttcaggcgcgggcacgaggcgaaacccagcgctgttgccaaagacaaatgcgcgttcttttgggcgccatcagcggtgcagccagtgatcactcccaggctctgagaaactagagatgtcagccacaaaccctccgttcagggaaagtttgcggcgccgtgacggatcgactggcactgggtgcaacattgtcttgtggcctagagactagaatataaaaacaaaaaccaaatacaaaactgctgctggcattactcctactctcccccctcaagtcagtggcttcaggcttaagaaaacctgtatttttcttggctgtgccataatccgtaattaccgaggcccccagcgacccacccagtgtgattcgcagagggaaaggagctggaataaggaccgtgaatggggcggatgtggctcgtcctgggagagagctaaagcttatgctggtcgcaaacagcattacattgcaggaaactgctcttccaatggccgtggctgggtccttccacaccatccctctgccctagacctttgtccccgttcagagccatcagagattctaggagagctgtcgacaaccgcatctcttcggaacttggaaactctaggttcaagatctccgtggagaatgaaaggcacagtcgcctgacccgggcatcaggcttgccccgcacatcaagtccctcccctactggatggaactctgtggcaatcgctccttattctgatggttcactctgtcagatatcctcgatatttggggatagtagttcaaaaacagccggggaggaaaatgggctgaaagattccagcgttggatgtagaattgacagcgagacatacacctcctctctaagcccagagaaaagctcaagttgtggttctctgtctctagcagcatgatcttcaaaatgcatcattgatttctatcttctgggaaatgcaatgcaggtgaacttgtaagtgctcaaatcctccatctcctcacttttcagactgaggccttttttttttttaaatctgagaagaaatatgggactgccactgctcagtaggaaaatgtcctttcccacaagcatttatattttaataaaaatctgcactttgtgagttgagccccctcaaagagacctacaaaccctgccacaaatatctccaaccacactcatcatttccgattttcatcactgctgctcctgtgcaaaccaaactatcctttccctggggcatcctaggtagaggccatgccaggacaaaggcagagatatgcctgcctggtaaggaaatccattttggccttgtaattctcaccctctcccaagatgtttgcctcaatatctccttcccaccttaccccgtcttcagctagccaaaacattccctggtatttgaggcccttccaatttcctcctggttttgtgggtgggagaataaagaaaaaactgcactgttcccacccacatagttacagccactttatcaaacggaagagcagtctggagccattgcaaaacaaaatacctgccacaactcctctcttctcatttcgactccagcttttcatcttagcaaaaaagttgcaatcagcaccccctagacggaaggaatatcctgtcttaatgggagtccataggaggctgcaggctgctcccctacagagactaacatcaaggtagttgcagaattcagattctaattacagtgtggttggaggcggggtggattccagggaggtcaggaagaggtaaagtacagaattgagctccttgggaggaggtcataggaactttgcagtatgaaaatggctagagattgggtagaattgagcaggctggcaatggcagttttgtgtgggtggtaggacctaggattcaaacttgagggcaaattgtggagcacatacgacaaatgatgtagagcctttcctatttcccttcctgctgtgtcatccgaaacaataaataataaagaattaaaaaaaaaaaaaaaaaaaaaaaaaaaaaaaaaaaaaaaaaaaaaaaaaaaaaaaaaaaaaaaaaaaag

SEQ ID NO: 1873 - DNA, 2207 bp, Homo sapiens
gatcagttagttctcattcttataattttagttctcatccttataatttaggtcaaagtacatgtcagaaagcagcaaagtcattcatttaacatcttttactgacatttctgaatgtctcaagccccagctggatagaagatacgcttatacagaagaacctagggttaaaaccgtgtcagatgttggtgccttgggaggatctgacatggaaaatttgttgcaatctttgtatgtagaaaatagagctggattcttctttactaaattctgcgagcattcagggaacaagttgtggaagaacagtgtgtacttttggtttgacctgcaggcttatcatcagcttttctaccaagaaacacttcagccttttaaagtatgcaagcaagcgcaatatctttttgccacatacgttgctccttctgccactcttgacattggactccaacaggaaaagaaaaaagaaatttatatgaaaatacagccaccatttgaagacctttttgacacagcagaggaatatatccttctcctccttcttgagccatggacaaagatggtaaaatcggaccaaattgcttataaaaaggtggagctggtggaagaaactcgacagttagactccacatacttcagaaagctacaggctttgcataaagagacattttccaagaaagctgaggacaccacttgtgaaattggaactggcattttatcactctctaacgtctctaaacgaacagaatattgggataatgttcctgcagaatacaagcattttaagtttagtgatctgcttaacaacaaactggagtttgaacatttccgtcagtttcttgagactcattcttcaagcatggatcttatgtgctggacagacattgagcagttccggagaataacttacagagatcgaaatcaaaggaaggcaaaatctatatacattaaaaacaaataccttaataaaaaatatttctttggacccaacagtccagcttctctgtatcagcagaaccaggtaatgcatttaagtggtggctgggggaagattcttcatgagcagcttgatgcacctgttctagttgaaatccagaagcatgcgcaaaataggctagaaaatgtatggctgccattgtttcttgcaagtgaacagtttgcagcacgtcagaagataaaggtacagatgaaagacatagcagaagagctcttactacagaaggctgaaaagaaaatcggggtctggaagcctgtggagagtaagtggatctcttcatcttgtaaaatcattgcttttcgcaaagcattattgaatccagttacttcaagacaatttcaacgttttgtggctctaaaaggagatttattggaaaatggtttactcttttggcaagaagtacaaaaatataaggacttgtgccattctcattgtgatgagtctgtcatccagaagaagattacaactattatcaactgctttattaattccagtattccaccagctttacaaattgacattccagtagagcaagcccagaagattattgaacaccggaaggagttaggaccatatgtatttagagaggcacagatgacaatttttggggttctgtttaaattctggcctcagttctgtgagtttaggaagaatttaacagatgaaaatattatgagtgttttagagagaagacaagaatataataagcagaaaaaaaaattggcagtcctagaagacgaaaaatctggaaaggatggaatcaaacaatatgcaaatacttcagtgcctgctatcaaaactgctttactcagtgattccttcctaggcctccaaccatatggccgacagccaacctggtgctactcaaagtatatagaagccttagaacaggagagaattcttcttaagatccaagaagaactagaaaaaaagttgtttgcaggcttgcaacctctcacaaattttaaggctagctcttcaactatgtctttgaaaaagaatatgtctgcccacagcagccagaagtgacagcattcttgtgaatgtttacatcctgctgctgataggttcaaggaattctttaaaccagattctgctgacatgagaagctccagtgatttgtttttttgaaggtctgtatcagagcaagcctaacatctaaataaagtttgattctggattttccaggtgggaaataaataaagaaaatttg

SEQ ID NO: 1874 - DNA, 1651 bp, Homo sapiens
agtggacactgtcggcacggtgggctgggggcgtaagggccccggtggtcctagggaccccatggccatggttgagcggccgaggcccgagtgggcctcgtatcacaactgcaacagcaacagctgccaggacctgggcaactctgtcctgttgctgctgggcctcatcatctgcattaacattagcatcaatatagtgaccctggtcagggtggggccagatgggagggagctggtgggatagtggggggcaggcctgccggccagggcctacctgggatcactgtgtcttcccccacctagctctggagccgattccgtggtgtcttataccaagtgttccatgataccatttgtgagaaaggtaagaggtctgggggctgggacataggaggggcagaaaccaagtgctctagcctcagccctaaattagccccttcccttcttgctcgcccctctcagacaacatagctgtgtggctgcccttcctgggccctgcctctccatgcctgtaggagctggcctccccactagtctcacctctcccccatccacagaagctcccaagtcatcattactcagaaagcagacccagccccctaagaagcagagttctcctgcagtccatcttcggtgcaccatggaccctgtgatgatgactgtgtccccgcccccagctcaccgccatcgccgtcgaggctctcccacacgctgtgctcactgcccagtagcttgggctcctgacactgatgacgagaagcctcatcagtacccagccatctgctcctaccactgggatgtccctgaggactgggaaggcttccaacacactcaggggacctgggttccctggtctcaggatgccccagagtcccctccccagaccatccgcttccagcctgggcaacagagcgagactccatctcaaaaaaaaaaaaaaaaaaaaaagaagagaaatattggggcccccctcaagaggtacctcactgtaacatcacagctctctgtgacctcactcctttgattaactcaccatgtcaccagtgaggagactaagttcagagaagctaagggtcttgctcatggttacacagacactgaggatcaagctcatggcctcagatgctccatcccattgctgcagagccagcctgacccaccagaacctcccaccttccccagttcaccatgtgaactcagaaactgagaaacagagaaactcaggccctgcctttctgctacacaattgggatcatatgcacatgcacacacataccacttgagaacaagcagctgtgtgcgtgagcccaggctgagggagctggacttcaccttccactctagacagattcctggaatgtgagcagacggaccgtttacaaatggccctacttctctcattcaactaacgttactgatcattttcaatggattccattcagtggaatctgaatctactctgcatctactctgtgtttggaggctggatgggatatgatcactggcctttctttctgctgagtggttcactgtgtaaacaaatggcttgcagtctccagggcaccacagaccccagtgatgcacctgttttaagtcaaacactctttttggtatattaacaattacatgtattttgtgctttgttaatttc

SEQ ID NO: 1875 - DNA, 2086 bp, Homo sapiens
agcgcggaggcttcggagcgagccggggcagtcggggtcggtgaggatctcctttagaagaggagaagccttgcatcaacctcttgggcctcagccaagatgtctgagataccgtccactatagtctccaagaacatgaccaatgacaagaacagcctggaatccatgaacatcagctcttcttcaagcactgaagagaacccagagaaacaggcaagaaaaaacgaagaacatggtcctgacccttcagcgaaccctttccacttatctggggatgtggatttcttcttgctcagagatcaggagcggaataaggctctctccgaacggcagcagcagaagacgatgcgggtgcaccagaagatgacctactcctcgaaagtgtcggctaagcacaccagcctgcggcggcagctgcagctggaggacaagcaggaggacctggaggcgcgcgccgaggccgagcatcagcgcgccttccgcgactacacgacctggaagctcaccttgaccaaagaaaagaatgtggagcctgagaacatgagtggctacattaagcagaagcggcaaatgttcctcctccagtatgccctggatgtcaagcggagagagatccagcggctggagacgctggcgaccaaagaggaggccaggctggagcgggccgagaaatccctggagaaggacgccgccttgttcgacgagttcgtcagggagaatgactgcagctccgtgcaggccatgagagcggctgagaaggagaccaaagccaagatagagaagatccttgagatccgggacctcaccacccagattgttaatatcaaaggtgagatctccagatttgaagacactctgaagcattacaaggtctataaggatttcctatacaagctgtcgcccaaggagtggcttgaagaacaggaaaagaaacactcgtttctcaaaaaggccaaggaggtctccgaggcttccaaagagagcagtgttaactccacaccaggggacaaaggaccagggatcaagggcaaggcgagctccatgtgggccaaagagggtcagggtacaaagaagccctggaggtttctgcagacgatgcggctggggcggagcccgtcttacctgagcagcccccagcaaggcagccagcccagcgagtccagcggtggcgactccagagggtcgaactctcccatcccccccacgcaggaggacaccgacagcgatggggaggaaccacagctgtacttcacggagccccagcagctcctggatgtcttccgagagctggaggagcagaacctgtcgctgatccagaacagccaggagacggagaagaccctggaggagctgagccacaccctgaaacacacccagatccgcatggacagggaggtcaaccagctgaagcagtgggtcaccacaatgatgatgtccatcaccaaggaggaggacacagcagctgagctggagctcaaagcccgagtcttccacttcggcgagtacaagggcgatcagcaggataagctgctagagagcctgaactgcaaggtgctggatgtgtaccggcactgcaccggcacccagcaggaggccaacctgggcaccgtgcagatgctgaccatcattgagcaccagctggatgagctgctagagaacctggagcacgtgccccaggtcaagatcgagcaggccgagagggcaaaggagaaggagcggcgcatcagacttcgagaagagaagctccagatgcaaaagatcctacaggaggagcatctgcagcgggcccgggcgcgcgcccaggctgagatcaagaagaagagaggcaggacactggtatgccgctcacgacccccagcccacaggatcaaacaacagtctgagcacacactgatggacaaggaggaggaggagctgctatttttctttacttaatcttcgcagaccatagctgttctggctgaaggcttagcaaagatgttggcagaggaagcagagactgggctgggtctcgagtggcccaactgagtcctctctgtctcctgtgtgctcccttcctcacctgaataaattcatgtctctctgg

SEQ ID NO: 1876 - DNA, 2182 bp, Homo sapiens
agctccatcgttacaatggcctctttagacccagctcctgcctcccagccttctctctaggccctgaactttctcaagtcgacgtcaccaggcccagctcatgcttcttggcagcctctccaggcccagctcttcctcccggcggcctctgcaggcccagactgtcatcaagtcggcctgtccagggccagctcctgcctcccggcgccctctgcaggcccaagtcgtcctcaagttggcctccccaggcccagctccagcctctcggcggcctctccgggtgcaaaagttcctcgagtcagcctctccaggcccagctcctcctgcctcccagtggcctctttcggcccagcccagctcatgcctctgggcggccttcccaggccccgcttttgacttttggcggcctctgcaggcctcgacaaggcccggcctcctgcctcccgaaggcctgcacaggcccagcctctgcctcacagcagactctccacgcccagctagctctcgcctcactgcggcctccccagtccaaagctcctgcctctcggccgcttcggcaggcccagctcccgcctgccagtggcctcttcaggcccatggggctcattcctcacaacggcctttccaggccccgtttttcccttccggcggcctctccgggcccagaacctcctcaagttggcctctccagacccacttgcaccctccgggcgtcctctccaggcccagctcttcctcccggctgcgtctccaggcccgactcctgcctcccaacaacctctttggactcagtgcctgcccatctcctggcggccttggtcggcccacagcttcctcaagccaagctccccaggcccaggtcaggcctcacggtggcctctccaggatcagctcctgccctccgatggcgtctccaggccccaaatggtctccggccagtgggctcctccacgcccagcttgggcctcccggcgacctctgcaggcccaagtcgtcctgaagtcggcctctcccggccctgcctcccagcaagtaagcaagctttttggcttagctcctgcccagctcctgaagagcttggctgcagaaactttggggtctacaaacgccggcgagagctgagccgaaagagcttgcttgctgggaggcaggagctgggccgggagatgcagccaggaggaacagctgggcctgcagaggccgccatgcgggaggcagaggctgggcctcctcaagttggcctctccagacccacttgcagcctcccggcgtcctctccgggcccagctcttcctcccggctgcgtctccaggcccaactccggcctcccaacaaggtctttggactcagctcccccgcagcttccagcggccctggtaggcccacaacttcctgaagccaagctccccaggcccagctcaggcctcacggtggcctctccaggctcagctcctgccctccgacagcgtctccaggccccaaacggcctccggtcggtgggctcctctaggcccagcttgggcctcccggcagcctctgcaggcccaaatcgtcctgaagtcggcctctccaggcccagctccagcctcccggcggcctctgcaggcctaagtcgtcctcaagtcggcctggaaatgggcctggaagagctgcaagtcggcctccccgggcccagctccgtcctctcggcggcctctccaggtgcaaaacttcctcgagtcagcctctccaggcccagctcctcctgcctcagtggcctctttcggcccagcccagctcatggctctcggcggtcttcccaggccccgcttttgacttttggtggcctcttcaggcccagaacttgacctccagtcggcctttgcaggcccggcctcctgcctctcgaaggtctgcatgggcccggcctcggcctcacagcggactctccacgcccagctagctctcgcctcactgcaccctccccagtccaaagctcctgcctttcggccacttcggcaggcccagctcctgcctgccagtggcctctttaggcccagctcattcctcacaacggcctttccaggccccgtttttcccttccggcagcctcttggcctctaatttttttatcttttgtgtataaatcccaaattatggaattttggaatatttccaccattatataaatattttggtaggt

SEQ ID NO: 1877 - DNA, 1772 bp, Homo sapiens
tgtttttctgaaagcagctgcagaaatttgtctttttttagtttgcaaaaacttcagaggttatgggggaaagtggggttctatgaatcccagatagtacatgaagcagatttggtttcagtaattttagcataattcattgtaaggtgatgatccctaggaacttcatcacagtgagcaacctgaaagctcccagcagccagcaataaatgaggtggggcgagtccactggcagggcggggccttaagagcctgatgcttgagctctgaattccaagttggggggacacatgcaaaggattctgggcctgattgtttcctgtaaccaggatacagtctggttggcagggcaactggctttcacttggtggccttcagtgggtgtcctcattggttgcctttggttagtgccctcagttggtaccctcagttgtttctcttcagttggtggtcctcagttggtggttttcagttgttgggcagtggtggaaggaggatgaatctgtgctctctcctccccaggccacagctctcaggcttgttgcatccaggcccttctaaaataaaccagacaggttggcaggtttttttttagcagacaagtcagctcagagtacgggggtgacacggggtgcaggctgctagcgcagtgccaccccatggcccagggctgcccgtgccagccatgcttttgccaggaagaggcgataggtgttgagccctgcagacttgggtgcaagcgaagacccaagctgcctgagaagagtaggggtgccccatggggcccacactgaactgttgcatatgcaccaaagccagccccaattggcacaagggttcacagagccagcctgtggctctgacgtctaccagcatgcagactgcgaagatgcaggccgcgatatacaggagcagaggtgcccagaatatgctgtcccccaatgccagccacaagtggggctatctgagggtgtgatgggtgaagctgtcctgcagctctgagatccacgaggcagaggcagcagtagcgctggactccactgttttggaggctgcccagtcgaatttgggagccagcaagaatcctgacagcagcacattggccaccagaagacacccaaagggagaggagcggaagaccttctggtgtgggctgggcagcaattcacttgaaggagaaacagcccgggtgtggagaggcagccatccttggcgggatcctttctaaggagccgagaaatcaacgtagagcttcctctgtctgattctctaacaactgcagaccttccatgagtcaagctttgtgtcaaaaggacaaataaaaaggacctataaaaggcatcaccaagcccaatggacagatgccccaggctgcacattctgtcagtgctgttctggaaaaggcccaaacacatgctgaaacatcgaaggataagaagccagccctcgggaaccggcaggagcactctgggccccgcacggccccaagtccagcctgccccgcctcctctggtgcagaggtccagggataccagcagcagccccgccacgcccctccaaggccaagaacacaggcggcaggggcttcccctccctgccagactacttcctgccgccacagccaccacccttggacgacccagagctcccgccgcccctggacttcgtgctccctccccccgcggtcgccaagaggcctcctaatgccccacccccgcaagagacacgaagcatcaatgttcagaagcagcaaataaataaaataaatgaat

SEQ ID NO: 1878 - DNA, 2502 bp, Homo sapiens
aggtgctgcaggccgtggagctccagggcttgggcctctcgttcagcgcctgctccctgaccctggaccaggcccagcttacacccctgctgcgggccctcaagctgcacacagcactccgggagctgcgcctggcagggaaccggctgggggacaagtgtgtggctgagctggtggctgccctgggcaccatgcccagcctggccctccttgacctctcctccaatcacctgggtcccgaaggcctgcgccagcttgccatggggctcccaggccaagccaccttgcagagtttggaggagctggacttaagcatgaaccccctgggggacggctgtggccagtccctggcctccctcctgcacgcctgccccttactcagcaccctgcgcctgcaggcgtgtggcttcggccccagcttctttctgagccaccagacagcactgggtagtgctttccaaggtgagctgaccaggcactccctgtccactccctagccctggggcattgagggtttccaggactttcagagggggcccaggctgggcacacaggggcaacacctgtggtcccagctacttgagaggctgaggcgggagtatcgcttgagccaagagttccaggaaagcctggcccacatagtgagaccccatcccttaagaaaaaagcgtctaggccgggcgcagtggctcacgcctgtaatcccagcactttgggaggccaaggcgggcagatcacgaggtcaggatatcgagaccatcctggctaacacggtgaaacgccgtctctattaaaaatacaattagctgggcgtggtggccggtgcctgtagtcccagctacgcaggaggctgaggcaggagaatggcatgaacccgggaagcggagcttgcagtgagccgagatcacgccgttgcactccagcctgggcgacagagcaagactccgtgtcaaaaaaacgaaacaaacaacgtctaggggcctgggatgccagacctggctctccgggagggcctggcacctgggagcaatagatggatgtgtgggtacagggtctgcctctgaggggcgtctggtgcccacccagccaggctgacccccgcaggacacaccgagagcagagtccgggcagctagtgtcctgtggtccccatcccgtgctcgccagctgagtgctgttcacctgaggcagttccactgtgagcccactcaggctgcagagactggggtcccagtgccaagaggctgggaattgggtgtcatccagggggagtgtaagtggggcagcaatggtcagtgcactcccctggcacccccaccgtgcagaggcatgtggcccaggaccgtgtggttgtggggtgggagagggcaagttgtccagaactgggggcagccgagcttggaagtctggccccgccctcccagctgggagaatctgggcgagagcctttgcctctgcacttgccaccccaccctacgagcactgcggtagtggtttccccaaaggggtcctgagggttctgggcccagaacttggggtgggtacagggctgtggccacgtggggctgacggattctggccccggtgcagatgctgagcacctgaagaccctgtccctgtcctacaacgccctgggagcccctgccctggccaggaccctgcagagcctgcccgccggcaccctcctgcacttagagctcagctccgtggcagccggcaagggtgattcggacctcatggagcctgtattccgatacctggccaaggaaggctgtgctctagcccacctgaccctgtctgcaaaccacctgggggacaaggctgttagagacctgtgcagatgtctctctctgtgcccctcactcatctcactggatctgtctgccaaccctgagatcagctgtgccagcttggaagagctcctgtccaccctccaaaagcggccccaaggccttagcttccttggcctgtcaggctgcgccgtccagggtcccctgggcctgggcctgtgggacaagatagccgcgcagctccgggaactgcagctgtgcagcagacgcctctgcgctgaggacagggacgccctgcgccagctgcagcccagtcggccgggccccggcgagtgcacgctggaccacggctccaagctcttctttcggcgcctctgaccctggcgctgcctttccccaccctcaccgaagcccctaataaatgaagctgctggccgggcgcggtggctcgcgcctgtaatcccaacactttgggaggcccaggcgggcggatcacgaggtcaggagatcgagaccatcctggctaacatggtgaaaccccgtctctactaaaaataccaaaaattagccgggcgtggtggtggaagcctgtagtcccagctacttcggaggctgaggcaggagaatggcgtgagcccgggaggcggagcttgcagtgagccgagatcgcgcccctgcactccagcctgggcgacagaccgagactccgtctc

SEQ ID NO: 1879 - DNA, 1862 bp, Homo sapiens
aaaaagccatgttcagcggccgcgtggaggtgctgaccgatgccggaggttgggtgctgattgaccggagcggccgtcactttggtacaatcctcaattacctgcgggatgggtctgtgccactgccggagagtacgagagaactgggggagctgctgggcgaagcacgctactacctggtgcagggcctgattgaggactgccagctggcgctgcagcaaaaaagggagacgctgtccccgctgtgcctcatccccatggtgacatctccccgggaggagcagcagctcctggccagcacctccaagcccgtggtgaagctcctgcacaaccgcagtaacaacaagtactcctacaccaggtgaccgccggggtgcggggcactgggcgggaccctgggatgcagcacagccctgcttctgcccaaggcgagggccacggccacacggggggcctacaagaacatctgtgcctgctcgcagattcggcttcgcctcttacccctgacgctctaggaactggcagagtcctcccccttgaggtcagtactgttgtgagctccattttacagatgaggaggtcgggacaccaagaggtgaagtaacttgcctagtgtcacccagttaaaaaatggggacaccaggacccccggggaggtggcctggctcccggtccctcactggagctgctgtgctgtgctgtgctgggatttgctcagcgcatgtggcttcccttctgagacccgtttagcctggccccaggggtggaggaggctctctgttgagcaccaaagccctgggcaggagcagaggactgggaatgcatccaggcccgtcttctgggggtacagagggaggggtgccaactgcgctgaggcctcctggtcccctggtccccagcacttcagatgacaacctacttaagaacatcgagctgttcgacaagctggccctgcgcttccacgggcggctactcttcctcaaggatgtcctgggggacgagatctgctgctggtctttctacgggcagggccgcaaaatcgccgaggtgtgctgcacctccattgtctatgctacggagaagaagcagaccaaggtggaatttccagaggcccggatcttcgaggagaccctgaacatcctcatctacgagactccccggggcccagacccagccctcctggaggccacagggggagcagctggagctggtggggctggccgcggggaggatgaagagaaccgagagcaccgtgtccgcaggatccatgtccggcgccatatcacccacgacgagcgtcctcatggccaacaaattgtcttcaaggactgacctctgaccctccccctgccttcctcttgccttgggacccagtccctctctctttccctccccttcccagacttttgccccggctctgctggccaagtcgtgggtcctcctctgtcccttcattgcatggcacagctcactttggcccttctccacccgtcccaaccccattgctaacaacatggtacattccggccccaccactcagagccttccgaagccaacacttgtccccaccctggccctgcgtccttccctctccagctggttaagagggatttagaattccctttctctttttttagtgcatcgtccatgccaaagtgtgcggcccttcctgacatcaccacagtctgagcagcctcccgcgtcctgcagggtagtccgccccctcctccccaccatcctccctacctccttaactttgtactagactggcctgggcctgcccagctcagcgttatcagtctgtttcatattatttattattttaattttctattaaattattgaaataaagttaagttgag

SEQ ID NO: 1880 - DNA, 1953 bp, Homo sapiens
aggtgctcctgggtccgcgcgggtggcgggtgccgcgcacttatccgttggccagctgcgttccgggatcagctaccagacggtccctgagatgaccgggaaccgggctgggggaggatagagccgagactggaggatcgattggcacctccgcccacttttcccacaacgccttcccgaacgataggttggaaaggctcctggatccaaactcgctgagggccaggcaagaaaatgtcctcaaatttattgccaacactgaattctggaggtaaagtaaaagatggctcaaccaaagaggacaggccttataagatctttttcagagatctctttcttgtcaaagaaaatgaaatggcagcaaaggaaacggaaaaatttatgaaccgtaacatgaaagtctaccagaaaactactttttcatccagaatgaagagtcattcatacctgagccaactagctttctaccctaaaaggagtggtaggtcatttgaaaagtttgggccaggtcctgctccgattcctagattaatagaaggttccgacacaaaaaggactgtccatgaatttattaatgaccagagagacaggtttctgctcgagtatgctttgtcaaccaaaagaaacacaatcaaaaagtttgaaaaagacatagcaatgagggaacggcaactaaaaaaagcagagaaaaagctccaagatgatgcactggcctttgaagagttccttcgagaaaatgaccagagatctgtagacgctctgaaaatggcagcacaggaaacaataaacaaactccaaatgacagcagagctgaagaaagcaagcatggaggtacaagcagtgaaaagtgaaatagcaaaaacagaattcctcctcagggagtatatgaaatatggtttttttctgctgcaaatgtctccaaaacattggcaaatccagcaagcactaaaaagagcacaggcatcaaaaagtaaagcaaatatcatccttccaaaaatattagcaaaattatcattacattcaagtaacaaggaaggcatccttgaggagtccgggaggacagctgtcctttcagaagatgcttctcagggaagagacagccaaggaaagccaagcagaagcctgactcgcactccagagaaaaagaaatcaaacctggctgaaagtttcggttcagaagacagtttggaattccttttagatgatgaaatggacgttgatttggagccagcactttatttcaaggaaccagaggagttacttcaagtcctcagagagctggaagagcagaatcttactttgtttcaatattcccaagatgtagatgaaaatcttgaagaggtaaacaaaagagaaaaagttatacaggataaaacaaatagcaacatagagtttcttttggagcaagaaaaaatgcttaaagctaactgtgtgagagaagaagagaaagcagcagaattgcaattaaagtccaagctctttagctttggagaatttaattcagatgctcaggaaatactgatagactcacttagtaaaaagattactcaagtatacaaagtctgcattggagatgctgaggatgacggcctcaacccaattcaaaagctggtaaaagtagaatctcgcctggtagaactgtgtgacctcatcgaatccattcccaaagaaaatgtggaggcaattgagaggatgaaacagaaagaatggcggcaaaagtttcgtgatgagaaaatgaaagaaaaacaaagacaccaacaggaaaggctaaaagctgctctggaaaaagcagtagcacaaccaaagaaaaagttgggaagacaacttgtctttcattcaaaacctccatctggtaacaaacagcagctacctttagtcaatgaaacaaaaacaaaatcacaagaggaagaatatttttttacttgaataaaagcagtaagacattttattacc

SEQ ID NO: 1881 - DNA, 1700 bp, Homo sapiens
atgcgcacccgcgtcccgctgctgtttagccgtttccaaggctacgaagcccatcggccggggataagagagcaagaaaatgaagctcaagagcctcctgctccggtattacccgccaggaattatgttggaatatgaaaaacatggagaattaaagactaagtccatagatttgcttgatcttggtcccagcactgatgtcagtgcgttagtagaagaaatccagaaggcagaacctctactcacagcttcacgaacagagcaagtcaaacttttgatacagaggttgcaagagaaactcggccagaacagcaatcacacgttctatctttttaaggttctcaaagcacatatattgccactgactaatgttgcacttaacaaatcgggctcatgctttatcacaggaagctatgatcggacgtgcaagctctgggacactgcgtctggagaggagctgaacacgctggagggccacaggaatgtggtttatgccatagcattcaacaatccttacggtgacaaaatcgccactgggtcctttgataaaacttgtaaactctggagtgtggaaacaggaaaatgttaccataccttcaggggtcatacagcagaaatagtgtgtttatcatttaaccctcaaagcacattggtggcgactggaagtatggacacaacagccaaattgtgggacattcagaatggcgaggaagtttacaccttaagaggacattctgccgaaatcatctccttgtcatttaacacctcaggagacagaatcatcacggggtcttttgatcataccgttgtagtgtgggacgctgatactggaaggaaggtaaatatcttaattggtcattgtgctgagattagcagtgcctcattcaattgggattgctctctaatattaactggctctatggacaaaacctgcaagctgtgggatgctacaaatggaaaatgtgtggcaaccttaacaggccatgatgatgaaatactagacagctgctttgattacactggaaagcttattgcaactgcttcagctgatggaacagcaagaattttcagtgctgccacaagaaaatgcattgccaaactggaaggtcatgaaggtgaaatttcaaagatttctttcaaccctcaagggaaccatcttctaactggcagctctgacaaaacggctagaatctgggatgctcagactggccagtgcctccaggttcttgaggggcacactgatgaaatcttttcatgtgctttcaactataaaggcaacatagtcattacaggcagcaaggataatacctgtaggatatggcgttgactgaaggaagctggtcagtgagcaaccttgctagcaatggtaatcaagaactggaacttcacagacagcagctctcttaatatttcttatactttctctttttctgcaagtcaactatttctacaactgtccttcatttcacagatatgaccattaaacatgacaaagttatgccactccaatattattatttgatggcgatggcaggacacagcataatgtttggctaatgccaccagttatttcagttgtgtttgttttttaaaagcattatgatactgaaaaaggagaccagaacaacttaacaacgtgtctcctggattttactttgaagcctattgttataatttctgttgaataaagtgtttggagg

SEQ ID NO: 1882 - DNA, 2489 bp, Homo sapiens
ttactgtgtagctctcccaaaagcgaattccaccagcattctagtatttctaactgttgttgttgctctgcgaatcaacaaatgtatcagaatttctttcaatcagtatcccattgagtttcccatggaattatttctgattattggcttcactgtgattgcaaacaagataagcatggccacagaaaccagccagacgcttattgacatgattccttatagctttctgcttcctgtaacaccagatttcagccttcttcccaagataattttacaagccttctccttatctttggtgagctcctttctgctcatatttctgggcaagaagattgccagtcttcacaattacagtgtcaattccaaccaggatttaatagccatcggcctttgcaatgtcgtcagttcatttttcagatcttgtgtgtttactggtgctattgctaggactattatccaggataaatctggaggaagacaacagtttgcatctctggtaggcgcaggtgtgatgctgctcctgatggtgaagatgggacactttttctacacactgccaaatgctgtgctggctggtattattctgagcaacgtcattccctaccttgaaaccatttctaacctacccagcctgtggaggcaggaccaatatgactgtgctctttggatgatgacattctcatcttcaattttcctgggactggacattggactaattatctcagtagtttctgctttcttcatcaccactgttcgttcacacagagctaagattcttctcctgggtcaaatccctaacaccaacatttatagaagcatcaatgattatcgggagatcatcaccattcctggggtgaaaatcttccagtgctgcagctcaattacatttgtaaatgtttactacctaaagcataagctgttaaaagaggttgatatggtaaaggtgcctcttaaagaagaagaaattttcagcttgtttaattcaagtgacaccaatctacaaggaggaaagatttgcaggtgtttctgcaactgtgatgatctggagccgctgcccaggattctttacacagagcgatttgaaaataaactggatcccgaagcatcctccgttaacctgattcactgctcacattttgagagcatgaacacaagccaaactgcatccgaagaccaagtgccatacacagtatcgtccgtgtctcagaaaaatcaagggcaacagtatgaggaggtggaggaagtttggcttcctaataactcatcaagaaacagctcaccaggactgcctgatgtggcggaaagccaggggaggagatcactcatcccttactcagatgcgtctctactgcccagtgtccacaccatcatcctggatttctccatggtacactacgtggattcacgggggttagtcgtattaagacagatatgcaatgcctttcaaaacgccaacattttgatactcattgcagggtgtcactcttccatagtcagggcatttgagaggaatgatttctttgacgctggcatcaccaagacccagctgttcctcagcgttcacgacgccgtgctgtttgccttgtcaaggaaggtcataggctcctctgagttaagcatcgatgaatccgagacagtgatacgggaaacctactcagaaatagacaagaatgacaattcaagatataaaatgagcagcagttttctaggaagccaaaaaaatgtaagtccaggcttcatcaagatccaacagcctgtagaagaggagtcggagttggatttggagctggaatcagaacaagaggctgggctgggtctggacctagacctggatcgggagctggagcctgaaatggagcccaaggctgagaccgagaccaagacccagaccgagatggagccccagcctgagactgagcctgagatggagcccaaccccaaatctaggccaagagctcacacttttcctcagcagcgttactggcctatgtatcatccgtctatggcttccacccagtctcagactcagactcggacatggtcagtggagaggagacgccatcctatggattcatactcaccagagggcaacagcaatgaagatgtctaggagatgaactagaaataaggggtcagataatgctggcaaatcctcctacccaaaaaggggtcaattgtccagagacctagactggatacgaactagcagtacttccttcctgactgtgactcctactacctgccagccttcttccttgctctgcgctgggatcatactcccaaatcacattactaaatgccaacaattatctctgaattccctatccaggctcccctcatttcaccttcagcatatattctagtcatgaatttccttcttcacacaccccacatctctgggctttgtgccagaccatctctaacttaatcctctcatccctgttcccctttctccaaagagatgaagctcaaataaaatgtataactct

SEQ ID NO: 1883 - DNA, 2006 bp, Homo sapiens
tctaaagcacccactatggatgcacagcaggacagacccaagtcccaagactccctgggcctactggcccccctagcatctgctgcagaggtcccctctacagctcccgtgtctgggaagaagcacagaccaccaggacccctgttctcctcctcagatccccttcctgccacctcttaccactcccgggacacagcacaggtcacctcgctgattcctgccaccttcacagctgcaagcagggatgccggcatgagaagaacaaggtcggctcctgcagctgccacagcagcccctcccccctccacattgaacaacacgtcggggtcactactcaatgcagtggatggaggcccctcacatttcttggcctcagccacagctgcagcacgtgcccagaggtcagaagtgagatataaccagagatcccagacctcccggaccagatcctgcctcaaacgaaatgccagctccagctccagctcccacagctctacggaaggcctccaggaactaaagcggaggagggggccagcctcatcccactgccagctggcccacagttcctcaaacacagtgagtgaggacggacctcaggctgtctcttcgggtcaccgctgtgaaaacaaggcaggtacagcaccagggcagacactcgcccccaggggaggctcccccagatcccaggcctctaggccccacatcaacagtgcactgtacgttgaggacaaggccatctcggactgcagaccctcacggccttcccacactttgtcctcacttgcaacaggggcttcgggtgggcctcccgtttctaaagcacccactatggacgcacagcaggacagacccaagtcccaagactgcctgggcctagtggcccccctagcatctgctgcagaggtcccctctacagctcccgtgtctgggaagaagcacagaccaccaggacccctgttctcctcctcagatccccttcctgccacctcttcccactcccgggactcagcccaggtcacctcgctgattcctgccaccttcacagctgcaagcagggatgccggcatgagaagaacaaggcctggcacctcggctcctgcagctgccgcagcagcccttcccccctccacattgaaccccacgtcggggtcgctactcaatgcagtggatggaggcccctcacatttcttggcctcagccacagctgcagcacgtgcccagaggtcagaagtgagatataaccagagatcccagacctcccggaccagatcctgcctcaaacgaaatgccagctccagctcccacagctctacggaaggcctccgggaagtaaagcggaggagggggccagcctcatcccactgccagctggcccacagttcctcaaacacagtgagtgaggacggacctcaggctgtctcttcgggtcaccgctgtgaaaacaaggcaggtacagcaccagggcagacactcgcccccaggggtggctcccccagatcccaggcctctaggccccgcatcaacagtgcactgcacgttgaggacaaggccatctcggactgcagaccctcacggccttcccacactttgtcctcacttgcaacaggggcttcgggtgggcctcccgtttctaaagcacccactatggatgcacagcaggacagacccaagtcccaagactgcctgggcctactggcccccctagcatctgctgcagaggtcttctctacagctcccgtgtctgggaagaagcacagaccaccaggacccctgttctcctcctcagatccccttcctgccacctcttcccactccggggactcagcccaggacacctcgctgattcctgcccccttcacacctgcaagcagggatgccggcatcagaagaatgtttcgtgttcgaaattgtttgaggggtttgggtttatttttgttggttttttcttttttttttttgcttacgtgggcatccttcagcttttaataatctgaaaaattctattt

SEQ ID NO: 1884 - DNA, 2873 bp, Homo sapiens
gacgcgcacactggccactctgacgatgccgaaagccctccatgtctacccgctacgccgcattcgcagacaggcgggggacatcgcggccgcggcaagctagagatgccgcctgctcgagcaaccttccacctgcagggccggccagttctactcttccaggatcactctcgtctcacccttctccccaaaatgtcagagcaagaaccaggaagggagaggctctttctggaagccacaggcataacgttactgaacaacgaggacaaagtagggtcccatttaaactgagagtcagcgagggaaagaacagatcctatacataccaagcatctgctatgtgctagtcacttcacacacacacacaccccacacacacctcacacacacacacacaccacacacatcccacccacccactcacatacatacatacacaccacacacatacatacacaccacacacacacatacaccacacacacacatcacacatactcccccacccccgcacacacatacaccacagacatacacacgagcctgcaatgatggaagcaaaacagaacgtttggagatattcactgccgtttacaaggccacagtaagcagtaagcagattttctactcccctctagcagagaacatggtaggaaaagctagacattgtagacagcagtaagaacctaacagtcaacagtggacaatggattctgaaactgagatcctatactgcattcacacacgttaaggggcagggcgctgggaaaaccccatctcagtctggggttcaaagagtggaaaagctaccctagtccaactgctcggaggccaggtcaggcccctgaaggtcactggaggaggaggttggaaaaagtgcagatatgcactccaaaaggagaggttccacggtggtcatgaccacaaaattccaatatgtttaagtcgatcaaacaaaagcagagttaaggctggttctgagagcagccaagagcagttttcaacacaacacaaagggtaacacaaggctttcttttctcacagtccgggctgaccacatatggcctggctactgcaagaaacattgaaggtgttagcgcttttgactctaactgcgcacccctcagagaagatgtcacatagtgaacatcgcaaggcacagaatgggaaatggaagcacagaatcaaaccctgagattcggggagaaaccaaagtgtggagaaattatgtaacttatccaaagtccagagcaggttactgactgggagaacttggcgttccttccagactccagatatgagacttttctgcggtctgacacagtggcttcttccacctctgcagtcaaccccacaaaggtggctcgagtgttcctctgcctccctgcccagcagctcccagcctggatggtgaactcctttgcctgaacatcccacgcaccctgccatctcctgggctagaacaacaggttgtgcaggacagagggcttccctgccacactcccctctattacaaaatgccagaggtcccagttcgaagcagctgttcctggatgtgggaagagcaagagagaaatgatctaatgatggacaaggaatcttgaaaagccagaccttcactgaatggctgacaggacacacattttgctttactagaacaagaacagaatctttgaaaaggcataaagccagtggtcaagaagtaactgacagcaaaggcaaaagagatgaaggctaagctggaaagtggagatgaagcctgatgatatactcagtggaagcccagaaagtctcaggaatgagaactaccattcacctctggaaatgggaaacgtagagtccaaaacaagaagattaatcggaagtgtcaggaatagctgggccccatttcatcccgggtcctctccccagctccatcagctaggtgacttcttttctggaagcagggacacaggtctctggaccaggatcagcagacacagccatgcctttagtcccagaaagatttggtggatcacatgctagctgccatatgaatcccaccaccatccccagcagctcctggagcagcacctccaacagaactgaaagaggctcctgcagagctgagaagagacccaaaagcatgagccccacaacaagcaaccaggcgtccatccacagaggccacagttaaatgctcactcacacagggctcctgtcagcttctgagcaatgtccttttgaaagtgggaagaccccagacagctaagcgaagcctctaaggtgaaagatgtggccaaattgcatgggacaaacacttcctatgcctcacctccctgggccctgtccacagctctattgagccgcatctgatgggacccctatgtcctgcagcacagcctcctcctaccagggctctgaagagtctgtacacccagcacctgcagggatgtagcccagatgcaaccctggcccatggtgacgggcactgacaggagatacatcctccaccccaaccccttcccagcactgtctggaggactgggagctcgtgacacaagccagccccacatgtggaaccattggcttcactcaattctaggcactgcccaccgcgggcaccccgcctcaccctgcacccaggttccctccttccagcctccctccaccaggctggcacaccctcctacaatagaagcacacaaggctttgccataggctctgctttccgggtaagctggacacaaacaaacagaaaaattaaaagtaaatcatttacaaatgggagagaagaaacgatacacaaaaagtttttaaaaattaatatctacaaatgagatagacgtatctatgaaataagaatattatgccattaaaaaaagaatactcac

SEQ ID NO: 1885 - DNA, 1799 bp, Homo sapiens
agtcacatagctgcgtggtacgtgactggaggtgtatccttgtcctcgtctgaatcacgctgatgtggccccaaccccacctccctccccaccccatgatgtcagaaaaaaccagacagaacaaattggctgaggccaagaaaaagtttacagactatcgtcagtggaacattgctggtgttggtaccggagcaactgacaccaaaaagaagaaaataaatcatggcactaaccctgagacaaccacttcggggggctgccactcgcctgaggatacacaacagaaccgagcgcagctgaaagaagaaaagaagatgcgggagcaggaagatgtggagacaggaggagaggctgcaggagcaggagaagcagatgtgggagcaggaggagaagatgcgggatcaggagcagaagatgtgggaccaggaggagaggatgtgggagcaggacgagaggctgcggcagaaggaggagagaatgcgggagcagaagatgtggcagcaggtggagaagatgcgggaggagaagaagacgcaggagcaggagaagaagacatgggaccaggagaagatgcgagaggaggagagcatgcgggagcgggagaagaagatgcgggaggaggaggagatgatgcgggagcaggaggagaagatgcaggagcaggaagaaaagatgcaggagcaggaggaggagatgtgggagcaggaggagaagatgtgggagcaggaagagaagatgtgggagcagcagaggctaccggaacagaaggagaggctgtgggaacacgagaagatgcaggagcaggagaagatatgggagcaggaggagaagatgcgggaccaggaggagaagatgcggggccaggaggagaagatgcgggggcaggaggagaagatgcgggggcaggaggagaagatgtgggggcaggaggagaagatgtgggggcaggaggagaagatgtggggccaggaggagaagatgtgggggcaggaggagaagatgtggggccaggaggagaagatgcggggggcaggaggagaagatgcgggggcaggaggagaagatgcggggccaggaggagaagatgcgggggcaggaggaggagatgcggggggcaggaggagaagatgcggggggcaggaggagaagatgcgggggacaggaggagaagatgcgggggccaggaggagaagatgcgggagcaggaggagaagatgcgggagcaggaggagaagatgcagggccaggaggagaagatgcgggagcaggaggagaagatgcggggccaggaggagaagatgcgggagcaggaggagaagatgcggggccaggaggagaagatgtggggccaggaggagaagatgtgggggcaggaggagaagatgtgggggcaggaggagatgatgcgagagaaggaggagaggatatgagatcagaaagagaagatgcaggagaggctgccagagcacgaggagcggtgctcagagccctgcctccctccctccaaagttctttgtaatatgagccacactggcagtgtggagcctgcaggaggagaggctggggagggttctccgcaggacaaccccactgcacaggagatcatgcagctgttttgtgggatgaagaacgcccagcagtgcccaggattaggcagtacctcctgcatcccattcttctaccgaggagacaagagaaagatgaagatcatcaatatctaaaagttggcactgtcaacaaggcctacagaagcataagccgccatgtcactgtgtgaatatagtctgagcacaaacttg

SEQ ID NO: 1886 - DNA, 2540 bp, Homo sapiens
ataatgccagcctatgagcttcctggtagggacaccagctgtgaagtcctcataacagccaacttcttgcaactttcaagctgacggcctcaggaatgggaggaaggactcctccactggagaactgatagcagtattctggtagaggaggcatcaagagtcctgggaggccggtggtaatcatgtaggcaccatggaaactgctatgtgcgtttgctgtccatgttgtacatggcagagatgttgtcctcagttatgctcctgtctgtgctgcaagttcatcttcacctcagagcggaactgcacctgcttcccctgcccttacaaagatgagcggaactgccagttctgccactgcacctgttctgagagccccaactgccattggtgttgctgctcttgggccaatgatcccaactgtaagtgctgctgcacagccagcagcaatctcaactgctactactatgagagccgctgctgccgcaataccatcatcactttccacaagggccgcctcaggagcatccatacctcctccaagactgccctgcgcactgggagcagcgatacccaggtggatgaagtaaagtcaataccagccaacagtcacctggtgaaccacctcaattgccccatgtgcagccggctgcgcctgcactcattcatgctgccctgcaaccacagcctgtgcgagaagtgcctgcggcagctgcagaagcacgccgaggtcaccgagaacttcttcatcctcatctgcccagtgtgcgaccgctcgcactgcatgccctacagcaacaagatgcagctgcccgagaactacctgcacgggcgtctcaccaagcgctacatgcaggagcacggctacctcaagtggcgctttgaccgctcctccgggcccatcctctgccaggtctgccgcaacaggcgcatcgcttacaagcgctgcatcacctgccgcctcaacctgtgcaacgactgcctcaaggccttccactcggatgtggccatgcaagaccacgtctttgtggacaccagcgccgaggaacaggacgagaagatctgcatccaccacccatccagccgcatcatcgagtactgccgcaatgacaacaaattgctctgcaccttctgcaagttctctttccacaatggccacgacaccattagcctcatcgacgcctgctccgagagggccgcctcactcttcagcgccatcgccaagttcaaagcagtccgatatgaaattgataatgacctaatggaattcaacatcttaaaaaacagctttaaagctgacaaggaggcaaagcgaaaagagatcagaaatggctttctcaagttgcgcagcattcttcaggagaaagagaagatcatcatggagcagatagagaatctagaagtgtccaggcagaaggaaattgaaaaatatgtgtatgttacaaccatgaaagtgaacgagatggatggtctgatcgcctactccaaggaagccctgaaggagactggccaggtggcattcctgcagtcagccaagatcctggtggaccagatcgaggacggcatccagaccacctacaggcctgacccacagctccggctgcactcaataaactacgtgcccttggactttgttgagctttccagtgccatccatgagctcttccccacagggcccaagaaggtacgctcctcaggggactccctgccctccccctaccccgtgcactcagaaacaatgactgccaggaaggtcactttcagcacccacagcctcggcaaccagcacatataccagcgaagctcctccatgttgtccttcagcaacactgacaagaaggccaaggtgggtctggaggcctgtgggagagcccagtcagccacccccgccaaacccacagacggcctctacacctactggagtgctggagcagacagccagtctgtacagaacagcagcagcttccacaactggtactcattcaacgatggctctgtgaagaccccaggcccaattgttatctaccagactctggtgtacccaagagctgccaaggtttactggacatgtccagcagaagacgtggactcttttgagatggaattctacgaagtcattacttctcctcctaacaacgtacaaatggagctctgtggacaaattcgggacataatgcagcaaaatctggagctgcacaacctgacccccaacacagaatacgtgtttaaagttagagccatcaatgataatggtcctgggcaatggagtgatatctgcaaggtggtaacaccagatggacatgggaagaaccgagctaagtgaggcctgctgaagaatatccagtctgccctccagaagcacttctgagccccttcagagcaggaaacaacctcagactcatcacaaagtagacatatacacacacatatatgtatgtatatttttctcaccacattcttcaaggaggttgtagacaaatgtttccatgacctctcagctttccaacaggaatcttgtaagagctaataaaaggaaatacctg

SEQ ID NO: 1887 - DNA, 3049 bp, Homo sapiens
attttgtgtgaggaacgttgacgctacctacctctggcctggcctctacccactgctgccctggccgctaccaacatgagcctcccggagagtcctcacagccccgctactctcgactatgctctggaagacccgcaccagggccagaggtcccgagaaaagagcaaggcgacagaggtaatggcagatatgtttgatggccgcttggagccaatcgtgttcccaccgccccggcttccagaggagggggtcgcgccccaggatcccgcagatggtggccatactttccacatcttggtcgatgcgggtcgcagtcatggagccatcaaagcggggcaggaagtgactccaccacccgcggagggcctagaagcggcctctgcctcgctgacaactgacggcagcctcaaaaatggctttccgggtgaagagacgcacggcctaggtggggagaaggctctagaaacctgtggggcagggaggtcggagtctgaagtgattgcagaggggaaggccgaggacgtgaagcctgaggagtgtgccatgttctcagccccagtggatgagaagccaggaggcgaagaaatggacgtggcggaagaaaacagagcaatagatgaggtaaacagggaggcagggcctgggcccgggcccgggcccctgaacgtgggtctccacctgaaccccctggagtccatccagctggaactggactccgtgaatgcagaggctgacagggcgctcctgcaggtggagcgcaggtttgggcagattcatgaatactacctggagcagaggaatgacatcattcgcaatatcccgggcttctgggtcactgctttccgccaccacccacagctgtctgccatgattagaggccaagatgccgagatgttaagctacttaaccaatttggaagtgaaggagctcagacaccctaggacaggctgcaagtttaagttcttctttcaaagaaacccttacttcagaaacaagctgattgtaaaggtgtatgaggtcagatccttcggccaagtggtgtctttttccactctaatcatgtggcgccggggccatggaccccagtccttcattcataggaaccgacatgtcatctgcagcttcttcacctggttttcagaccacagccttccagagtccgacaggattgctcagattattaaagaggacctctggtcaaatccactgcagtactacctgttgggtgaagacgcccatagagctagacgtcgcctggtaagggagccagtggagatccccaggccctttgggttccagtgtggttaacctttgcctttggaattactcctgcagaaggttgcctgccaccaccagctggacctgagcttgggcaacagcattaggtatgccctttactttttttgttctgactttcctgtaccctctgtttaaactttccgttctctcaacctgaagattgagaccttggtggctgtgctgctcccctttcacctggtcgtcttgctattctgcattaacatcacatgctcccagccgatggatcacatccttctaagcgaagcgaatgatgctgtaggttacactgtatttacctttgtttggactcggtttgttcccaggacctctggtctggctcctcctacttggatttctagctgtgtctaagaacctattcagctcaccctgctctgcatctgacagtacaggtgcatggcctgtggacaattgctgggcattaatgaagtcaagggagaacagcagggggcaagttggtctgtgtgaattatgggaccccattacttttcctgagactggtcacctattgctgcctgctactggctattcccaagtactgctacttgggcagctccctgctgagtgaacatatcccagaccattgccagctccactctctggtttctaataaacagggatctccagaacactggtggtggacacagctttcctgtcagcacacaaaagacctgttcctcttccaaaagacctctctttaccaccaccaccctcatcactcagaaaccctactgtttgttagacaggtggttgaggggacatgtcagaccctatcctcatggcaaggttaatatgttggtgttcttgacaagtaccaggctttctcagccacaaccagtggattcattcaaaatctaggtacctttatttgcctcccttcctgaacctaatgaagtgccagagtgagtgtacactttcttttctctcatctctcataaatctcttctgtcttcctttaaaaaaaacaaaagtagtagttcagaaacatccgcagaagcaggctttttagtttcttggctctctttgtcatgtccagaggcaggctgttctgtaaaatagactgccagacctcttattgcccattctcctttcttctcagcccctcacccctctttagcaattcctagagggtttaaaggactacagagctgtatggaatgaaaggtgatttctagttcagagtggatagaagaactaaagagattgtgatgggtgctctaggcagggaaaactgaacaaaaaggcagaaatgattcaggggaaaatcgggcctagaatttacactgggttgactagttatgatgggaagagaagtacttttttttagtatgcacgtagaagaatagaagatggttggagtgttaaatatgttccctagagaagggttctttgaagaaacactgcaattttgggtgttctctttcttgtttgcatatggccttacttatgtggaagattaatactgtgttataatattttctctttctgtttactgggaagattcagctgtacagattttcttttactttcaaatagaaatatttggaataatatcagtctttcttttttgtacattatgtggatatggatattcatggcagttttcagcctgttcttgtttctgttaaaaccgtatctttaacattttaatttgaataacttggtcttatctgatgcggaagactggaaactattgtgttcatgggtaaataaactacaaaatatttatggc

SEQ ID NO: 1888 - DNA, 2113 bp, Homo sapiens
agctcgctgagccctcgaggcgggcggcggcaggaaggtggtgcctcggcccgtcgtgccctgtcgcctagctccagccgcgatgctgaccgcaaaggctgcccttctgaggcctggaatgtgaggcccagagcgtcggacccaactcagcctcgcccggatggggaaatcgaggcagggagcgggggtgggcgtgcgtggggatcccttgaaggcagcctcggaaaccccacggagcctgcgctgcctgggccctgtgtgactccagactaaggaggatgagctgctgtccctggaagagaacggatggagggaagcagctcctacgaagttccccctgtggctgctgctgatctggaggagggtgctggtcagactaggagcttgcctgccaccccctccaaagatgttcacaagggtgttggaggcatcatcttttcctcctcaccgattttagacttgagtgaaagtggtctgtgccgtttggaggaggtctttagaatccccagccttcaacaattgcatctgcaaaggaatgccctgtgtgtgattcctcaagatttctttcagttgcttccgaacctgacttggctggacctccggtacaatagaattaaagcgcttccttctgggattggagctcaccagcatttgaaaactttgcttttagaaagaaatcctatcaaaatgttacctgtggagctggggagcgtaaccacgctgaaagcactgaacctaagacactgccctctggaattccctcctcagctcgttgtgcagaagggattggtggctatccagcgcttcctgcggatgtgggcagtagaacactctctccccagaaatccaacttctcaagaggctccaccggttagagagatgaccctccgtgacctcccgagcccaggactggagttgtctggagaccacgcgtctaaccaaggagctgtgaacgctcaggacccagagggggctgtgatgaaagagaaggccagctttctcccgcctgtggaaaagccagacctgagtgaactcaggaagtctgcggactcctcagagaactggcccagcgaggaggagatcaggcgcttttggaagctgaggcaggagattgttgagcacgtgaaggcagacgttctgggagatcagctcttgacgagggaattacctccaaatctcaaggcggccttgaacattgagaaagaactaccaaagccaagacacgttttcagaaggaagacagcctcctccaggagcatcttacccgacctcttgtcaccgtaccaaatggcgatccgagcaaaaagactggaagagagccgagcggcggcgctccgagagctccaggagaagcaggctctgatggagcagcagagacgagagaaaagggcactgcaggagtggagagagcgagcccagaggatgaggaagaggaaggaagagctcagcaaactcctgcctccgcggaggagcatggtggcatcaaagattccctctgccacagatctgatagataacaggaaagtaccactgaatccgcctggaaaaatgaaaccaagcaaagagaaatcgccacaagcaagtaaagaaatgagtgccctgcaggagagaaatttagaagagaagataaaacagcacgtcctccaaatgcgtgagcaaagaagattccatggccaggccccactggaggagatgaggaaggctgccgaggatctggaaattgccacagagctacaggatgaagtattgaagctaaaattgggattaaccttgaacaaagatcgtcgacgggcggccctcactggaaacctttcgcttggcctgccggcagcacagcctcaaaatacattttttaacacaaaatatggagaatcaggaaatgttcgcagataccagtgacaccaggtggctggactgatggagacgtcttcagacaggagccgctcagtcttctttcccgggcgtcgcctcctgtgtggtgccggaagagcgccaggttcagtgttaccctgagggctgatttcgcgcagcctgttgttttccttagacaggtccacgtccctctcctgaggctgtggaagatttcagccgtattaaaagaaaggacactgtg

SEQ ID NO: 1889 - DNA, 1720 bp, Homo sapiens
aagggagctggatgccgggagggactggagccagcaaggccagagtgaaagcaaaatgacaactactcagaaacacgatctcttcacgccggagcctcactatgtccctggctatgccggcttctttccgcagctgcgctaccaggtggggaacacctatgggcgtaccacggggcagctgctcacagaccccagtgtgcagaagagcccctgctctgtgctgtcccccatgtccaaacccaagttcattgaggacttcagccagtccaagcccccgagggttccctgccaagacctgacggagccctacatcccccactacaccagtctgaagccctctaagaactttgagattctgggccagctcccacccttggaggtggacgcccaggagccgccaggggtagagaacatacccagacagattctgctgcctgcaggcttcacgcccgacaccccgcaccctccgtgcccaccaggcaggaagggagactccagagacttgggacacccagtatacggggaagaggcctggaagagcgccactcctgtttgcgaggcccccaggcagcaccagctgtaccactgccagagagatgagtacccaccccccgcccgccgccagcaggagacgctagatgtgggcagcttccagcggctgccgcagctggaccaccctaacctaatccaacgcaaggccatctcagaacaggctagcggcctggggggacctcctctgcctcccagctgcttccaggagcccagcttttcccaagacgaggcggtgccttgcctgcctgttcccatttggccacatcagacagtcgccaacgttcagggaacgaaagggagccttgcctggcttccctgacacgtctgagggcaggtgggtgtgcccaggggaaggctaagggggcttggggtagcccgtacatctgcctacccccaggctatgctggcttcattccccgtttcacctgggtaatggggttgaattaccgagacggcgtcatgcaagccatggacgaattcgacaagagccaggtaggaaagcgccatccagggcctgctcccagctcacacacacacttcctctcctgcctggcagcttccctggagggtgccttgaaggccaggttccctgagaagcctgaggagggggctctgcctggctctctcctgtccccggaggtgccgccccaacccctctctcctgagtcttgcttggatccctgcactcaagttttggagtcgggggtagggggatgcagaaggctgggagcattagcagctttcccacggagtgccggccctccggccaggcccccactgggacaacttgactatctgtttgcctgccggggagggagcttgttagcaccttcctgtctccccagttcctgtttagaaacccccactgtgacctgggcgagaagctgcctggaacacactggcccagcaaccacatctacagcagccaaggcctgatccccttctacatggggttcatccccgccatgcaggacaactacgccctgacattcggcaacagcacccggagggcctactggaaggaatgggcaaagcgaaaccacacactatgaaaatgctttaatggtggtgtctgtacagcatggatgtggacagggaaaacagcaagtgcacacagtgggacaggccacaggacaggctgggagtgaataaagagttcacactgctt

SEQ ID NO: 1890 - DNA, 1958 bp, Homo sapiens
tggttgaaggtactgaaaatgtcttcacagatgggtctagtaatggtaaagcttcttattccagcttgaaaggtaaagtttttcagaagccctgtacttcggctcaaaaagcaagagcttgtagctgtaagtgaggtattgactgcttttgatatgcctattaatgtgatttctgattctttgtatgtggttcattccacaccattagctgaaaatgctcagttgccatttcatacagatgaacaactgatgactttatttacccaattgcaaacagcagttagaaatagaatacaccctttttacatcactcacactagggctcatacacctcttccaggacctttaactgaagggaatcaaatggctgatggcctagttgctactacaatatctaatgccagacactttcacaatttaacccatgttaatgcctctggtctcaaatgcagatacagcattacctggaaagaagctaaagctattattcagtgatgcccaacttgccaaatggtgcattcctcatcttttataggaggagttaatcctcaaggattggaacctaattctctttggcaaatggatgtcacacatgttccctcgtttgggagactagcttatgtacatgtatgtgtggacaccttttctcagtctgactgggttacatgccaaacaggagagtcttctgcctgtgttaaacgtcaccttttgcagtgttttgcagtgatgggcattccagcttctattaaaacagataatgccccaggctatactagccaagctctagctacatttttctccatatggaatattaaacacattattggcattccatacaattctcaaggatgagccacagtggaaagaatgaatctgtccctgaaacagcagttgcaaaagcaaaaagggggaaacagggactacaggacaccccatatgcaactgaatctagaattattgactttaaattttttgagcctgcctaaaggccagatgctatcagcagctgaacaatatctacagaaaccagctgcaaagacagaagcagaacaactggtttggtggagagatctgataacaaaaagttgggaaataggtaaaataataacttggggtagaggttatgcttgtgtttccccaggatgaaatcaacagccaatctgggtgccattgagacatctaaagccttactatgagccagatacccaggaagaggttttgggaggatcccaaagactccctggttgcagccatgtcaagactgatgctgaggaggaccccaactgtcacgagcaacaactgcctggggacagatcaagaagctgtcacagatggcagagaaaaacctgagaaaagcgggacaaccagtcacaatgagtaatttaatgatagctatgacagtggtgatcaccattgccatgagtattccttcaacaagggctgacacagagaacaattacacttattgggcatatttatcaatcttggctggcaataatgcctggatgtgatcactctatgacacagttacacatgctttctggtctcagtatttaccataataatctgctcctataattgaggcatactgccctcaaaaaactatttgtaaacaggattggacctggtcagaaaaaatgaacgtacttgtttgggaagattgcattgcagaacaggcagaggtgctgcacaacgattcctatggagtcattattgattgttcccctaaggggatgtttagcttgaattgcacctctcagtctgcctgccatggccacactatgttcagctggtctgaacaaaatggtcagatggtagaaatgataagaagtatggcaagagttcctattatctggaaacatggtggtatagtggcacctcaacctcaaatgatatggcctgctgtaggagctaaacataaggatttgtggaaactattaatggctcttaataagatc

SEQ ID NO: 1891 - DNA, 2677 bp, Homo sapiens
attctaaatgcaaagctagactgagcaagggaagtgacaggaaatggagctggggagacaaaaatgtggataacaacaaaagaatttcaacaggtaaaaaaatgagtcaaacatctctcaaacagaaaaagaatgagcctggaatgaggtcctcaaaagagagtctagaagcagaaaaaagaaaggaatctgacaaaacaggagttcgtctgagcaatcagggatcacaagaatcatcactgcggaagacagactctcgagggtaccttgtgcgcagtcaatggtctagaatatcccggagcccatccaccaaggctccatccatagatgagcctagaagcaggaacaccagtgctaagctccccagcagctccacgagctcccggactccatccacctccccaagcctgcatgactcctcaccgccgccgctgtccgggcagccctcgctccagccacccgcgtcgccccagctgccccggtcgctggactcgcggcctcccacgcccccagagcccgatcctggctcccggcgcagcaccaaaatgcaagagaatccggaggcctgggcccaaggcatcgtgcgggaaatccgccagacccgggactcgcagccgctggaatattcgcgcacgtcccccaccgagtggaagtcctccagccagcgcagggggatctaccccgcctccacccagctggaccgcaactctctgtccgagcagcagcagcagcagcgggaggacgaggacgactacgaggctgcctactgggcatccatgaggacgttctacgagaagaacccgagctgctcgcgcccctggccgcccaaacccaagaacgccatcaccattgctctctcatcctgcgcgctcttcaacatggtggacggcaggaaaatctacgagcaagagggtctggaaaagtacatggagtatcagctcaccaatgagaacgtcatcctgaccccgggcccggcgttccgcttcgtcaaggcactacagtatgtcaatgctagactccgtgatctatatcctgatgaacaggacttatttgatattgtactgatgactaataaccatgcccaagtgggagtgcggcttataaacagcgtcaatcactacggcttactgattgaccgcttctgtctgaccgggggaaaagaccccattggctatttgaaggcatatcttaccaacttgtatattgctgcagattctgaaaaagtgcaagaggcaatacaagaaggtattgcctctgcgacaatgtttgatggagccaaagacatggcttactgtgacactcagctccgtgtagcctttgatggggatgctgtcctcttctctgatgagtctgaacattttaccaaggagcatgggctcgacaaattcttccagtatgatacattatgtgaaagtaagcctcttgctcagggtcccctaaaaggctttctggaagatttaggcagactgcaaaagaagttctatgccaaaaatgaacggttactttgtcctatcaggacctacctggttacagctaggagtgcagccagttcaggcgcccgtgtgctgaagacccttcgacgctggggtctagagatagacgaagctcttttccttgctggagcccccaaaagtcccatcttggtgaagatccggccccacatcttctttgatgaccacatgttccacattgaaggggcacagaggttaggttccatcgcagcttatggctttaataaaaaattcagtagttaggggcagggaggagaaataaagtggtgatagtctggtgttacagaagccacttcttttggctctctaggataattagataggtatttcagaaaattggaccttaaaactttgcttctttggaaaggttttctcctgattttttggaaaaccttttgaaccctcaagttaccatcaaactacttctctttgaactaccaatactgttgaatgccattacacctatctctgtgtaagtcataatgatgactctttaggataagtttagaacttgaatatttgcatgcttaaggcactgttttagaagcttacttagttttataaacactgctcatttttggatgtttgtagataacaatgaattgttacccatcagcattgtagaatagtgtcttcaaaggtagagggagtatggttaagcacactcttgaaaactggagctttgtattctgtgactgctatggctagctttgtaaccaaagcaaaatgagaatttcactctacctgcatgagtataacaattttgatactgctcatttagaaataaatcatctggttgttcctccagggtactttctaagataagccttaaacagaaacccctaagaaaggttctctgaaaattatttggtgggttaaatgcctctgatccacagagtttcatatttgaagtctccggctttgggcctggcaggctggcacatccatatttgtatggaaaaaaaaaaaaagaccctacgctaccacttcaaaaagtgacatgaagtgtagtatcctggcccttcattgtcattctctcatgatttttgttttgttttcaacaaaaattggttggtcattaaatatatcatatgttaggcacagtgacctggttattttcacatgttacttcattttcttatcaaattaaatgtttgtgacatagt

SEQ ID NO: 1892 - DNA, 1634 bp, Homo sapiens
gacagaaaaaaaaatctctctttgtcttgagggggctgttgagtggtcgcggacctgggctctgtgcgttgggaaagggaagtggaggtctctgaaagaagatgaatttggctgagatttgtgataatgcaaagaaaggaagagaatatgcccttcttggaaattacgactcatcaatggtatattaccagggggtgatgcagcagattcagagacattgccagtcagtcagagatccagctatcaaaggcaaatggcaacaggttcggcaggaattattggaggaatatgaacaagttaaaagtattgtcagcactttagaaagttttaaaattgacaagcctccagatttccctgtgtcctgtcaagatgaaccatttagagatcctgctgtttggccaccccctgttcctgcagaacacagagctccacctcagatcaggcgtcccaatcgagaagtaagacctctgaggaaagaaatggcaggagtaggagcccggggacctgtaggccgagcacatcctatatcaaagagtgaaaagccttctacaagtagggacaaggactatagagcaagagggagagatgacaagggaaggaagaatatgcaagatggtgcaagtgatggtgaaatgccaaaatttgatggtgctggttatgataaggatctggtggaagcccttgaaagagacattgtatccaggaatcctagcattcattgggatgacatagcagatctggaagaagctaagaagttgctaagggaagctgttgttcttccaatgtggatgcctgactttttcaaagggattagaaggccatggaagggtgtactgatggttggacccccaggcactggtaaaactatgctagctaaagctgttgccactgaatgtggtacaacattcttcaacgtttcgccttctacactgacatctaaatacagaggtgaatctgagaagttagttcgtctgttgtttgagatggctagattttatgcccctaccacgatcttcattgatgagatagattctatctgcagtcgaagaggaacctctgatgaacatgaggcaagtcgcagggtcaagtctgaactgctcattcagatggatggagttggaggagctttagaaaatgatgatccttccaaaatggttatggtattggctgctactaatttcccgtgggacattgatgaagctttgcgaagaaggttagaaaaaaggatatatatacctctcccaacagcaaaaggaagagctgagcttctgaagatcaaccttcgtgaggtcgaattagatcctgatattcaactggaagatatagccgagaagattgagggctattctggtgctgacatcactaatgtttgcagggatgcctctttaatggcaatgagacggcgtatcaatggcttaagtccagaagaaatccgtgcactttctaaagaggaacttcagatgcctgttaccaaaggagactttgaattggccctaaagaaaattgctaagtctgtctctgctgcagacttggagaagtatgaaaaatggatggttgaatttggatctgcttgaatttctgtcagctctttaatttctggtatttttgttgataaaatacgaagaaattcctgc

SEQ ID NO: 1893 - DNA, 1910 bp, Homo sapiens
cggcccacgcgggtctcccggcaacgggcgggggcggggccgcgccttccactggtgcccagaagtgcgagcggcagcggcgcggccgcgattgttcctgcgcttcggggctgcccgccgcgtccccgcgcgccgccgacccgcgcccgctggcttccgcgcctctgccggggagcggcccgcggatgcgcaccccgccagctctcgggagccagggcagcgaggtcacaggccccacctttgctgatggcgagctcatccccagggaacccggcttttttcccgaggacgaggaggaggctatgacgctggcgccacctgagggcccccaggagttgtacacagacagccccatggagagcactcagagcctggaggggtctgtcgggagtcctgccgagaaggacgggggacttgggggcctgtttctgccagaagacaagtccctggtccacactccatccatgacgacctcagacctttctacacactccaccacctcgctcatcagcaatgaggagcagtttgaagactatggggagggtgacgatgtggactgtgcccccagcagcccttgccccgatgatgagaccaggaccaacgtctactcggacctggggtcttcggtgtcttccagtgcggggcagacgcctaggaaaatgcggcacgtgtacaacagcgaattgctagatgtttactgctctcaatgctgcaagaaaatcaacctgctcaatgacttggaagcccgactgaaaaacctgaaggccaacagccccaaccgaaagatctccagcacggcctttggacggcagctcatgcacagcagcaacttcagcagcagcaatggcagcaccgaagacctgttccgggacagcattgactcttgcgacaatgacatcacagagaaggtaagcttcctggaaaagaaggtgacagagctggagaatgacagcctgaccaatggggacctgaagagcaagctgaagcaagagaacacacagctggtgcacagggtgcatgagctggaggagatggtgaaggatcaggagaccacggccgagcaggctctggaggaggaggcgcggcgccaccgcgaggcctacggcaagctggagagggagaaggctatcgaggtggagctgctcaatgccagggtgcagcagttggaggaagaaaatacagagcttagaacaacagtgactcggctcaagtctcaaacagagaaactggatgaggagcggcagcgcatgtctgaccgtctggaggacaccagcctgcggctcaaagatgagatggacctgtacaagcgcatgatggacaagctgcgacagaaccgccttgagttccagaaggagcgggaggcgacgcaggagctcatcgaggacttgcggaaggagctggagcacctgcagatgtacaagctggactgcgggcggccaggcaggggccgcagtgcctcctctggcctaggcgagttcaatgccagggcccgcgaggtggagctcgagcacgaggtcaagcggctcaagcaggagaattataagctgcgggatcagaacgacgacttgaatgggcagattttgagcctcagcctctacgaagcaaaaaacctctttgctgcccagactaaagcccagtctctggctgcagagatagacaccgcctcgcgcgatgagctaatggaagccctgaaggagcaggaggagatcaacttccggctgaggcagtacatggacaagattatcctcgccatcctggaccacaatccctccatcctcgagatcaaacactaaggcacggggctggctgcagagcagccttaggaccctgggaccaagggcagaccctgcccaaggatgcaggcctaagccgggcctcacactcacactgtaaatgtctctctggccacc

SEQ ID NO: 1894 - DNA, 2326 bp, Homo sapiens
atgtttttattcatggagcaggagctggcaggaaggacaaagttggacacctgcacaaactgagaaaattactgtggtataaaatgaatggcctttgacaaactgtagtggcatgtgatcctggacctgagttggcggagtgtagacctgggactcagtcactcctagtaggcagagaagaggcccattggaactacttcagtttgatcacgggcagtcaaatccaacttactacatcaggctggctaatcgtgatctagttctgaggaagaagcccccagggacactccttccatctgcccatgccatagagagggagttcaggattatgaaagcccttgcaaatgctggagtacctgtccctaacgttcttgatctctgtgaagattcaaggggactatattccacgccaggtacgaacctgggttaagcagtatcgagcttccgaaactagcaccatcccagccatggagaggctgatcgaatggctgcccctccatcttccccgtcagcagaggaccacagtggtgcacggggacttcaggctcgacaacctggtgtttcatccagaagagccagaggtgcttgctgtccttgactgggaactttctaccttgggcgacccccttgctgatgtggcctacagctgcctggctcattacctgccatccagttttcccgtgctgagaggtattaatgactgtgacttgacacagctgggaatccctgctgcagaggagtatttcaggatgtactgtctccaaatggggctccctcccactgagaactggaacttctatatggctttttcctttttccgtgtggctgcaatcctacagggagtctacaagcgatcactcacagggcaagcaagctccacatatgcggaacaaactggaaagctgaccgaatttgtgtctaacctggcgtgggatttcgcagtcaaagaagggttccgggttttcaaagagatgcccttcacaaatccgttaacaaggtcctaccacacgtgggccaggccccagtcccagtggtgccccacaggcagcaggagttatagctccgttccagaagcttccccagctcatacctcaaggggaggtctggttatctctccagagagcctctctccacctgtcagagagctgtatcaccggctgaagcacttcatggagcaacgtgtgtaccctgcagagccagagctgcagagtcaccaggcctcagcagccaggtggagcccctccccactgatcgaagacctcaaggagaaagccaaagctgaaggactttggaaccttttcctacccttagaggctgatcccgagaaaaaatacggagcaggactgaccaatgtggaatatgcacatctgtgtgagctcatgggcacgtccctgtatgcccccgaggtatgtaactgctctgcgcctgacacgggcaacatggagctgctggtgaggtatggcaccgaagcgcagaaggctcgctggctgattcctctgctggaggggaaagcccgctcctgttttgctatgaccgagccccaggttgcctcttcagatgccaccaacattgaggcttccatcagagaggaggacagcttctatgtcataaacggtcacaaatggtggatcacaggcatcctggatcctcgttgccaactctgtgtgtttatgggaaaaacagacccacatgcaccaagacaccggcagcagtctgtgctcttggttcccatggataccccagggataaaaatcatccggcctctgacggtgtatggactggaagatgcaccaggctgtttcctgccgtccttttccctttaaccatgtcccagtaagaaggctaaataaagggcagggacattgccagcagataacccagactgaggctgcagccttggatatagccatgattaaaatggtcgccccgtccatggcctcccgagtgattgatcgtgcgattcaggtgccacagggaagtccgggaagatggttgttatgggccatcaagagcaggctatcattcctggggctctcggagacaagggctgacccagggccgcctccctccactctgtgtctgccaggcctttggagcagcagggttcctgtctggcctccctggtgagcagaggggcggccacggcgggcggtggcctagagacccaggacctgggcgcctgggaaaatggaatgcaacccacattgtaaagccactggcatctgattatctccatttgaacacacagcacagaacaatcatttaaatgttattttggaaaggggttttggggacacagaagaataagtaaacacatctcggaggc

SEQ ID NO: 1895 - DNA, 2265 bp, Homo sapiens
attttcaaagcagagaaaaccagcccattgaaaatatcctgccaagtcatttggggatttgtggcagaaactccagtcttgcgtctggacatggaccatttctggggaaaactgagagctttgctaaaaggaagaggggaaagcgggggcgcgcgtatccagtggtattttcccatctggtactttgtagaagccttgctcccagtatgtacctaattaaggctccacagacctacgaggccccaagagagagtggttacatcagtgcagtcctcagcagaactgaggaaagagcttcatcgtccaaaactgaggaaatgcccagattaacacagagggttgctgtgtctcctgaataccttcttcttccccctcgccatggtgggtgtgacaagatcagctggcttccagaaggcaaggtgttcagtaatgttcacagagagaagattagctccaagttttttaaggaaagcattctaaagaaagtgttctgttcacaacaaatgaggtgggaggggtctgacgaccagaaagggacttcaagttacacctttcctggcaccagaaaaactatttggaaattccagtggagcaactgatgctagaacctaatttgtcggtgcatagtcaaaaaagtacacagaatagtaaacaagggatctttcaattatggaattgtcctcttaatgaaggaagtactatagagaagagggaattcaaaaaatcttcagtggaaactggctttaatgtaatcaatcatcctataagggtcttcactctgaaccacccattaacaattgcttcagtcgataagcaagttggtccttaccctggactgccaatgccattaggtctctgctggccctatgctgatggagactttttttaagaacagaaatgagattcatgttagttcatgttcaactatagaaaacaatgatggtgaaacattacctgctccaaattggaatttgaaacatggaaacagcagtgtggaagaaaatttcacagatgaaagtgatttatcagaaaatgaggagacaaatgatactttactcagctattttaaaaaggtggacctgaacttgaagccagaaacaataaaaaatgttgaggaacctttcaccgaggagccaaatgaagtatttccatatcctgattttctccctcctcctttcagtgctctagacttgcacaatttagccctctccaaatctgacaattggaaagtgacagtggaccctgcagaaacctctgttgaacacttgataactcgtttactggaactagaacgattacaacatatgactattcaaaaagagaggccaagactacaaacgactttctgtactccagcagttactgaacgaccctcttcctccaaagctacaccaaaagtgagacagccaaaactttgcgactctttgagtcttcagataccttgtgtagataaaagtcaagaaaaaagtaaaaacaactctggttcttgtaagcttgaacaaaatgctttaaaacggaattggagcaatgctggcaaatatagatggaattctagaccactgtctctaaaaagttcttccaccccaaaacaattgattgaaacttatgataagaatcccaaaagttctattttaagtccatgccaagaactctcattcaaacctactattggccatacaaatcaatcaatggttaaaatgatctccacaagatgtctgccatggaggtctccaatgccagtttcacctatacctctgacttttcccgaaaatcagaaggaagaaattaaggcaccgaagagaaactttgggaccaaaaagaaactttaccgacaaaatatagtgttgaatagaccattctctattcagaagctaaactgtttgtcgccttcccttattgctaaggataagtgctgctcacccattgaacaaaaataactcttttctttcatacatctcaatgtgaacacatctactctaagaagcccaactaagatatggttaattattccaagacacaggtactattaacagtcccccaaaatcaccaaacagttgcttgatgtgatatggagtagaacttgtgaaaagcactgctgagatgtctatatataaacccacaggcttctatactgacatatttcacaatctgttgcatgttgtgtttcaagtaaatggttcacttggtagactattctattcaaaaggctactcttttttcagtgattgttttccagtataattccatcaataaatggtataattg

SEQ ID NO: 1896 - DNA, 1459 bp, Homo sapiens
agcgcccgcccggccctgccgctcatggccgccccgccgcgccccgcgccatcgccccccgccccgcggcgcctcgacacgagcgacgtcctgcagcagatcatggccatcaccgaccagagcctggacgaggcacaggccagaaagcatgctctgaattgccatcggatgaagcctgctctgttcagcgtgctctgtgagatcaaggaaaagacagtggtaagcatccgtggcattcaagacgaagatccccctgacgcccagctcctgaggctggataacatgctgctggctgagggcgtgtgcaggcccgagaagagaggaagaggaggagcggtggccagggccggcacagcaacaccaggtggctgtccaaatgacaatagcattgagcactctgactacagggccaagctgtcccagatccgacagatttaccactctgagctagagaaatatgaacaggcctgtcgtgagttcaccacgcacgtcaccaacctcctccaggagcagagcaggatgaggcctgtctcccctaaggagattgagcgcatggtcggcgccattcacggcaagttcagcgccatccagatgcagttgaagcagagcacctgtgaggcagtgatgaccctgcgttcgcggctgctcgatgccaggcgcaagcggcggaatttcagcaagcaggcgacggaagtgctgaatgagtatttttactcccatctgaacaacccttaccccagcgaagaagccaaagaagagctggccaggaagggcggcctcaccatctcccaggtctctaactggtttggcaacaaaagaatccggtataaaaagaacatggggaagtttcaagaagaggctaccatttacacgggtaaaacggctgtggataccacggaagttggggtcccagggaaccacgccagctgcctgtcaacacctagctccggctcctctggacccttcccgctgcccagcgctggggacgccttcctcaccctgcggactctggcctctctccagcctcctcctgggggaggctgcctgcagtcccaggcccagggtagctggcagggggccaccccccaacctgcaactgcctcacctgctggagaccctggcagcaccaactccagtacatctaattaagtttgggggataagcaggaaagagcgctgcgtgagctgccatgtatcgccagccgttgctttgttactgaacgtgccgccgacgacctcagaaaacccagatgggtggtggtgcccatgagcccctgctcctcagccaggcccgtggcgccggctcatgtgtctgctgcgactcgagatggcctgaaacgccactcattctcccacttcagttcgtttttttgacagtaattttatggtaacgctatgaattgaattgtctgttctaggactgggcacagattttcccattaaaatttttgacttatttt

SEQ ID NO: 1897 - DNA, 2007 bp, Homo sapiens
agtaaacacttttgagtatatagactcttgctgcatgatcccactgtcaatctctatctgtgaacctgtagtcaattcagagttccccagactggcgttctgttacagagggagtttagattcaacttcagttgcttttggcatctttgtggtaaaatatttgccaccagacctgccttacaagaggtcccagaaggagtgctaaatataacctgccttacaggaggttgccaagggagtactaaatatagaaaggaaagactgttaccagccactacaaaaacacactttaagtacatggaccagtgacactataaagcaaccacacaaacaagtctgcataataactagataacaacatgatgacaggatcaaatctgcatatgtaaaaactagccttgaatataaatgggctaaatgcccaattaacactgagtaggcagttggttaaagaagcaagactcaacagtatgctgtcttcaaaagacccatcttatatgcaatgatgtccataggctcaaagtaaaagaatggagaaaaatctaccaagcaaacagaaaacagaaaaaaggaggagttgctaatctaatttcagacaaaacagactttaagccaacaaagatcaaaaaagacacagaagggcattacataatggcgaaagcctcaattcaacaagctgacctaacaatcctaaatatatatgtatccaacacaagaacacccagattataaagcaagttcttagagacctatgaaatgacttagataatcgcacaataatagtgggagaattcaaacaccccactgacaatattagattattgaggcagaaaactaacaaagatattcgggacctgaactcaatgcttgaccagatggatctaacagatatcgacagaactctctacccaaaaacgattgaatatacgttcttctcatctgcacatggcacatactctaaaatcagccatgcaataggcttaaaacagtcctcagcaaataaaacaaaaaaaaaaactgaaattataccaaccatacccttggaccacagggcaataaaagtagaaatcaagactaagaatatcactcaaaaccacacaattacatggaaattaaacaacctgctcttgaatgacttttgggtaaacaatgaaattagggcagaaatcaagaaattctttgaaaccaaagcaaacaaagctacaatataccagaatctctgggacatagctaaagcagtgttaagagggaagtttatagcactaaatgcccacaacaaaaagaaagatctcaaattaagaacttaacatcacaaaccaaccccaaagctagcagaagacaagacataaccaaaatcagagctaaactgaaggaagttgagatgtgaaaaaccatacaaaagactaatgaatccaggagttgagtctttgaaagaattaatgatatacctctagctagactaataaaaaaagagagaagttccaaataaatacaatcagaaatgacaaagggaatattaccaccaactccacagaaatacaaactctcagaaactgctgtgaacacctctatgcactcaagctagaaaacctaaaagaaatgatacattcctggaaatatacaacctcccaagattgaaccaggaagaaactgaatccctgaacagagaatatctcttgtaaagatgtcttcaaaatctcaaactccagtgctccttcttttaagaactccaggcgtgtcttaccagtaatgtccccctggagatgatactgacattttgaaaaacattcctcaaacagaaatcaccatcttcctctttcaaatcctgttcctctctagcctgtgctctccatatgctcatccattactgaagctagaaactgaataattgtcattgattcatatttagtacctgttggctttgcttcttaagataaattccaaatggggttgctgaaaaaaaaaaaaaaaaaaaaaaaaaaaaaaaaaaaaaaaaaaaaaaaaaat

SEQ ID NO: 1898 - DNA, 2510 bp, Homo sapiens
atttttttgcaatgcctttccggcagcatctcgatggatataggaacaaagtgaatttctctggcagtagcaagagtgactgtattgcacttgttgaggcatttaaaacatggaaggcttgcagacagacaggggagctgcggtacccgaaggatgaacttaattggggacggttaaattacattcaaatcaagagaattagagaggtggctgaattatatgaagaattgaagactagaatctcacagttcaacatgcatgttgattctcggcgacctgtcatggaccaagagtatatatataagcagcgattcatcctacaggttgtattggcaggtgctttctatccaaattactttacttttggacagctggatgaggagatggcggtgagggagctggctggcaaggaccccaagacaactgtcgtgttgaaacacattcctccctatggatttctttactataaacaactacagtctctctttagacagtgtggtcaagtcaaatccattgtatttgatggtgcaaaagcctttgtggaattctcacgaaatccaacagagagatttaaaacccttcctgcagtatatatggcaattaagatgtctcaactaaaagtttcacttgaactcagcgttcattctgcagaggaaattgaagggaaggtgcaaggcatgaacgtctcaaagctcaggaacacaagggtgaatgtggacttccagaagcagacggtagatcctatgcaagtctcctttaacacatcagacaggtcccagacagttacagatctccttctaactattgatgtcacagaggtggttgaagtgggacacttttggggatacaggattgatgaaaacaactcagagattctgaaaaagcttactgctgaaatcaaccaactgacgctggtgcccttgcccactcacccacatccagacttggtctgtctggcaccttttgctgattttgataaacaacgctactttagagctcaagtcctttatgtttctggaaattctgctgaggtattctttgtagattatggcaataagtctcatgtagatctacatcttttgatggagattccctgtcaatttcttgaacttcctttccaggctttggaatttaagatttgcaaaatgagaccatcagcaaagtctcttgtttgtggcaagcactggagtgacggggccagccagtggttcgcctctctggtgagcggctgcaccctccttgtgaaggtcttctctgtggtgcacagcgtcctgcacgtggatgtgtaccagtactcaggggtccaggatgccatcaacataagagacgtcctcatccagcagggctatgccgagctcacggaggagtcctacgagtccaagcaaagccatgaagttctcaagggcctcttttccaagtcagtagaaaacatgacagatggctctgtgccctttcccatgaaagacgacgagaaatatctcatccggattttgttagagagcttttctaccaataaactgggtactccaaactgtaaggcagaacttcacgggccttttaacccttatgaactaaagtgccatagtttgaccagaatatccaaattcaggtgtgtttggattgagaaggagagcatcaactctgtcattatcagtgacgcccctgaagaccttcaccagagaatgctggttgcagcttccctttccatcaatgcgactggatctacgatgctgctgagagaaacctctctgatgcctcatatccctggcctcccggctctcctcagcatgttattcgcaccggtgatagagttaaggattgatcagaatggcaagtactatactggagtcctttgtggtttggggtggaatccagctacaggggcttccatactgcccgagcacgacatggagcttgcgtttgacgttcaattcagcgtggaggatgtcgtcgaggttaatattctcagggctgctattaacaagctagtctgtgatggaccaaatggatgcaagtgtcttgggccagagagagttgcgcagcttcaagacattgcccgtcagaagcttttaggtttgttctgtcagtcaaaaccaagggagaagattgttcccaagtggcatgaaaagccctacgagtggaatcaggttgatccaaagctggtcatggagcaggccgaccgtgagagcagcagagggaagaacacctttctctaccagctccacaaactggttgtgctcggcacctgagcatgtccacaggtggcctccagcacacccctcgggaagctgtggaggctggattccaggctccctccgcagactgactttcctctgtgtctgggtgttacagtctgtgcccactgcatcctaaaggccttttctttcttcttttctctttgggtgatagtcagagagtggtgtttttgttcaggtgggaaggattggaaactctagtcttttctagaaacagaaaatcactgtattaaatattttggaaagattgttctg

SEQ ID NO: 1899 - DNA, 1733 bp, Homo sapiens
ttgttgtcccgcgggccgtgggcccggcacactggggctttgtccggccccccgccgcgacccgaggcgggggccccacatgaccgaaggggtacttcctggactctacctcggaaacttcattgatgccaaagacctggatcagctgggccgaaataagatcacacacatcatctctatccatgagtcaccccagcctctgctgcaggatatcacctaccttcgcatcccggtcgctgatacccctgaggtacccatcaaaaagcacttcaaagaatgtatcaacttcatccactgctgccgccttaatggggggaactgccttgtgcactgctttgcaggcatctctcgcagcaccacgattgtgacagcgtatgtgatgactgtgacggggctaggctggcgggacgtgcttgaagccatcaaggccaccaggcccatcgccaaccccaacccaggctttaggcagcagcttgaagagtttggctgggccagttcccagaagggtgccagacataggacctcaaaaacctctggtgcccaatgccctccgatgacttcagcaacctgcctgctggctgcacgtgtggctcttctctccgcagcgctggtgcgcgaagccaccgggcgcacagcccagcgctgtcgtctgagtccgcgggcggccgccgagcgcctgctggggccgccacctcacgttgcagcaggatggtcaccggacccaaagtaccagatctgtctgtgcttcggtgaggaggacccgggccccacacagcaccccaaggagcagctcatcatggcggacgtgcaggtgcagcttcggcctgggagctcgtcctgcactctaagtgcctcaaccgagcgcccagatgggtcctcaacccctggcaaccccgatggcatcactcaccttcaatgcagctgcctccatcctaagcgagccgcttcctcttcttgtacccgctgaaggcagcccccaacaggggggctccctactcccacccaaccctgcccacactaagcccatagacttggggcctcccccggcacatcacccaggtctgccggacggcagaggtggatcgcggccttccactcctctgtcacggggccccggaactcgagagtaggccacaccgccccccagctgggcatggggcttcggcaggaaactgaacttgatcttgaggccccagaaaggcagcaactggagcagaagcaagacttcatctcttgctgacagcccaatttgtcaatagcgctttcctcagagccagccttaacctgctgttgagtccattaaaacgtttgcttaaagtttttaccaataattagatcatcagggttgtttagtgtgggatcaagccataacaaaactgcctagcctctcaggggcctagaatttacagaaccttcctcctccctgcagctagtctctcttctttattctgggggctgggaaggatcccaaaacagggaacttggccgaaccctgggctttggatgctaaccactgaagtaccagcacctgtaggatgctgtctttgaagaaactgaggcggacctccaaatgcagccctaaggcagaggtcaacgtggaagaccagcccttctccaagccccactggtctttgcaagctgtacgttgtaggcaatctgagaactggaaagggggactacaaccagaaagttggttaccctgccatgggaataaagtagctgttttccacccc

SEQ ID NO: 1900 - DNA, 2420 bp, Homo sapiens
acctcgcggggcgcgggaaagaggcagagcgcgcgcagatttctcaaggggaagataaaatgactaagaggaagaagctgcggacctcaggagagggactctgtcctccaaaacccctaaagaacccaaggctaggagacttctatggggacccccagagttccatgttgggctgtttacatcaccctgaggagccagagggcaaattgggacctgttccctctacacagcagcacggggaggaaccaggaaaggccgtctccagctcccctgatgaggaaacaggatctccctgccggctcctccgtcaaccagaaaaggagccagctccccttcctccttcccagaactcattcgggaggtttgttccccagtttgcaaaatccaggaagacagtgacaagaaaagaagagatgaaggatgaggaccgtgggagtggggcctttagcctggaaacaatcgcagagtccagcgcccagagtccaggatgccagctgctagtggagaccctgggggtccccctccaggaggccacggagctgggggacccaacgcaggcagacagtgcccgccctgagcagagcagccagagccctgtgcaggcggtgcccggcagtggggattctcagcctgatgaccctccagacagggggacggggttgtccgcctcacagagggccagccaagaccacctgtcagaacaaggggccgatgacagcaagcctgagacagacagggttccaggtgacggtggccaaaaggaacacctaccaagcattgattctgaaggggagaagccagacagaggagccccccaggagggaggggcccaaaggacagcaggggctggcctgcctggagggccccaggaggagggagacggtgtcccctgtaccccagcatcagctcctacctcaggccctgctccaggactgggccctgcctcttggtgcctggaacccgggtctgtggcccagggctcccctgacccccagcagacccccagcaggatgggtagggaaggggaagggactcatagcagcctgggatgctcctccctcgggatggttgtcatcgcagacctgagcacagaccccactgagctggaagagagggctctggaggtggctgggcccgatgggcaggccagtgccatatcacctgcctctcccaggaggaaggccgctgatggaggccacaggagggccttgccaggctgcacctcgctcactggggaaaccacaggagaaagtggggaggcagggcaggatggcaagccccccggcgatgtcctagtgggccctacagcctccctggctctggcacctgggagcggagagtccatgatgggtgctggagattccggtcatgcatccccggacacaggtccatgtgtcaatcagaagcaggagccaggtcctgctcaagaggaagccgagttaggtggccagaacctcgaacgagacctcgaggggttccgtgtgtccccgcaagcctctgttgtgctggaacacagagaaatagcagacgaccctctccaggagcccggggctcagcagggcattccagacaccacctcagagctggcagggcagcgagaccacctgcctcattctgcagaccagggcacctgggcagactctttagctgtggaactcgacttcctgctggacagccagatacaggatgccctggacgcctctgacttcgaagccccacctgagcagctctttccttcggggaacaagccgggcccttgctggccgggccccagctcacatgccaatggagaccctgttgcagtggccaaggcccagccgagccggctgatcatgggcacccaccgggacctggaagctttcaagcgccttaactaccggaagacaaagctgggaggcaaagcccccctgccttacccttccaaggggcctgggaatatccctcgaggggacccaccctggagggagttgtaggccactttgaggtctgtgtttcctttgccacccagcccccatgtccgcagacctcctccaagatgctccagggggtcctagtggaccctacaaacctcccttcagttgcccggaagttggtcttccatggacaacacaaaggaggccgtgaggtcctggcctcacctggccagggtcaaggtcatttgccacccttggcttcagggagggaaactgtgtctcccacagccccagtgacttcaagcgggcctgggctccaggaagctggccacctctgagcagggcccatcctgtccggatttgcaaattttagggtcctgagccaagtatggatggttcagaatttgtttctttcctggaggagaagagagctccctttgttttctttctccccatttccattttatttcttctgggaagacccataataaatgattctgtagaggc

SEQ ID NO: 1901 - DNA, 1928 bp, Homo sapiens
agttgcacagctgcctggtaggtgactggaggcattgagcagtgtgctcactggtatttcgctgatgtggccccaaccccgcctccctccccaccccgcgatgtcagaaaaaacacaacaggggaaattggccgcagccaagaaaaagttaaaagcatattggcagaggaagagccctggcattccagcaggagctaacaggaaaaagaaaatcaatggcagtagccctgacacagccacttctggtggttaccactcacctggggattcagcaacaggtatctacggggagggccgtgcatcctctactaccctggaggatctggagagccagtaccaagaactagcagtggccctggattcaagctccgcaataatcagtcaactcactgaaaacatcaattcactggttcgcacatctaaggaggagaagaagcatgagatacatctggtacagaagcttgggaggagcttgttcaaactcaaaaaccagacggctgaacccctggccccagagcccccagcagggccatctaaggtagagcagctacaagatgagaccaaccacctaaggaaggagctagagagtgtgggaagacagctccaggctgaggtggaaaacaatcagatgttgagtctcctgaacaggagacaggaggagaggctacgtgaacaggaggagaggctacgtgaacaggaggagaggctacgtgaacaggaggagaggctacatgaacaggaggagaggctgtgtgaacaggaggagaggctgtgtgaacaggaggagaggctacgtgaacatgaggagaggctgtgtgaacaggaggagaggctacgtgaacatgaggagaggctgtgtgaacaggaggagaggctgtgtgaacaggaggagaggctacgtgaacaggaggagaggctgtgtgaacaggaggagaggctgtgtgaacaggaggagaggctgtgtgaacaggaggagaggctacgtgaacaggaggagaggctgtgtgaacaggaggagaggctacgtgaacaggaggagaggctgtgtgaacaggaggagaggctacgtgaacaggaggagaggctgtgtgaacaggaggagaggctacgtgaacaggaggagaggctgtgtgaacaggagaagctgccagggcaggagaggctgctggaagaggtggagaagctgttagaacaggagaggcggcaggaggagcaggagaggctgctggagagggagaggctgctggaagaggtggagaagctgttagaacaggagaggcggcaggaggagcaggagaggctgctggagagggagaggctgctggaagaggtggagaagctgttagaacaggagaggcggcaggaggagcaggagaggctgctggagagggagaggctgctggacgaggtggaggagctcctggacgaggtggaggagctcctggagcaggagaggcttcggtaacaggatgagaggctgtggcagcaggagactctgcgggagctggagaggctgcgggagctggagaggatgctggagctggggtgggaagccctgtacaagcagcgggccgagccacgcagcggcttcgaggagctgaacaacgagaacaagagcacactgcagttggagcagcaagtaaaggagctggagaagtcgggtggagctgaagagccaagaggctccgagtctgcagcagcagccagaccagtagctggagccccagtcccacaaggagcttggatgtgcggacaagcagggtggactccccaggagcacccaggcttgggtggagaagctgttggtacaggagaggcggcaggaggagcaggagaggctgcatgccattcttttcgggctgccgagaacagggagctaaacatcaccatcatctaagagcgggtcaaggaattaaaaaaaaaacaac

SEQ ID NO: 1902 - DNA, 2792 bp, Homo sapiens
aaaaggggcctgcgcctggcgttgttcatcgcagttgctccggatctttgcacacactccacgggcagttggaggtgagctgctgccggccacgccagaggctgcaacaccagacatggatgggtgcaaaaaagagctgccccgcttgcaagagccggaggaggacgaggattgttacatccttaatgttcagtcaagcagtgatgacaccagtgggtcttctgtggccagaagagctccgaagagacaggcgagttgcatccttaatgtccagtcaaggagtggtgacaccagtgggtcttctgtggccagaagagctccgaagagacaggcgagctccgtggtagtgattgactctgattctgatgaggaatgtcacacccatgaagagaagaaagctaagttattggaaataaacagcgacgatgagagtccggagtgttgtcatgtgaagcctgccatccaggaacctccaatagttattagtgatgatgacaatgacgatgacaacggtaatgatttggaagttcccgacgacaacagtgatgattcagaagctcccgacgacaacagtgatgattcggaagctcctgacgacaacagtgatgattcggaagctcccgacgacaacagtgatgattcggaagctcccgacgacaatagtgatgattcggatgttcccgacgacaacagtgatgattcatccgacgacaacagtgatgattcatccgacgacaacagtgatgattcggatgttcccgacgacaagagtgatgattcggatgttcccgacgacagcagtgatgattcggatgttcccgacgacagcagtgatgattcggaagctcccgacgacagcagtgatgattcggaagctcccgacgacagcagtgatgattcggaagctcccgacgacagcagtgatgattcggaagctcccgacgacagcagtgatgattcggaagcttccgacgacagcagtgatgattcggaagcttccgacgacagcagtgatgattcggaagctcccgacgacaagagtgatgattcggatgttcccgaagacaagagtgatgattcggatgttcccgatgacaatagtgatgatttggaagttcctgtgccagcagaagatttgtgtaatgaaggccaaattgcttcagatgaagaagagctggttgaggctgctgctgctgtctcccagcatgattcatctgatgatgctggtgagcaggatcttggtgagaatctcagcaaaccaccaagtgatcctgaggctaaccctgaagtttcagagagaaagctgccaactgaggaagagcctgcacctgtggtggaacaatcagggaaaaggaagtcaaaaaccaaaactattgtggagccaccgaggaaaaggcagacaaagaccaaaaatatagtggagccaccaaggaaaaggcagacaaagaccaaaaatatagtggagccactgaggaagaggaaggcgaaaaccaaaaatgtatctgtgacacctggacataagaagcgtgggccttcaaagaagaaacccggtgcagcaaaagttgaaaaacgcaagactaggactcctaaatgcaaagtccctggatgtttcttgcaagaccttgaaaagtcaaagaaatactctggaaaaaatttaaagcgaaataaggatgaattggttcagagaatctacgacctgtttaacagatccgtctgtgataaaaagctgccagagaaactacgcataggctggaataacaagatggtgaaaactgctggcttatgcagcactggtgagatgtggtacccaaagtggcggcgctttgccaagatccagattggcttgaaagtctgcgactctgcagaccgaatccgggataccttgatccatgaaatgtgccatgctgcctcctggctgattgatggtatccatgattctcatggtgacgcatggaagtattatgccaggaaatccaacaggatacacccggagctgcccagggtcacccgttgccataactataagattaactacaaggtccattatgaatgtactggatgcaaaacgaggattggctgctacaccaaatcgttggacaccagccgcttcatctgtgccaaatgcaaggggtctctggtcatggtgccattaactcagaaagatgggacccgtattgtgccccacgtgtgaccatttgctgtgtatgtgcagaagtattatagaaaaattatgcaggagatggctaggattagccttggggatgtgatgaaaacacttggcaggaattacaaggcaatgaagaattcttaaggttatcttagagtatattaatgtgagctatatcctttactggtaagaagttttagaaaggtttgttttgtgaagttaggaatattagaatttaggtactgttaagtaagtaatgttagaatttaagattcatgttattaacgatgattgaccttaaatagggactctattgctaaccattctgtgcccttgacagggtatttctgaagcccttgggatctaccttgggtcttacttgagttccatatttttcacatgtagaacaaaatgcaaaagaaaagtgagttttcaagagtggcaggttgagagaggagaatgctggaaagaggacaagtttgagaggcaacacttaaacactagggctactgtggcatctatgtagacaggaaagacaaacgtgtttcataaaattcgttgttgatggtattgattgaaactatctgagccatgtaatcaaaaaataaaagttttctgcatcttg

SEQ ID NO: 1903 - DNA, 3153 bp, Homo sapiens
aatgctgtgtatttacttgaactcatacatcagaagatagtgatcttaacacattatgtttgggaagtttaaaatatctcttccaaatgcttgatgaaaaaggtgggaggatcacttgagccagggagttgaaggctgcagtgagccctgtttttgccaccacactccagcttggagaggtgaggggctgtcctctggatggcaattgatgaaggatgagtctgtgccctgaaggggagatcagtccagcccagctccccactgctgcctcgtgtgtggtggcttctccaggagagaggattgattcctaaagactcatgttacgtgaggaagcagctcagaagaggaaaggaaaggagccaggcatggctcttcctcagggacgcttgactttccgggatgtggctatagaattctcattggcagagtggaaatgcctgaacccttcacagagggctttgtacagggaagtgatgttggagaactacaggaacctggaggctgtggatatctcttccaaatgcatgatgaaggaggtcttgtcaacagggcaaggcaatacagaagtgatccacacagggacattgcaaagacatgaaagtcatcacattggagatttttgcttccaggaaattgagaaagaaattcatgacattgagtttcagtgtcaagaagatgaaagagatggccttgaagcacccatgacaaaaataaaaaagttgactggtagcacagaccaacatgatcacaggcatgctggaaacaagcctattaaagatcagcttggatcaagcttttattcacatctgcctgaactccacatatttcagatcaaaggtgaaattggtaatcaacttgagaagtctactaatgatgctccctcagtttcaacattccaaagaatttcctgtaggccccaaacccagatttctaataactatgggaataatcccctgaattcttcattactcccacaaaaacaggaagtacacatgagagaaaaatctttccaatgtaataagagtggcaaagcctttaattgtagctcactcttaaggaaacaccagataatccatttaggagacaaacaatataaatgtgatgtatgtggcaagctctttaatcacgagcaataccttgcatgccatgatagatgtcacactgttgagaaaccttacaagtgtaaagagtgtggcaagaccttcagtcaggagtcatcccttacctgccatcgtagacttcatactggagtaaaacgttacaattgtaatgagtgtggcaagatctttggtcaaaattcagcccttctaattgataaggcaattgatactggagaaaatccttacaagtgtaatgaatgtgacaaagcttttaatcaacaatcacaactttcacatcatagaattcatactggagagaaaccttacaaatgtgaagaatgtgacaaagtttccagtcggaaatcaaccattgagacacataagagaattcatactggagagaaaccatacagatgtaaggtttgtgacacagctttcacgtggcattcacagctggctcgacatagaagaattcatactgcaaagaaaacttataaatgtaatgagtgtggcaagaccttcagtcacaagtcatcccttgtatgccatcatagacttcatggtggagagaaatcttacaaatgtaaggtttgtgacaaggcttttgtgtggagttcacaactggcaaaacatactagaattgactgtggagaaaaaccttacaagtgtaatgaatgtgggaagacctttggtcaaaattcagatcttttaattcataagtcaattcatactggggagcaaccttacaaatgtgatgaatgtgaaaaggttttcagtcgtaaatcaagccttgagacacataagataggtcatactggagagaaaccatacaaatgtaaggtttgtgacaaggcttttgcgtgtcattcctatctggcaaaacatactagaattcatagtggagagaaaccttacaagtgtaatgagtgcagcaagaccttcagtcacaggtcataccttgtatgccatcatagagttcatagtggtgagaaaccttacaagtgtaatgagtgcagcaagaccttcagtcgcaggtcatcccttcattgccatcgtagacttcatagtggtgagaaaccttacaagtgtaatgagtgtggcaataccttccgtcactgctcatcccttatataccatcgtagacttcatactggagagaaatcttacaaatgtacaatttgtgacaaggctttcgtgcgtaattcactcctgtcaagacataccagaattcacactgcagagaaaccttacaagtgtaatgaatgtgggaaggcttttaatcaacaatcacacctttcacgtcatcatagaattcatactggagagaaaccttagaaatgtgaagcatgtgacaaagtttccatttggaaatcacaccttaaagacataggagaatttatactggagagaaagcttacaaatgtaaggtttctgacaagacttgggagtgattcacacctggaacaacatactggacttcacactggagagaaaccttacaagtgtaatgagtgtggcaaagcctttggcaagcagtcaacacttattcaccatcaggcaattcatggtgtagggaaacttgactaatgtaatgattgtcacaaagtcttcagtaatgctacaacgattacaaatcattggagaatccataatgaagagagatcttacaagtgtaataaatgtggcaaatttttcagagatcgttcacatattgcaggtcatcggtgaactcatactggagagaaaccttacaaatgtcatgactgtgccaaggtcttcagtcaagcttcatcctatgcaaaacataggagaatttatacaggagagaaacctcacaagtgtgatgattgtggcaaagcctttgcttcacgttcacacgtcattagacatcagagaatctatactggacagaaatcttacaaatgtcatcagtgtggcaaggtcttcagtccaagatcactccatgcagaacatcagaaaattcatttttgagataaccgttcccaatgaaatgagtatagcaaaccatcaagcattaattgacattggagtc

SEQ ID NO: 1904 - DNA, 1895 bp, Homo sapiens
acaaatagtcgccgacctactgccaatccgcctctcctctctctctctctctgtctcaacatgactgactgggaagcggtggctcgggcagagcagctccgctggcgcaggcaggaggagcaggaggattattaaataacgcagctggactctgtgcaactgggagtggagaggagcccaacagccgagaaggggagggagggcagaggagggggaccaggaaggacacccccgtgccccgaagacataaatccctgagtgcccgggaggagccttaacaagcgcacggagccctcaaggctgcaaagttggctttcacagtgcaagcctttgattcccaatgggggactcaggatcaagacgatctaccctggtctcccggttgccaatattcagaagaagtattaacagaagacatgattctcttccttcttcaccttcttccagtaatacagttggtgtccacagttcctctccttccagcactaactcaagctcaggtagcacaggtaaacggaggagcatattccgtactccttccattagcttccaccataagaaggggagtgagcctaagcaagagcctaccaaccagaaccttagtatttcaaatggtgctcaacctggtcacagcaatatgcagaaactgagtttggaagaacatattaagaccaggggaagacattctgttggttttagtagttcacgaaataagaagataacaagatctttgacagaggattttgaaagggaaaaagagcactcaactaacaagaatgtctttataaattgtctaagttctggcaaaagtgaaggggatgattctggtttcacagaagaccaaactcgtcgttctgttaagcagtcaacaaggaagctactccctaaatctttttcatctcactataaattttctaagccagttctacagagccaatccatttcattggtacaacagtctgaattctcattggaagttacacagtaccaagagagagaacctgtattagtaagagcttcgccatcctgttctgtggatgtaacagaacgggcaggaagctctttacaatctcctttgctttctgctgatcttaccacagctcagacaccttcagaatttttagccttgactgaagattctgtgtctgaaatggatgcattttctaaaagtggaagcatggcatcccactgtgacaactttggccacaatgattctacctctcagatgtccctcaattctgctgctgttacaaagacaacaacagaacttacgggaactgttccctgtgcaattatgtctcctgggaaatataggttagagggtcaatgtagcactgaatctaattcattaccggaaacctctgctgctaatcagaaggaagtgttattacaaattgctgaactacctgctacaagtgtgagccactcagagagtaacctaccagcagatagtgaaagagaagaaaatatagggttacaaaatggtgaaacaatgctggggacaaactccccaaggaaacttggattttatgagcaacataaagcaatagcggaacatgtaaaagggatccatcctatttcagattcaaagataatacctacttctggtgatcatcatatttttaacaaaacatcacatggatatgaagcaaatcctgccaaagttcttgccagtagtctcagtccatttcgtgaaggaagatttatagagaggagactgcgatcctcgtcagaaggcactgcagggagtagcagaatgattttgaaaccgaaagatggaaatatagaagaagttaatagtttaagaaagcaaagagcaggttcttcatcttcaaaaatgaacagtttggtaagtatatacatatgtctgcctctaataaaataatgctgtctat

SEQ ID NO: 1905 - DNA, 2225 bp, Homo sapiens
agatgtatgattctttatttaaacggcagtaaagaacgctggaataggctttccagggacactcccatgagctctgggctcctttgcagcttccagctctgggtcttatttaatgggcttcaaaggtcactgtctccatgatgtccggtgtcatagaaccaaccatctccagcccctggccaccctctgctgtctcggcgatggccacgttggtgctcctctccgccatcttagccatgacgtccacatctctgccatgtggtgtgcccactacttttgtagtaaggttggctctgacgttcctcaggaaagagctgaccctgccaagtcccttgctggaaccggaactggtggtccataagctcctcccagatttgtgagaggtcctggactcctttgagatgggcgtgtggctgacacctttatgcgagtccttgtgcctgctgctccccgggttgccacagcctttctcctttttgtcatctctattggctctgtggctgaatgaggacctgctggaggacttttgggcaatcttgtctccccttgttttgtggcggctttcacctgtcctgcggcgatgggaactccttccgagagccctgtccttttcccttctttccctcccctccttgcagccttcagcgctggcctgggttcgctcccttccatgctgtccactcaggctgctcttgctctgccgggtggagacgggaggtcccgctgctgcatccatgtctgcttctgcagctgtcctgctggtcagtactactcctgcaatggccaggctcacactgccctctcgggaaaggctcatggatgcgctggaaacatgctctgaggacttgcctgcagcccctgccacagccaccttcgtgctgtttggagccatgctggcagtgcctgcaagggccatgttgcctttgtttcctcctgcaccgatggtggccgccccagctatggctgcgctcacctgtccaggggcagaattggctgctgccacactcaaggcacctgctacggtgcctgttgctgcccctgcagctgcccctgctgctgctgcctctttaatcccccctgttgctggctcctcagcaagttctgtagatgttttggggatggatgcattgagcacattagtgggtttgttaaagtcattttggagtccctcccctccagcataagcagcagaggtggccccacacacctcagagaccatgtggaggctttggatgctgacctggtcctgatccccctttccttgaaggttcacggctcccaggctcctcctgtcttcctgaaacacaggcatccacatcatgtcttcagctggaatgccacaggtactgctgttactctccatgggtggccgcaagaggtaaattagtttttcccaataggcaaagaggtcatcccgtgtgtcaagagcgggacacaattgcagatagcaagatctgccagtggcgaacttcaggcgcagctgttgtttctcatggtcttgaacagaaatccgtacaaacctcaggggcagaagcctgttgtcgctgcagtttccccatggtggtgttgaacatgctcatgctggagccactctgggccgtataatacggcagcagaaaatcagcattcatggttgtctttcagcacaacggcagcactggtgaggcaggtctctgggtcttccttggcctcggtggcagatgagggaccagtggtgctcctgggtcacaaagatgtctctgcagctggtctctcaatcccaccccaccccacaggcccccactgttgcctcagagcctcccagaggccggggtgggggtgggagcacggatgattgctgtggggggtgctgtagggtgcctggactccagactcttccaagacgtagagatgcagggtgggctccagagaggttttcttctggacctaaccccctgacctccacctctgatttttttaactacagtttgtagtctctctccctgagagagactacaaactgtagtcctagtgacaggaagtgacgaccctctctgcctaaaccccctgtgcagccatatttatcttctgcttccctttgtgacctgttgctgtcacatacccctttgttctcatcccccaggccagggccacaatgccctcactaatactccattgcccccatagaggacagccccaccgtgccaggtactcaagtgggtgccaaaataaaaatttttcaaatg

SEQ ID NO: 1906 - DNA, 2212 bp, Homo sapiens
ttacacagtgtcacccaagcgactgggagccgcgtcctgctctgggactgagccgttggagctgcccggctgaccgcactaggctgaccgcaaccggctgaccacacacagtcctcactcccctggccctggtgggcggcaggcaccatggcgcagacagtgccgccctgcgagctgccctgcaaagagtacgacgtggcccgtaacacgggcgcctacacgtcctccggcctggccaccgccagcttccgcacctccaagtacctgctggaggagtggttccagaactgctatgctcgctaccaccaggccttcgccgaccgcgaccagtcggagcggcagcggcacgagagccagcagctggccacagagacccaggcgctggcgcagcgcatgcagcaagactccacgcgcacagtgggcgagcgactgcaggacacgcacggctggaagtcggagctgcagcgtgagatggaggcgctggctgcggagaccaacttgctcctggcccagaagcaacggctggagcgcgccctggacgccacagaggtgcccttctccatcaccactgacaacctgcagtgccgtgagcgccgcgagcaccccaacctcgtgcgcgaccatgtggaaacggagctgctgaaggcccttccccctgcactctctcagtgcctcaagaactcctgcagctcccgcaaactctctgcccgcaacaagggcacctgccaactgatggagacactgacagtgcacggagaggcaaacccagggatagaggggcgcaggacccgggccctggcacacaaggaagtacccagtggttgaggcaaagaccccaatcacagagaaaaggcttgttcctacacacagcaaattaaactggccaggcaataagaagaaacacagggtccttctcctgttcttggtgtgaagatggcctttcccagcacagagccctgaggggcagcctgggcgggcatctgggcccccagagtttgggtcctcaggggctgtccagaggccaagggcaggccaacgttcccaggtgcactgagtgagcagcagcgatgactcctgaagcctggggcgtgggaactgccgctgagggaccttcccagcagcccacagaaggccctggaggaaaacaccccacttacaacgcaccaaggagaatgcccaaaagcccaagataaacccagtgagagagcagaacttacacagtcagagctcaggcccggcattcaactccttgtggttgctcaggtgttgaccaaggcctgcagcagctgggcctcctgggatcctcaccagggactggctctggtgctcagggcgtctcctccctcaggaagccgagctcatccggaacattcaggagctgctgaagagaaccatcatgcaagcagtgagccagatccgactgaaccgggagcacaaggagacctgcgagatggactggtcagacaagatggaggcctacaacatcgacgagacctgcgggcgccaccacagccagagcaccgaggtgcaggctcatccgtactccaccaccttccaagagagcgcctccaccccggagacccgggccaagttcacgcaggacaatctgtgccgtgcccagcgcgagcgcctggcctcggccaacctgcgggtgctggtggactgcatccttcgcgacacctccgaggacctgcggctccagtgcgacgccgtgaacctggccttcgggcgccgctgtgaggagctggaggacgcgcggtacaagctgcatcaccacctgcacaagacactgcgggaaatcacagatcaggaacacaacgtggcggcactgaagcaggccatcaaggacaaagaggcacctctgcacgtagcccagacccggctgtacctgcgctcgcaccggcccaacatggagctgtgccgtgacgcagcccagttcaggctgttgagtgaggtggaggagctgaacatgtccctcacagcactgcgagagaagcttctagaagcggagcagtccctgcgcaacctcgaggacatccacatgagcctggagaaggacattgccgccatgaccaacagtctcttcatcgaccgccagaagtgcatggcccatcgtactcgctaccccaccatcctgcagctggctggctaccagtgagcagcggcacggtgcttccccccagtcccccaaataaacagcgcgttagctttc

SEQ ID NO: 1907 - DNA, 1559 bp, Homo sapiens
agcttagcccagctgaccccagaccctctcccctcactccccccatgtcgcaggatcgagaccctgaggcagacagcccgttcaccaagccccccgccccgcccccatcaccccgtaaacttctcccagcctccgccctgccctcacccagcccgctgttccccaagcctcgctccaagcccacgccacccctgcagcagggcagccccagaggccagcacctatccccgaggctggggtcgaggctcggccccgcccctgcctctgcaacttgagcctggctgcgacccctgctctgacgtctcggaaaattcccccttgcccaggcccttgggggagggggtgcatggtatgaaatggggctgagacccccggctgggggcagaggaacccgccagagaacattcagaaggccttcatcgcatccatggacctgtggaactgggatgaggcatccccacaggaagtgcctccagggaacaagctggcagggcttggtaggctgccgaggctgccacaacgtgtgtggggagggtgtccaggtggggcctctgctgaccctaatcccttatcgcctgcagaaggagccaaattaggcttctgtttccctgatctggcactccaaggggacacgccgacagcgacagcagagacatgctggaaaggtacaagctcatccctggcaagcttcccacagctggactggggctccgcgttactgcacccagaagttccatggggggcggagcccgactctcaggctcttccgtggtccgggaactggacagacatggcgtgcacagcctgggactcttggagcggcgcctcgcagaccctgggccccgcccctctcggcccgggccccatccccgccgccggctccgaaggcgccgcgggccagaactgcgtccccgtggcgggagaggccacctcgtggtcgcgcgcccaggccgccgggagcaacaccagctgggactgttctgtggggcccgacggcgatacctactggggcagtggcctgggcggggagccgcgcacggactgtaccatttcgtggggcgggcccgcgggcccggactgtaccacctcctggaacccggggctgcatgcgggtggcaccacctctttgaagcggtaccagagctcagctctcaccgtttgctccgaaccgagcccgcagtcggaccgtgccagtttggctcgatgccccaaaactaaccaccgaggtcccattcagctgtggcagttcctcctggagctgctccacgacggggcgcgtagcagctgcatccgttggactggcaacagccgcgagttccagctgtgcgaccccaaagaggtggctcggctgtggggcgagcgcaagagaaagccgggcatgaattacgagaagctgagccggggccttcgctactactatcgccgcgacatcgtgcgcaagagcggggggcgaaagtacacgtaccgcttcgggggccgcgtgcccagcctagcctatccggactgtgcgggaggcggacggggggcagagacacaataaaaattcccggtcaaacctc

SEQ ID NO: 1908 - DNA, 2077 bp, Homo sapiens
agaacaacagccacttttgtgggagcccaagaaacagcagctttaaaacagggtaaatattcaggcatcattaggatcctgaatacaagccagccagtaaaatacgggatctactcagaagggcacaatctatcagatggtcaagacaaataaacctggggccaaggtagcggtttcagcacagagagggtctgaggttactactaacacatcccctcagcagggacatgggtacgttcttgcctcaagccatcgaagtgctgcagtctccctgaacccttcccaccgaagatcagaagctgcacatcccaccactccccattcggcatcagactaccctcgatctgtctccctccagtcaggacctggacactatgcagtacccactcctcggggaaccgagactggaccaagaacagaatcatcccgccattcctctccccatctaaagagccagaagactcagacactggcttcccatgcttcaagcagacaatggaaagttagtccacccagagaggaagcagcacgaagaggcagtgagagcaagtcagggcgcgaggtcggccatcatgcttcatcaatcccagatgccaaatctactcatcagttgagttttcaagaccagaagaataacttacaatcacaaatcttagaagatgacccaccatccaaggtccagaacccccaaggagccagagttccccgtaggattttgtcttacccaaaggatgaagcagtacaaactgagcccatccaaagaattacgactactagtgagatcagatctccaaggagtccctctctcctagagcacggaagcagctgtgtctctgcagactatcagacagcccagagaagggtccctgtagaagaatcagaaacaggtccttacggtccaattccttcaaaacccaaggccttgtataggaatatgaacttggactcattgctcaaactctctgtccttaaagattctgatggtgtacaccgagtttctgcacgggtagaccctgagtctcttcataagtattctgcctatcctgaaaccaagccctccgcaaaggtcttagtatcatcacaggtggagtccaacgtgaggaccccaatccgaggaaacagcgaggttggccgcagggtcaccatctccccaggggtacagtcagtagagccaactcaccatgtgacagttccatcagtgtctgagggctcccacaagtcatccatgtttgttactccagagcccatctataaacagcaaacccaaaaacccccagaaattacttacatgtcccaaggacctacacccaggtatccagaactctcgcaaaagccctccatccatgcagaactggaactgacccctaggcccttgcctcctcggtccttacctaggtacggacctgactcctcatggtggcccttgctgaatcctgaagttgaaacaccccaaagccagctgacaacaccggattttgagcctaagtgctctccttccctagatcttttattgtccggttttaaaatagactctagccctttctgtgaggatctgaagttccagagagagaaggcaagcctatcaccaccatcaccaccaaaggagtttccaagttgggcaccactgagtgaagtgccacagacccccaagcacacctgcaaacaacccattcaaaggtttactgctttcttcctggatgtctctgaggaaatgtacaatcgtgtcatctggtggctaaaaggtctgtgcttttccctcctatgggcccactgtgggagcttgggggatgggaggacaggtgaggagtggcatctatgtatctacagagctgggtcgtttaggagataaatgctgggattttgacctgaagaagcagaggaacttctcatcttgctgaaaatttcaccattagagtcatttctttggggcttggaaccttttccattttcaagagtctccttttaacaggaagttacttctggaatggagaataatttaagcctcatggccttttcagcttagttggtcatctatcacatgattttaaaaaatacaccaaagcaaaccgcctgcttc

SEQ ID NO: 1909 - DNA, 1896 bp, Homo sapiens
aaatccattctgtatttccagagtaagaacatcccataaaaggcgggaactgtaaaagctcatgaggaagaaataaacatgtaacaatagaacacagatggacagttgtgctgggaagcagctgcacagggaaagaagagaattgagctctcgggttgtttttggaagagccgagtacacatcttgaacttccacgcctgtctccaacccaggtctgagatggtgtcttatgtttcccaggggtttaaaaatgcagtgagaaaagacttggcatatatcttagcaaccatgtgggcttgggaaccaggcaaagttgcagctctgcacttaccagctgatgcaccttgctcaagtcaccaccccttcctgtgtctcagttttctggtctgtaaactggttgtgatacttcattatggtgaaacctcattaggcagtactgtcgatgctgcacagatctttgtcactgaaaagttgcatgtatcctatagctgtcactttacttatgccatgcaacaacctaaagaaaggaagaaaacatctagcagcagaaccgcgactttctagtacccagagctggcgcaggggaggtcggagccagatggggggcatggctcatcctggccccagaatccagtcttggggaagcatgtaaacagggaggctgcagaaagacactatctgtgcaagcgggcagtgtacctgtgtccacagcacaggcagcacgtgagagcagagccccccaaaaagagcgctgcccatggagggctgtgagcagatggactctaatgacaccatcccgtttccaaggttgaaccctatgggaggacagactcttgcagcccataaagatcaagtcatctgaccaataaataaataaataaataaaagggaaaaaaaaaaaaaccaagatggaaacctagatccacaacgggaaagtgacttgtgcagggaacctgtggtgcccagtgtgggtggcaactcttccctcatccatgcagcttggccctaccttgatcatcgtcctttttagcatgaatttatcaattgcccagtattttcaatggactatagagggtacagagaaaagaaaagtgagaaatggcatctatattcaaaagatgctgcagagacagctccccacgcccagcctgccttgagaaaaagaagccacaagaaaactcatgcttacagcacagactaggtgttgaaggcaggtggtgcagaaacttaggaggagcggcactgaagactaaggaggtccagagaccatagaaaagttattgggagaaggaaggacttgagccggtatttgaggaacattgttaaggtctagactgacagattaagagaggaagatcacctcggacaaacagccgacaggagtctctgccccttggaagcagctctagcaggctgttgtgtaatggaaatgctgactttcacttatacagtacatttctataaaattatcaatacgagaagctgtctaaaaaggagtgaggtattttttcatcagtgaagaggctggttgcatgtgctatttcttcctagaaagcaggaactgggtccagaattggtctggcttcagaaaacaaaaaagccgttgccaagtctagggtttgtacagctctccagtggagttatgaaaagcccggttagaacataaagaacggtctgttctgtgggaggcaatacagcttcaccgaggggagagggaaagtaagcctgtatcagtcatatttccatccctgggagaccattaggagaaattcaattaaaacccatgacttctaccaaatctctatggccagtttgaagagactaattcttagaaaaagctgactccagcattatctgtctttagctgagctgttatgaaaagaatataagagtaac

SEQ ID NO: 1910 - DNA, 1719 bp, Homo sapiens
atttctctactcacctgtctccgaatccgccgtggtgtttcaagcgagtcaagattccagacgcgccccaggctggactcggaattactgccccgcgggtctgcattttcacagcggcaggtggcttgtggtccctgacaaggaggaccctgagggcaaccacaccttgccatgcagagcacctggcttctcatctgccaacctcactctgacccggctgcaggaagggaaggagccaaccccggactcaagactcaaggggaccagaaccagggagatgagacataccagggctgggcagctgtgggggtccttccagagaggagctgagatacgcctacctggaggggcccctgggcctggaggggctcctcagtgtgactgggtgaagtgttttcagaggaccagggttgaggttgggggcatctcatccagaccctgccggcatctgcccccagaacccaagggcccctccttcctccctcctcgatggaaatgctggggatgtcctcagtcaccctctgagcactcacacatcaccccttatttggaaatttttctcactctaaccttccttcctgctgcaccttctgccccatccccaggctctggcctctctctctcctcttctaccctttagcaggtaatgactcagttcccactgaggagccagctgtaggtgagagtctgggctctcggtgaggttgggagaaggaaaaggcttatgggccagggggtgggagggagaatgggcacagccagagcagagtggaagggttgggggaggcgataaagacagatgtttccgtattaccatttttctttcatggtccgagggagctgcccttcccccaagcccaggaaagtgaaaagagaagcaggaacagtaaaatactccacaggaaagaaaaatcttagtgatccctcctgctgtctctttccttttgcctattctggcaaattttgtaagtgaaatttgttaccaagatgtgaaaatcttataagaaagtctctaaatatttgagaataaaattatcaatgtctcagctctgcaggctgaaaaaacggaggctttacaaaataaaatcatgcttggaaaacttctcctctgagggatgtcaaaggctgcactgaataagctgtaaggtggtgctgaaatgggtcatttatttgcctgtgtaagctcaggcaggtgttggaattgaggaagtataggtaatgaaaaaagtaaccatgtcctcgggacatagcgactggtgatgaccacacaatcaacacaataaactctagcattcacattgtagtccagctcattcaagcaaagctatctccaatagggagtttaccctgtacagaacacgtgcatttccacctgttctcagactgaccctttgctcatcacaatagtgaaaaaaaacacagccctgggtggagatttaagatgctaatgagtcatgagacgtatgaacaagcatgtacagctactgcacacgtgcacccagaagaccgcccagaacatgcttgctagtaacacctcttcccacccacctcctgtaaataatcatgtaagactcccataaagggagtttctccagcagtgatcaatgctgtctcatccttaggagcagcccaccctgaatcctctcagggtgtacagtttattttgcacttaactttcaaaataatatttttcctttgtaataaattgctttgtacttc

SEQ ID NO: 1911 - DNA, 2227 bp, Homo sapiens
attacaggcgtgagcccactgtgcctggttgagatagctgagatttatttttattttattttatatttttgagatggagtctcgctctgttgcccaggctggagtgcagtggcacgatctcagctcactgcaacctctgcctcccaggttcaagcgatcctcctgcctcagtccgcctagtagctgggattacagacacatgccaccatgcctgggtaatttttgtatttttagtagagacggggtttcaccatgttggccaggctgatctcgaactcctgatctctggtgatctacccgcctcggcctcccaaaatgctgggattacaggcgtgagccactgtgcctggccaagatttatttttgtaagtaatcagtaacctgcttgtggacacaagtgtgacctgctgcattcaggaactgctctgtccacacctacaaggcttggcctttcagagctggaggacctcagagggcgacgaggaaatgtaagatccaggaggggagtggcgcctgagtgccttagtaggaagcaggataccagctgggaagtcaggccttctgggtacaaagcccagctctgccacagactgtcctccaccttgagaaggtggtgtaaccactctaagcccatgtcgtaaagagaacagcagatgacccgagtgtggtcgtgaggatgcactccagcctgggcgacagagtgagactccgtctcaaaaaaaaaaagaaagaaagcattgacactattattggtattccaaaattccaaagaagcaagttggtgtcataaaataacagtgggctttggggacagacagacctccttggtctggaaccttgggcatatttagtcgtgcctcttggtctgttttctcagctataaaatgggggtgccattctcatcattcagggcgtgtgtgtgaatggaataacctaggaagcatgcctcgtgtcacccatggaaggcaacaacgcgggtcccctcccacctgatctctctcagatcagccgctcttggaagagtctggtgctgatctcagcatcctgtcctttttttttttttagacggagtctcgctctgtcacccaggctggagtacagtggcgtgatctcggctcactgcaacttcatcccctgggttcaagcaattctcctgcctcagcctcccaagtagctgggactacaggcacgtgccaccgtgcctggctaattttttgtttttttgtttttactagagacgaggtttcaccatgttgccaggctggtctcgaactcctgaccttgtgatccgcccacctcggcctacaaagtgctgagattacaggcatgagcgactacacctggccgcttcctgtactctgagaagtcaggtttcttgcccttgtgtcgccacctccagtgccagttgccagctgacggtcctggaagggaagtcgggactctacttctcctctctggactcaagcattgacatcctgcagaagagagcccaggagctgatcgaaaacatcaacaagagccggcaaaaggaccatgcactcatgaccaacttcaggaacagcctgaagaccaaggtttcggatctgacagagaaattagaggagaggatctatcagatttataatgaccacaacaagatcatccaggaaaagctccaagagttcacccagaaaatggcaaagatcagccatttggagacagagctcaaacaagtctgccacagcgtggagactgtgtacaaagacctgtgtctccagcctgagagcctaagactcagatgggggccagaccactctaggggaaagtccccaccacgtcccggcaactcacagcccccagacgtgttcgtttcttctgtggctgaaactacttctcaggtggttaccagtaaaccggcctgacaccttggggtcagatgtgcaggccactgcttcagaagtacagaccaacagagatggtgaatgctgacagctgccgggagactcacgccttagtgacagtctccaggagaagactgtgaggccaccatttgggccacactgagaaattgtttttcatggttctataatgcatcttggcagaaaaaaacaaaaacccaaagctccttgtgctgaactcccaaaatgtagcaagtccagcccctgccataggcccaggcttcgtgctccccacccttggcaagttctccccacccccagccccacagtttattaaatgtttgattttc

SEQ ID NO: 1912 - DNA, 1919 bp, Homo sapiens
gttgacagcgccgcgccgcgcccagcggccgcacgggggtgccgaggcgtctgggggcctgcgcttcggggcgagcgcagcgcaaggctggcgcgcgcgcatggaggatgctcactgcacttggctttcgttacctggtctgcccccgggctgggccttgtttgccgtcctcgacggccacggtggggctcgagctgcccgcttcggtgcacgccatttgccaggccatgtgctccaggagctgggcccggagcctagcgagcccgagggcgtgcgcgaggcgctgcgccgagccttcttgagcgccgacgagcgcctgcgctccctctggccccgcgtggaaacgggcggctgcacggccgtggtgttgctggtctccccgcggtttctgtacctggcgcactgcggtgactcccgcgcggtgctgagccgcgctggcgccgtggccttcagcacagaggaccaccggccccttcgaccccgggaacgcgagcgcatccacgccgctggcggcaccatccgccgccgccgcgtcgagggctctctggccgtgtcgcgagcgttgggcgactttacctacaaggaggctccggggaggccccccgagctacagctcgtttctgcggagccagaggtggccgcactggcacgccaggctgaggacgagttcatgctcctggcctctgatggcgtctgggacactgtgtctggtgctgccctggcgggactggtggcttcacgcctccgcttgggcctggccccagagcttctctgcgcgcagctgttggacacgtgtctgtgcaaggtcctgggggcgtggcgtggtacctttggggcttggtgcagcagagggagagagcctcggggttttggggaggagggctttgatagagaggcaagagtaaagctagcaaaggaggggataggactcaagcgaagggcgtggcctgaagtgggcagggccaaaatacaggggcggagcctgagggatgctttgaggcacgggagagttagtggaagggacttaagagaaagggcgtggtcttttggaaaggggcgattctgggtcgtaggagccgggccggaagtattgattagtgctggaaggtggaagagcaggtaaacatcagagcgggcggagctttagggaaaaggcattgttctctcaattgggagcgcctaggaccgggtttggtcccagtaggagaggattggcaggtgggtgggacgcgaaagaaatgggcataagtagaatgaagtgggggacttgaacctggggattgttgggaagctctgccttggactctcccccaccgggctcctttttctccaccggcttcagggcagcctggacaacatgacctgcatcctggtctgcttccctggggcccctaggccttctgaggaggcgatcaggagggagctagcactggacgcagccctgggctgcagaatcgctgaactgtgtgcctctgctcagaagccccccagcctgaacacagttttcaggactctggcctcagaggacatcccagatttacctcctgggggagggctggactgcaaggccactgtcattgctgaagtttattctcagatctgccaggtctcagaagagtgcggagagaaggggcaggatggggctgggaagtccaaccccacgcatttgggctcagccttggacatggaggcctgacagctgttgtcctttggggatcctttgcttctctggggcctcaacagaactaaagaagaaaaccgaccctttccccaactacatgtaccagcggaaggaaggaaggccaatgtaggaacccaaaatgcttatttcttcttctcttacttccctctcacagaaaagtcttacgaatggggaaattccaccaacatccagaccaaaaagaaaaaagcccaaaacg

SEQ ID NO: 1913 - DNA, 3059 bp, Homo sapiens
actcgggccctgacgttgtcaggaggccctgggggatcctgctgaagctgcgatttggcgcagagctgagatgtctgagctctagacacagggacctcagtgtcaaaagatttgggaagatgaattgggtcggggggtcccggtccagggttctgatcaagcaggaaagaagaaagcaaaagaaactgtgagaaaaccaacccatgtgaacatgaatagagacataaaaatgcccctaagaaagcataatttagaacttacaatgtcgcctcactgtgtaccttctaaactctgccttgatgatacagaaaccaatgtaaactgtcaaagactaagtagcaaggaagatcttggcccagtccagtcacaaggcatggactcatatagtatgcttcaccctcagttcagcaaaatagagaactgcagtttcactccatcatctttttcagtggagttaccttctaacagacatatttcaaaactaaatttcacatctggaatagcacctactcctcagaaacttgcatatgaaaaaaagcagaatgaccagcgcagtactgttaactgttctgattccttgctttccaaattaaataaaagtcaagatgttttcagtccatcacataaaactacacgatttgggacattatttgaaagattaaacagtctaggaaataggaatttacttactaaaagccctgctgtaattatggatgaagattgtagaagcacggatgaaataagacagtcagactacattactgaaaaacactcaatacagcatatttgggggaaaaatggaaaggaagtttcaaattttcttgaagatgtgaaccagtctactcctaaccttctatcagagaattgtgactcttttgttagtcaaaatatgatcaatgtattaaacatagatgagcaaaggataaagaaaacatttaacaagtgtgattatgatagtatgggagatacttgtgtagtcactagttctgataaaaaccatgtcactgacagatgcattagaaacatttttacagttccagagttgacttttagtaattcgactttgaataaaacaagttatccagaaaaatgtcagccaaacaagaagtatcagagagagtataacaaaaatgaaagaaatgatcttagtacatcttttgagaacgattactacccaagcagctctgaaagaaaagaaaaatttgaaaatgattaccaagagaagacaccacagaaaagtattcagaaatatccagcaaactctatctggtgtacaaaatgttctgagtttaaggtgatttttacactcatccattatgtgttgatgttaaatttattccttaaaagtttgagaactgccttccaggcttttctgaataatgacctgcaattataagtaactaaagaaaactttattttagctagtagtttctagctaaaatagtcctaactttcttggggaaatataccttcggaagaattgcactctaagcagtcatgggactttggacttgatgagattctgatggaagaaggaggaatatattctttaaaaagcaagcgaatatctactaagaaaatctctcttgattctgcacagagtagtcggtctactagttactctccaagaccaacagacagctgtttcagttctagttcagatttggacacatgccgtgggtatcctgagctgccatttaagaagtctagctaccctaaagcctccatgctggagagaccatgtggagggaccacacaaagattgacagtaagatgcttgagaagtcccagctttcccagccccagcgttttgggtcttctcagcccaagcactagatgtgcagccccagcccatgcctgggaaaaacttccgctattcctttgctgactgcaggaatgcttgagatgcatggacctattcatttttaaaaatttattgagcacagggtctggttccaagatggttgaataggaacagctccagtctacagctcccagcatgagcgacgcagaagatgggtgatttctgcatttccaactgaggattggacaattaaatgaggatttttctgcccactgatactgacatgttctgcactattcaggtgtccgttattcaggtgcaaagaagacaagatataaaataaggcccagaggtgcagtccaggagtatggagtagggcagaaattgaaactgaaactgtggaacgagaaaccatggataagggaggactacagtacatcaaatggaccaatcatggctttctgcaggtcctcatattatgtagcctgtcattcagggatatgtgatctgaatgacaataagaagccagacgtatgtgaagatggtggaaggacattctatgagtaaacagcaagtgcaacgtaacgttgattacaattcacctacccattactttggaaatagaatgaggtgcatctcaccaaccatcctcctgcagaaagccctctgacctgtgaaacaggaagctaaatgtctggaaagtatgtggattggacacatgtcttggattaaattatcttacacgccactggaatgaacctgcctgattctccactttctctgcttcattctgagcgttcttgcctcccctgggtactggaaagagaatggagccttagaatcaatgctcccaacccacccattctttttcctggcactttccacctttacaactacgcctccaaaagtttcagtctattgcagctatggtgggagccacataggaacttctcagggatgcaaaattcatcaaccacaattccctggccagaagaaccacatagacttatctattaccaggatcggagagagcgggcccctttcttcctaaatttcactttttctcttaatttattctgacaatgaggagacagaaaaagctgcatgatagtgatgtagagtctaatggtgtatctctggatacacaaagagccatctcaggtaacaactttaatccttgaaatgagactattatcttcctgttaattattccattatttcctaatgtttttaataataaaaccccccaaacaac

SEQ ID NO: 1914 - DNA, 2250 bp, Homo sapiens
aatgacagaagcagcagcgagagcccttcagaggaccgcgaaacgcgaactcccaccccagcaaaccaccaaggggaagaggcgggcccccatccaggaggccttaggaacaggagagctgacttttctaaagcaaataaggcagtgttctccccagggcgccaggcttccccagccccaagtctgggcgtctgaaatctgctgtgtaattggatcacgcccggcccgtgctgagcgcccatctgcgcccgtcttggaaaacacaagtctcagagaaggaaagcagttgccacagtgttcagcttaaccaagtcatcttatttgatatgtgaaagttcttcgagatggaagaatctcagctcatcactgcgaaggcatgccaggattaggaagtcatcagatgcaagcctgcaagcctcagtgtactcctcaatgtctgcagggcccaccccagagagaggcccctgggtgaccagccggtgaggagcttcaagaggaaggattcaccatcaccacctggatcctgtgtgcagcttttgtcacagcggtggcgagcacagtttctgcctcctggggagatggggtgtgaagctcacagcacctgcgtgtggctgggcccaacattaacagcgctgcaagagctcacctccatttataggaagtgggaaggacccaaggactggccgatgacaccacaggaggcagaaggcacatcgggggttgggggtagcctatggccaacctaccctgtccctctaacaacctaccctgtccctataacacgttgctggcaggaaacacgggagatggctcagactggagacctggggacatatctaccaagtgccacgtgggtcctgggtcaaagtcaccaccgtgaaaagacatttctgagataatttgggacatgtgctaatggaggggtttcagattccacccagagaccactgctgggtgcgtggatgggacagtgacactggggcccgcaagaaagatcccatgctgtgagagacagactgaaggggaagagggagtgacgcgatgcctgggatttgctgaagaaaaaaaagaataaaaaggtccgtctgtatatggatggcaagaatttcttggtaacaaaagcacagccaataaaagaaaaaataaatactaaggtcgatgaaaatttaaaacttttgtgcatcaaagggcaccatcaacagagcaaaaaggcagctaaagaatgggaggaaatatttgcaaatcatgtatctggtaaggggttagtatccagaatgtgcagaaaactcttacaactcaacaacagaaacaaaaatctaatttaaaaatgggcaaactggccaggtgaggtggctcatgcctgtaatcccagcactttgggaggccgaggtgggcggatcacttgaggtcaggagttcgagaccagactggccaacatggcaaaaccccatctccactaaaatttcaaaaattagccaggtgtgatggcacgtccctgtaaccccagttactcgggaggctgaggcagaagaattgctggaacccaggaggcaaaggtcgcagtgaggtgagatcacgccactgcactctagcctgggtgacagagtgagactccgtctcataaataaataaataaaaatgggtaaaggacttgaatagacatttctccaaagaggagatacaaatggctgataaggacttttctgaaaagatgttcaacaccactaatcaattagagaaaggcaaatccaaactacaacgggacaccatctcacacctgttaggatggccacgatcctaaaacagaaagtaatgacgctggtgagtatgtggggaaactggagcccttgggcaccgctggcaggaaggtaaagtggtgcagcccctgtggaacatggcatggctgctcctcaaaaccttaaacacagaacgagcacgtgagccagcaatgccacttctgcatctatgcccgaaggcattgacagcggggtcttgaagagatatctgcacacccgcgttcacggtggcagcactattcatggtagctaagaggtggacgcaacctaagtgtccacctacagatgaacagacacacaaaaggtggtgtttccgtagagttgggatagttatcattcaggcttaaaccagaaggagattctgatgcatgctacaacacggaggaacctcgaaggtattacactgagtgaaatgtaccaagcacaaaaagataaatactgcaggattccactg

SEQ ID NO: 1915 - DNA, 2205 bp, Homo sapiens
gaaaatggcggatgaggccgggcgcggtggctcacgcctgtggtcccagcactttgggaggccgaggcgggcggatcacaaggtcaggaaatcgagaccatcctggcgaacactgtgaaaccccgtctcttctaaaaatacaaaaaaaaattagccaggcgtggtggcgggcgcttgtagtcccagctactcaggatgctgaggcaggagaatggcgtgaacccgggaggcgcagcttgcagcgagccaagatggcgccgctgcactccagcctgggcagcagagcgagactccatctcaaaaaaaaaaaaaaaaaagaaaagaaaagaaactggcggacaaaggaagagatcctccttcaggcagggtagggaagaagggcactcggtgaccagagaccttttccaggaccatgtctttgaagcaaatctcagctcttgtcttccggaagcgatggagacagaatccagaagcctgagactctctcctttcctggctttgatgaagcaagctgccacactggagaggcctacatgataaggacctgaaggtggcctccagctagctccagccaacagttggcaaggaattgaggacctgagtccaatagaccttgaggaactgaatcctgcaacagctacacaagtgagcatggcagtgtatccttccccagtaaagccttcagatgagaccccagccccagctgacaccttgattgaagccttgtgagagaccctgaagcagagaaaccagctaggccttgcctggattcctgatccacaaactgcttttgtgatgccctataattacatgaactctactaaaaagagggatactggaaagaagaataatgttgagacacctttgcagaagaaaaaacaacttcctctcttcctctacttcactctggcaagttctccaacctgacaagccagtagggagtgccggaatgtcatggctgagaaaagagatgttaacaggctgtatgatgttggccacagagtgcccccctaaagaggcctcagaagaatgaagggagtgccggaatgtcatggctgagaaaagagatgttaacaggctgtatgatgttggccacagagtgcccccctaaagaggcctcagaagaatgaagggtaagaagctcctccatgaaatcagatggcacaaaattagaggaaaaagagtccttggcatgaggctgccaccaggagaattctgaagatgcagggcatgaatggtcaatgcctttcgttgttggggcagaggtggatgacccaccagagccacctagagataacatttccggaaaagtcttcaagacggtgagatttgatttagactgagtcacagtgcaatcttccggtggtaaagcagatggggttggtggtccatgatgacgagcacatgaatcagtgcgattcacggcctgggaaatatcttggcatagggtggagccaaatgaaaagatggtgttcagagacaaactggcctcaggttggaggctgggctccactctctcaatgtgatgtggtgggagaaggggaaagggaagctgttggggtggggaatggtctatggggaacttggaatccaagggagaaacaggctgtggtggcagagggtccctcagtggtgagggtgaaaataagtcagctaaggtggtgatcaggtcaggtgagagaattaaggggggtggtggagagggcttaggccgagaggacaatattaggtcttctggagtggttgctgagggggtggaagccagagtgaacgatgactcagccccagaagctgaagaagccaaaggggacacagagggagcagcatctttcagggactcccaagacagcagtcgctggatatcagcagttgctctgttacacacccgacagacagggtctgggcataacagtcgacgaaagagggtggtatcatgatgctggcccaggggactgcaggaaacaggaggtccaaagctgcagccaggatcagaacaaggaaatgaggatctgttagcctggcaggggtggggccccctgaatcctgcttcacattaccccccatccacgagctcaccgtatgtgaggtcatatgacctcactatagcctctcctcaaagcattcattcacatatccgttcctatggctacccactcccaaaactacagcaggctacaaggaatccctgaaatgaatagaacatgc

SEQ ID NO: 1916 - DNA, 1575 bp, Homo sapiens
aaatattagtgcacttacctttgtcagtttcatttccagcacatggctgctatggatccgactgtcgaaatgagctacttctttggaagaggacttaaccttggcaatgatctttacgtaggagaacacgatcacagccgttgggagcaagaggcagaagaagaggatgttcaggatgaaaacctggccccctaccgaggcctgggccagccaccagtccagggtgcacgaggttccgaagggctcaggtacgtagtcccccagacctaccaagggcatggtggtccagaaggaagcataggcccagatggctgccaggcagatgtaggcgtgctttcttttcagccaaacccctggaggcggaagaaaagcattacccggatgtaatctgccctacacccagatacctcccctcgatatgtcaaattccacctccaaagatttattccattgatttctgggagacctgggcagataactgaagcctgagggagagtggagtaaacggaaaaaagttccagagcttgggcctttctccaggagaacacaattggaaggttttctctaggcatctgggagctttgggagggagaagtgacaacagctgggaaaagggacaggaaagagatgagaggatgctgaagacaatggaggcccttgagaaaacatctcggaaagggtgtgttagtggatcatccagggaaaatccttctgggaggtgaggaagcacaaaacatggcttgtgtctttaaaacgcccttcctgctaacagcttttgtgttgctagtcttatctggcttcctaagaacttgtggaaggggcttggtggctcgtgatcatgacactatggtttgagattaaagtccttgactgtgtttagtaatttgtggagcaggtttggaatcttcaaacgtcattcacacaacaatcgcgctcacacagccacagcgggagaggcagagaatctaggtaggttgcatcatgttctgcaaagtaattctgtgaagatattttcaggaagacaaaaaatgagctccgtttttcagcactagtttctgttaaccaaaagagaattccaagcggaggaaatagtgcagtcatctaagaaaagctgtaaagcactagtgatcattttcagaattcaacacaaccaccaaagacaggtcggcctgatttagtgcagcagcctccacaggaaattaccttcacacctcactcatcacctcgaacgaagagggccaggaaagtgactctttactgccttggttttgtgttagcagagaagaaatatcaaaatatattcaacaaaagctaaatgattacttcaatatagactcagggcctgcctctgcttagtgcaatgtgaggtttggaaagtcggtcaggcctaattcttctatgtctagtctttgactgaccttgtgcatgcaagactatattgcatatgggttaaataaaataatgtaaggggcctgctttgcaaactagaaagtgctatattaacatgaattattttactcctgtgtaagtgtatctcatttagcgctaataagaaatataacagattgtttctat

SEQ ID NO: 1917 - DNA, 1597 bp, Homo sapiens
aatggatggtaccaccagtgccaaggacagcaaacgctctgtgctgggcccgtcgcacagcaggaccaagaacccagactggagctgcttttttttggaaacaacaggctttcctcagggcacagcccgtcactcgcctggaaaatgggtgggcgtgggcttcagggcgggggtcaggctgtgtgtgggaaccagtgagctcctccaagagcagcacttatttttagtcttctccccagtcccaaataaactgagagcagctgggagccctgggtaaatgcagagtgaagcagagacaggaaatcggggctctcagtaatgagttccagccactccagaagggggaagccagacaaggaattttcttcaggactgtttccctctggcaggctccggtattatcactgagaatggtcccgtgtgtgtgtgcgtgtgtgtcatgtttacaacttctgtccaagtcttctttcttttttctctacctttgtgtgacatttgatttctccgcagggctctgaatcccagtcctggtgcgtgtgcgtgcatgtatgtgcgtgtgtgtgtgcgtgtgtgtgtgtgtgtgtgtttgttggggtggtcggggaggacactgaagcagcacggtctgctctgtgtcgctgtgtgtctgaaactgtctagggagaggctgaaggacgcaggccagggaagtggggaaatttgaacacagcttggagttcttgaggggggagggggcagaggcaaggaagaggagagaactggtctccagccaggaaaagggctttttccaccaaggcatctaactgctgacatgggtgcccagcatggatggggacattgatgtttacaagcatttctcgtggctgaagaggtcccaggtaaaccaccacagtgctgctagtaatgaaacctaccaggaacgcttggcacgtctagaaggggataaggagtccctcatattgcaggagctgctaagccgcacatctcttgagacccagaagctcgatctgatgactgaagtgtctgagctgaagctcaagctggttggcatggagaaggagcagagagagcaggaggagaagcagagaaaagcagagctcacggtaacactgtgtgtgtcaccatataactgcacctcacccccgcacgtgtgcatgactcgcagagaatattccagcaattgtgtacccctgggccagtctctttgaaccctgagggtggccaggatctggagctgcatctctaaggggccaggctttggggaccattgccaaaggtggactcaggaggaaagacacttaaagacacttttacatgtctagtaattcttgatgttcatcttcagcaccagtggaaacacatgaacttcgatgcaggtccagagaccatggacactcccacgaggctcagctctcaggcaccccctacacttcagttgagggaaaagctcaagtgccttaggcccgtggaccacagtcttggctgagatcaaagggatgagcaacagggacttctgccacagtgacaatggaattgtgttgtgccttacttcagaggtggtctcttctttcttgtaataaaagcaatatttatgcgg

SEQ ID NO: 1918 - DNA, 1964 bp, Homo sapiens
tttttcccctcaggagaagtcgggaaggtggcggcggcggcggcggttgtcccggctgtgccggttggtgtggcccgtcagcccgcgtaccacagcgcccgggccgcgtcgagcccagtacagccaagccgctgcggccgggtccggcgcgggcggcgcgaagcggaagcaggaggagaagcacctgaagatgctgcgggacatgaccggcctcccgcacaaccgaaagtgcttcgactgcgaccagcgcggccccacctacgttaacatgacggtcggctccttcgtgtgtacctcctgctccggcagcctgcgaggattaaatccaccacacagggtgaaatctatctccatgacaacattcacacaacaggaaattgaattcttacaaaaacatggaaatgaagtctgtaaacagatttggctaggattatttgatgatagatcttcagcaattccagacttcagggatccacaaaaagtgaaagagtttctacaagaaaagtatgaaaagaaaagatggtatgtcccgccagaacaagccaaagtcgtggcatcagttcatgcatctatttcagggtcctctgccagtagcacaagcagcacacctgaggtcaaaccactgaaatctcttttaggggattctgcaccaacactgcacttaaataagggcacacctagtcagtccccagttgtaggtcgttctcaagggcagcagcaggagaagaagcaatttgaccttttaagtgatctcggctcagacatctttgctgctccagctcctcagtcaacagctacagccaattttgctaactttgcacatttcaacagtcatgcagctcagaattctgcaaatgcagattttgcaaactttgatgcatttggacagtctagtggttcgagtaattttggaggtttccccacagcaagtcactctccttttcagccccaaactacagcatttagaatgctttcatctagctgcagttttggtgaatttacttcagcttttcctcttcaggctacccacagtggaagtgctgcatcagtaaatgctaattttgctcattttgataacttccccaaatcctccagtgctgattttggaaccttcaatacttcccagagtcatcaaacagcatcagctgttagtaaagtttcaacgaacaaagctggtttacagactgcagacaaatatgcagcacttgctaatttagacaatatcttcagtgccgggcaaggtggtgatcagggaagtggctttgggaccacaggtaaagctcctgttggttctgtggtttcagttcccagtcagtcaagtgcatcttcagacaagtatgcagctctggcagaactagacagcgttttcagttctgcagccacctccagtaatgcgtatacttccacaagtaatgctagcagcaatgtttttggaacagtgccagtggttgcttctgcacagacacagcctgcttcatcaagtgtgcctgctccatttggagctacgccttccacaaatccatttgttgctgctgctggtccttctgtggcatcttctacaaacccatttcagaccaatgccagaggagcaacagcggcaacctttggcactgcatccatgagcatgcccacgggattcggcactcctgctccctacagtcttcccaccagctttagtggcagctttcagcagcctgcctttccagcccaagcagctttccctcaacagacagctttttctcaacagcccaatggttttgcagcatttggacaaacaaagccagtagtaaccccttttggtcaagttgcagctgctggagtatctagtaatccttctatgactggtgcaccaacaggacaatttccaacaggaagctcatcaaccaatcctttcttatagccttatatagacaatttactggaacgaacttttatgtggtcacattacatctctccacctcttg

SEQ ID NO: 1919 - DNA, 1777 bp, Homo sapiens
cacaccagtgacacacaccacacacactccatacacaccactcacatcaacatacacaacactcacacacatcacacacaccactcacatcaacacacgtacacaccctcacatacatgccacacacacatcagtcacatcgacacacatgcacactattcacacacacacgacacacaccattcacacacaacacatcacataccactcacacaacccacactcccccaccattcacaacacacatacacaccattcacatacacacaccatttggacacaccacacacacaccactcacaccactcacatcaactcatacaaagcattcacacacaccacacacacaccactcacatcaacacacctacacacaccactcacacacacaccacgcacacacatcacacatcattcacaaacgcaacacacattgctcatacaccaatcatatacacacacccccacacaccacacacaacacaaaccacacatgcacacaccattcacatcaataaacacaccatgcatacaccacacacatgcaccactcacagaaatctcaccacacaaaccactcaaaccaacatacacaccacacacacaccataaacacacatcacactactcatacacataccacagacacctctctcacaccacacacacacacacacacacaccacgtacacacaaaccacacacaccgcccaccccagacctgacagggaacaacttcctcctcgctgatggtaggaggaactccccgaggtcaggaagcagtgtctattcatttgtcgtatggaatcaccacacccttcagtgatggccatgctttccttgtcgccttctttgagattgagtgggccccacagaacggcgttcccagaagccttggtgactgctcagatcccagctgctttacctgccagcatcctgaaactcagtaagatcagagtccagacctcgtaagatgttgagacttcacctaccgctgccccacccaggctgatgaagcatcaatccaagatgaaggggcccatccctgagtctgtctctcttctctggctttgtcactctggactttgcttccggcttcaagtttctaggtgtaatatgtgaagattaatggcaatgaagcaaacgtgcataagaaaatccacgcagcaaaggtaattccgttattctcaagtccatagatgcccagtgtgacattgtgaactggagaaaaaggagcacttcctgttcaggaaatcttgtaaaatcataaatgtcaggactcagtcaacaataccccaaaatgaaggcctcagaagcatcctcagaggaaaaatttatttctctgatcttctcttgccctcctgtctcttagcgccattctcccctgaggctagacacagacactagaatccctctgccccagggcagggcatggaagccagaagcctttttccccaaagccagccataaaacttaaagatgtcactctaactttccctctgcctttctgtgtgaaaactggccataaagaaactatctgccctaccttgtttgactgaaggtcataagaccctcattccagagagggtcctgcctcatactcagaaggaaggaatgcacgttcagcaaggccaagaagaatctaaacagacaggccttgctgagtttccccactcagccgattgacattggatcatgcccttttcgtctaatcctatatctacacggctgtccatactttgttgaacataagcataaaaatggtcagtttcctctg

SEQ ID NO: 1920 - DNA, 2079 bp, Homo sapiens
agttggcgggtgctcttgggattgcaaccagcgcaagcagcacccttctgcagaagtaaagatgccttgctgggaagtcttctgtctcagtgctggtttttcttgactacactgagcacttgttttcaacaaatttgagggtcttctgggatcccattctcctttgggaggggtagcgattacttttcctcgtgagacacgtcccactgccttgttgcagtggcccaaggagcggaggatcgggtccacccaaagtgaggaataaatccggactttcagcaacgtgggaggaaggagccttaaaattcccaggcaagtgggtaactctgtgcacagaccaagccgccgacgggaccatcacaaaagctttacaaggccttaccaccctggcaaatgaattagccgaaaattctggactagataacccttttatgggtctcatggaaaagtggtttggaaaatggaaaggactcctggcttcaatctttacctctcttgcaattgtaacaagtgtacttatccttgtgggctgccgcatcataccttgtattcgtgggttaactcaaaggctcatagaaacagccctcactaaagccttcctctcttctctccctccatacttggacaagctcttgctcctggataatcaagaagaacaacgaagccaaatcctgttaaaattttttgcagaggaagaagtatcaaatagaagagaggaaattgttgggacagctaagctcttcaaagactcaacttcctggtcataaacttctccccgtttttcttctttttcgccagtctaccctgtttgggaaagtttaaaccttagccagtcgggatcagctcagattgtgcagtccatccccagtcaatggggaaaggacacagaaacaggaactgcgttagggttaaaaagcccttctctcctttgtttggggtgctcttgcgattacaagctgcgcaagtagcaccgttctgaagtaaagatgccttgctgggaaatctgtctcagtgctggtttttcttgactacactgagcacttgtttccaacacccctgtgctccaggctgggttaggtctgatctcagggaatgtctgtttcaacacgtgtctgcagttctttggcttgtgttgctcactgcagtgggcccagcctggtctagaggaggcgctcaggaagtatctgtgaaatgtgaatgtgtagttccttcagtgaatatggccctggggctgaagatggcagaagcattctgggagcttctggagaaggagacctgggaggagaaggttggaatggcgggggcagcagaggggctgggtgaactcagctgtcccacccaggcccatcctctgcagcccgagaaggaagctcacagggcaagacatggaagagatcaagttccctgcccggtgcctgggctgttgatggcctcaggaaaatggaaccattacctgttgctgtcaagtggctgggggccaggatgcctgggttggccgtgagaggacattgctgaggagagtggaggccaggctggggtggggtgtggcaggaggacaggaatgcagtggaaccagtgggtcaggctcctgagggccccaggctccagcctcagggctggcctgttccctcctaagctgccatcttcatatcttcaggacccacccctctactcctcaccctcagcacaacgatgtgatcgaaaggcaaatatttatttttcaggaagagaaacaggagacctcgaggcttctggacttaggaggtccgggcagctggtccatggttgtccaggtagtgccgcagggctgtgggataatccgttatgacgccagtggctcccacgctgaaggctgcttcaaaatccgactcttcattaaggcaccaaaagaccacctgagcagggagggagggggcctgtagattctgaacaattttacatctggagagtggggacccacctcctcctctatggagactccccagcagcagtaggctggagctgattgttaaattctcaggaattttgcaaagtggttattaaacccagccattattaaaaattaaatcatagcctggg

SEQ ID NO: 1921 - DNA, 816 bp, Homo sapiens
attcggttatctctaacgttggaaaacgatggagctaacacccattatggagattaaccacttttcatcaggtttttaacttaagtcgtgaggaatacaacggtgaacacaagattcattttattttcatcaccatgggacgtatcctgttgttgagttctctgggtcagacctctgaagacttctcagatggatcctagtctctgggcttgccctgaaattactcgctgctcagggagagagttgaaatggttggcatcctcccactctgttgctccggctgtgtcccctcgctctgttgttccagctatgtcccctctgttgctccaactgcagctcattctgttagagttcctcattcagctggtcactgtggccagagggtgttggcctgctcccttcctcaagtattcttaaagccatggatttttgtggagcatttttcttcctggctctcccttgagttattttcctttcttcgctatcttgggactcttctttgtgcttgcggtcatcggttgagagaaggacttcttcttccttgtctccttggtgttggctcgtggttgctcttcaacaactggactggaggctcttggttttctcttcatcttcaacaagtcagtctctctcaagggtctcacgttgcagcattcttaccagaggccattgggcctggagttccagttccagtgtctggagagtccacctcagctcagcaatctcatgccggttggcaattgtcagcagaagccgatgcctgcccatcagttctttactctgaggtgttagagtggaataaaaatataaatactt

SEQ ID NO: 1922 - DNA, 2241 bp, Homo sapiens
aattgggttttcctcagacttgaggcgacgacacactcattggaaggggacgaggaatccagggtgtggcagaagactggagaggagctaagggggtcggtatgtggatccagtgaacccgtccaggtgccccaagaggctcgtgaatatggacggatccatgaggccacgatcggcctccctcgttgactttcagtttggagttgtcgccacagagacgattgaagacgccctgcttcacttggcccagcagaatgagcaagcagtgagggaggcttcggggcggctgggccgcttcagggagccccagatcgtggagtttgtttttctcctgtctgaacaatggtgtctggagaaatctgtgagctaccaggctgtagaaatcctagaaaggtttatggtaaaacaggcagagaacatctgcaggcaagccacaatccagccaagagataataagagagagtctcagaattggagggctctgaaacagcagcttgtcaacaagtttactctccgtcttgtgtcatgtgttcagctggccagcaaactttccttccgaaacaaaataatcagcaacattacagtcttgaatttcctccaggctctaggctatctacacactaaagaagaactgctggaatcagagcttgatgttttgaagtccttgaacttccgaattaatctgcccactcccctggcatatgtggagacgctcctagaggttttaggatacaatggctgtttggttccagccatgaggctgcatgcaacctgcctgacactgctcgacctggtctatcttctgcatgaacccatatatgagagcctgttgagggcttcaattgagaactccactcccagtcagctgcaaggggaaaagtttacttcagtgaaggaagacttcatgctgttggcagtaggaatcattgcagcaagtgctttcatccaaaaccatgagtgttggagccaggttgtggggcatttgcagagcatcactggtattgccttggcaagcattgctgagttctcttatgcaatcctgactcacggagtgggagccaacactccggggagacagcagtctattcctccccacctggcagccagagctctgaagactgttgcttcctctaacacatgagggaggctgaatccaccaaatataaacagccatccgtcactgcactcatgcctccctctgtttactttcatactaagggtacaaaaattccaagtctcttttgaactgtattttgtatgccaatttcatgcttatttttcctttatcagagagagttaaggtggacgagcatgccctttttgtcatatcagcctgaaaatgttaaaaagctaggtggagacagattagttgtttcatttttgtttaacaaggtatttatacttttagcttaatttcattaagaggaacatcaggcattgcaatcagtattaatcaggggctcaaatacagactatctgggtgaccttgactaagcatcaaggaggtagcctttatttccccttaaaattagtttaacatctctgttccattattcagatctacacaaacaaggcttcctcaacagctatctatttttactagagtctttttttaaaactaaaactaactctaaagaagtttcaacagaatttccacatacctgcattcattagaacttgattctcccagaatacaaagtactctattttaaagaaaaacccaacagtgcacccctgggcagttttcagactgcagcaaatcttttattacaaataattaaatctctccataatgtctcaaacagtatcaaacaccatttcatatctctaacacagagcagagtcggcattcagtataagaaccaagtgaaaagtgttaaatttcaagcatctgatcacatcacatggtgaccaggtaaagcttagatgtcattttcccacattatccaactgtgcatctcaaacatatcctcatctcagtaaagacaaaagtttctatttcatattgttaagtgcaggaagttgagagagataaaaatccagtgaaaacacatcaatctcaattcaactcagttaaaaaaaagaaaagcaaatttaaattagtttttttcagagaagaaagggaaaggagtccatggggttaagaatcaaaactgaccagggctggcaactatagatggcatgttgtagctctggaaagtatctgtcacatgatattttaaaataaagtggcttttgtgg

SEQ ID NO: 1923 - DNA, 1742 bp, Homo sapiens
tcatgaagctcgatcttatctcaatccctgtgctgtctggtgttactagcagccaaatgcaatttccaacacagtagccaacagccctgcacgtttataaaggatttccagatatattcagcctccaacagtccttatctgtaatctcagttaagcctcagttttttcatctgtcaaatggggtgggtgatcccagagtggccaggcgctcagagctgccccaccgctgctcaggtcgcccaacctgttccattcatgtgcaatgctcctgcatccccaatcaacgacaaagagaaggacaaagctggaggcaggctcccaagcgggagtgagccacgggccagggcgttctgcgaggcaggagcggacggggagcaaggagacccaagcccagcagacaccatcaaggccaatcagggccacatccccgccgcacccggcgagacaggaagcgtgatttgctggtgtgatcagtcagttgcacctccccgccctgcaggactcagtgtgtccggcagacagtcctacctggttggctgctttaggtgggttttaacctttttcttttccgttttttacctgactccctaggccttcctgttaacaaaagggcagggcggtgagtgggccgagggacggccgtcggggtgaagaactgaagcaacaaatacctacggcatttgtttatctttccagggcaactgcagtcctcgaacctgctcctcccgcccaccctggcaggaggcccttctgcagattcttctcagctcagccccgcagcccactaatgaattgggtgtcttatgcactcccagcccctctcagtgagacctgaatctcctctcctgccagtgccgcagcttgggccaccctccccaccggacacctgcaggtgtgggatccgtctcccccgcaggcatctggcccgggagcagggcaacgaatccttcaacagcagcccagatgctcacagcagtaagcgttgcgctcaagggggccacctaacaccccaaaagcaaggctctgaagacctgttctccaacaccgatgccgacgaagacagccactcacccgtgtcctcttcccgataatccggattcaggcttgtggtcgcgcaggcgcactccaaatgctcctctaacctcacctggacttcttttaattttggcttcttcctgacgtattccaccttggccacctgccagagagaacagagcccggccatgaatgcctgcatggagcttcggacatcacgacgtgctgggagccggggacaggctgagagggaggagagagcagcctgacccctgacctcctcccagaaacactaccttgtggtggggagtgtaggagtaccaggtgaaaaacctacaagctgcagtgcagttttgtgtgtgtgtgttttagttttttctgagtagggtctcaccctgtcacctaggccaatcatagcctctgcagcctcaagctcttgggctcaagtgatccttccacctcagcctcccacctgtaagcacaggccaccatgcccagctaattttaaatattttttttgtgtggaagagatgagatctcgctatgttgccgaggttgatgttgaactcctggactcaagtgatcctcctgcctcagcctcccaaagtgctggaacttcaagtgagagccgccgcgcctggtgttggagcatggtatttagcagactcatcctatttttgtttaaaataaacccaaaggttcacgtg

SEQ ID NO: 1924 - DNA, 1740 bp, Homo sapiens
agtggtctcctgccgccacctggaccggggacagtaacgcctagggagccccaagacctcttgagagagcatttcagctctgttgacaaacctcaaccacttgagggacttcgctggaaagaaacgttctagaaagaccaagtggataccaggagccccgtgaggtgcgtgtggcctcagcttgcagaggagtgcacttgccagacacttcggggctttgaagagcacagctcatttaagatgggcacaggtgcatcagagaaacaagcagagcagaaggtccgccgtgccttcgaggcctccgaggaagcccacgggactctggcagcctcaaccccctgggtggccatgggctctgcctatggttcctgtacctgcttgggagcccagcctgtaactgacctggccctctggcctgtcatctactcctgcatgggattttccccacaagcttacccagccttctgggcttacccgtgggtgctctatggtgggtatctctggatgggttatccccctccagctgccttggtgccttcagtgtggctgtattggaggggcgcctccagctttgaccccctcataggaagtccgtatctggcagccttggcccccaacctatttcctttccccatgaaattcccacccacctactccttggcttctcccactctgggcggggccacctccagccactgtccccaggtgggatgctggactccagccagctcagcccccagggctgccgtagaggggccatccagaggagctccctacttgaagacatgcaaagcccctccctcagaatgggcctccaggttcggtatttgggcacctttgccctgctgcagttcagagctccgccctctgcccccttcccccattgaagattctcagctggacccgggctgctcccgctcctcctcccggtcaccctgcagggcccgccgccgcctctttgagtgctaatcagccctctagacccagacccacccaacaatcagagacatgtctggtggagcccagccagctgtggactttaagtttttggaagagtctcagatgtaggttgtttactattcctcagtacagagtacacctcctggactcatgcaaggcccctctatttgctatttctctttactttcttgtttttctgtttgcccttcaaccctgatactggcaccttttctcctccccagactgtcctgggcccgccctctagtagatttgctgtgagtcctcaaacatgcatgcatgcaaccttgtaaaatgagcttatttaagctcaatccaacctgtagaagcgctcagttagaataggcctccaggtttggtatttgggcacctgtgccaccctccagcccaggactctctctgcccctcctcagcaaagaccctcagcaggatccccgcatccctggccaccctgtggggcctgctgctgtctcttccagcattggtgtgtcctccagggaaccacacactcaagcactttggaacccatggaatccagtgagcacgtgctgtgggctctgcctagaagcttccaaaacctgtttgttccagtggacacagagtaggaaatgctgactcgttcagagcgctagtgcccttgggtccttgcgggtgtgctcttctcactcctcaccccatcagcaccttctggggtaatgcacacaccagtaaaatgtacagtgcatgcttttaaaaatttttaaataaatgatactatgctat

SEQ ID NO: 1925 - DNA, 1946 bp, Homo sapiens
agggagaagatgactgagccggccgggtgcagtggctcacccctgtaatcccaatactttgagaagccgaggtgggtggatcacctgaggtctggagttcgagaagatgacggagcagtgtgagccctactgaaccacatccagtggattttccttaggaaggaagatcctgttaccagacaaaatgggaaaaggaagtgaggagggtgatgtgagagcttgagggggaggtcagaaggtcagagatgacccagttctggaggtgaccccatagaaggagaagaatccagccacgtgatacacgggaccaagagaacagtaaatgcaaagatctggaagcacaaaagaggaacagcaaggacagcatgttccagaacctgcaaggaacatttgaaaaggaaattggaaaaataattccatttaccatagcatttaagagagctgaggctgtggagccagatggctgcgttcagagctggcgctgctgtttaccatgtgaccttggacaagcttctcgcttcattcataccacagtttgttcggctattaggtggaggagctgtaagggggagaggaactttgctgaaaggcacatcctccctgcagagcttgaagaacaatctaaccatgctggcatggggcccatcctacctgcaatgccaagtgttgatgggaaccattttcagcatcctgctggtgactgtcatccttatggcattttgtgtctacaagcccattcggcgtcggtgacagccagacaagttcttcaatgagtatttgggaataggataagttgtgttgcacacaggccagtggagaagttggaaccaaaactttcctacttggaaatgacctttggtctggacagttggtaaatgctaaatgaattagaagaaaacatgtactagacattattttttcctaacactgtagcgcaaataattggcccctgagtccgcttctcagtgtttctgactgtacttgttaaaagtaagacctgaaagctccaaaggtcagtgtaaagatggagtgttcatgagaaagaaaacatggtaaccttgtgagtgcctgtaagaaccacactgtaaagaactcatcattaatgcttgaaaatgttattaagaaggagacttaccatgcagacattccctatttaagaaccatttggttacagtgggttaagaatcacagatttttttttttaatctcacctgagttagcctagaatgcgctggttgcaaagtggtgtcagctgtggggatcttgggccctcgttcctcacctgcatcctgccctgcactcaggtgctccccctgaagtcagggtcacatcaggtagacctgttactatatgcacctttggcctggaatgctctgaagttggactggaaatgttactaggttggcctgttacaaaaaggaccccatcctgcttaaacacattgatctcccttgccctgcatttgagtctttctagcccacggtctgaaacttgaggcagctttccagatttggaatgtaaaaggctcagtgggcactctgttcatccctgggtggggagggcccagccaacagaagtgcatgtccactgtgcgggccagtgtgtgtttacacaaatttcatctcagctttgaaaatgctgctattagtttccactgttggtgaactggattttttcctcctattgaaatgatactttcatacttataaagctgtcgtcaatatttatttcaaggtgctagatttaattttgttattaaattgaaatgcttatcttgtgttcaagcacagcactgattttaacaacctgcatttaatgtgaagtaaccgaagtaggatactgtaactgtgtaaggattttgtttgtaatcttgtaacattgaaccattgaaatgttcagttctttgcttttgagcaaaacgtcaattaaaactaaagtaaaatcct

SEQ ID NO: 1926 - DNA, 2074 bp, Homo sapiens
atctcctagcattgacctttaaagtaccttggggacatggagtcctacatatttcctttgtaaaatataagaaaaaggtcacaggcttccatgcatgcagatctcgtctccaccactcgctaactctatcactctggacctgattcctcagacctctgccctatcggaagggaagcagaaaatgatcaggtctcagggtccagtgtcatttgaggatgtggctgtggatttcacccaggaggagtggcagcaactggactatgctcagaggaccctgtacagggatgtgatgctggagatctatagccacctggtctcaatgggatatccagtttccaaaccagatgtcatctccaagttggaacaaggagaagagccatggatcataaagagacacataccaaattggatctatccagacagagagagtagacttgacacccctcaactggatatatttagagatgttttcttccataaggagacactggaaagtattacaaggggtcattcattgtactccattttaaaagtctggcaaggtgatgaccagctggagagagatcaggaaaactgagacaaatttgtcaggcaagttgtagtcatcaacaacaaaagaatatctgaagagtcaggtcatccatataatatatttggaaaaatatttcatgactgcacagacctagatacttcaaaacaaagactgtgtaagtgtgattcatttgaaaagaccttgaaaccaaatattaacctagtgagttataataggaattttgcaagaaaaaacattgatgagaattttagatgtgggaaaacacctagctacagttcttgctattctaagcatgaaaaaaatcatagtggaatgatacactgtgaagctactcattgtgggaagattcttagcaataaacaatcttttattcattatgtgaatgttgaaactggggagaagacctatgtatgtgttgaatgtggaaaatcctttctcaagaagtcacagattattatacatcaaagaattcatactggagagaaaccttatgattgtggtgcatgtggaaaagccttcagtgagaagtcacaccttattgcacatcagagaactcatactggggagaaaccttatgattgttctgaatgtggaaaaggcttttctcagaaatcatccctcattatacatcagagagttcacactggggaaaaaccatatgaatgtagtgaatgtgagaaagccttctcccagaaatcacccctcattatacatcagagaatacatactggggaaaagccctatgaatgtagagtgtgggaaagccttttcccagagtcacagctgattatacatcacagagctcatactggagagaagccatgtaagtgtactgaatgtgggaaagcattctgttttatacattaaagagttcacactggtgagaaaccctacaaatgtgctcaatgtgaggaagccttcagcaggaagtcagaactcattatacatcagataattcatactggggagaaaccgtatgaatgtacagaatgtgggaaaacattctctcgcaagtcacaactcatcatacatcagagaacccacactggagagaaaccctataaatgtaccaaatgtggaaaatccttctgtcagcagtcacatctcattggacatcagagaattcacacgggagaacaaccttatgtatgttctgaatgtgggaaagccttctctcagaagtctcacctcccagggcattggtgaattcatacaggagagaaaccttacatatgtgctgaatgtggaaaggccttttctcagaagtcagaccttgttgtacatcagataattcatactggagagaaacctgatcgatgtactgtatgtgggaaggccttcatccagaagtcccaactcactgtacatcagagaattcatacactaatgaaatcataagaatggtctgaacacagaaaagccttcagggtcagttcaagccttaatagatagtgcaacaaccaatggatttgatgattttggggactacatctttgttgataaaattttacaagtgaagtc

SEQ ID NO: 1927 - DNA, 1976 bp, Homo sapiens
gggggccatcccccttgttttacagacaaggaccctggataaaatgttttaccaagaatcacacaaattgtaagtggtagggccaggacacagacagggagtgtggttccaaaggcctatgctttccagtcaactatgctgcgtgcacagcctcccacccaccgccaacccagctgccctctgctcactcgctcaacagatgtttactaacatcaggtccccctgctctggcccccagggcagccccgggcttccgagaaggacccatatccacctctggcctcactctgcccatatgtactttctggtgacttcttccttgctccctttcccactaatccaaccaggatgttccagaaccagatttaagacgctttgctctctgagacacacaagtgcacccacagaggagggacatggtcctgtgcggagaccctgtggcatgcactgtctgagccatctgccccatcccagaggaagacctcagggtcaccccacccacatgagaccagccctgcagcaagctctcctgtcccacccatctctcctcctcccttggagaagctctcctgactctgctgtccaggtaggcccctctatgattctcaggaggatcccaatggctgggcacctctgcttcccacactggccacagctgctggacagcagggactgttgcacttacacctgtatcaatacacctgtgctcaatagtcacatggtgcaggaaggagtgtgtggccagtaagtggagctaagtctagacgccaccagaagctgggcatggtggtgcacgcctgtggtcccagctactcaggaggctgatgtggaaggattacctgagctcaggagttccaggctgcagtgagctaggatcatgccactgcactgcactccagcctgggtgacagactgagaccctactcgaaaaaaaaaaaaaacagatcctatccgaatatggggcaagtccgaaaaatgcaacaccaagcacctaaagctgacagaatcaacgtaacagagaacagcctcttcaaactggaaggcgctgagaaatccatgtgctgttctgggatcaggaatgagataaggtggccctggggctgctgcaggaaatgcgaggagaggctgacgggaggggacggggatgctgagtggaaggaggcagagctgcccaaggagccggggatgttcacgggcgcagagctctgcagcaagctgccgcctgcaagagaggcccggggaggacgggctgggtgagggcagcggaagccaggcgggccacacagagcaaggggcctgagccaggcaggaacccgaggagtcctccaggctgccctgcccacccacacccagtaccgatggtgatgcttcctgggtggggcactgtgctgttatcgaaagtcttctccagggcggccacgccaaactcattcaggtccaggtcatccaaagcagactctagggacagagaagagtgggatgtgacctcccgagggactatctgaccctgaccacctcgtctactgcccacgctgcatcttcacgcccatgctacgctggtgcctgccacaggacctggcacaaagcgggcacctagaaatgagtactgaaagaaaggagcaccaacttctagcaccagggattctgagaacgtcgtgctggccattcactacacaaggacaccagtgagatgagtggggactgaacaacacgtcttggggtgagactgtactcaccaaggggaaaaggcacctctttctaatttgcacaaaggagctctaagggtcagtcctggccctacaccttggggtcatttcccctttagctcaaaggactcagagtgcccatcccctgattttccgaagacagatgtctaaggggtctggtgtgctgatttgagactcgcttcagagactggggggtctctgaccccagacccagtcctgggctttcaaacagaaatggcctagttacct

SEQ ID NO: 1928 - DNA, 1631 bp, Homo sapiens
gtgtgtgtgtctgtgtgtgcgtgtgtatgcatgtgtgtctttgtagatgtgtacctctgagtgtgtatgtgtgtatcactgtatgcgtctgtgtgtctgtgtgtctgtgtatctgtgtctggctgtgtgtgtctatctctgtgtgtgtcttgtgtgcgtgtctatgtgtgtgtctgtcagtgtgtctgtgtctgtgtctatctccgtgtgtgtgcatgtgtgtatgtgtgtgtcttctgtgtgtctgtgtctggaagggggacctggaggccctgcattctaggctgtgtgcctgtgaacaggtacttaatacccaccccacccccagcaggagtgtccccacctctaaggtcatcctaaagtcccatgtcctccaaggattgtgagggtgaacaggggaccctgggctcagagacagcaaggtaggctctaggcctgggcgctgggcaggggtggccactcaggggattggggctctttctccccaggccccatggcgggtgccagaaaatggacacgaccttcaccgagggtgctgtaccggggcagttcagcaacccagctcgagcgcccgagctgtttcccgaaggcgcccagaagatgcagctactggcgccccaagtgggcctgagccccagccagggcgtcctgctgccgaagtcgggtgagcggtgccggcagccctgctgggagggccaggccccgggtcacacccctgctggaagggccaggccctggtcactccactgatctcagattcgggacagaagtgcccggggcagacccagcctgtctgggtcgggggagggcgagacgttgcccaggccggtgttcccaggaggagatcgccttggggcaggtcgggggcctccgtcccagggaagggggcgcggggtggcgcctcaggctcgatctctctgcagaccagtgtgcgggcgcgctctcccgggtgagtagaccatggccatgcggagccgcggaccatgggccctcccagctcggtgggctgcaccgcggggccctctaccttcggggcagctagggacgacagcgggggtgatggggcacccgggcggatccgagccgcagcagcctggggaaccgcggggctgcgcgtcgggagggggcggaggcaggggacgccgcccacctgctccttgttttgcagtgaggggtccagcccctgagtgcccgcaggggtcagctgctccgtgcgcccagccctgcccaaagagccccctccctccacaccctggccccaagcgcaataaacaccctgaatgcctgtggcgctgtgcgtttcttgggggcagggaggggtggcgggggggcggccaggcgcccctccgggtcccccagctccccagcccctgactcctggctccaggacccgccccagaggcctggctgttccggagaccaacgaagcgctcccaactctgacccagggcctgtccacggagagtggagggcgaggaggacaggaggagccgcataaaactctgccctgcctggagtctatgtaggacagtgttgtcttttacagacaagtctcgaagaatttgaaggaaaatagcctactagctgtaatgtacctagttcagcaaaataataataaaaatactggttgc

SEQ ID NO: 1929 - DNA, 1902 bp, Homo sapiens
cttcaatgttcttaactatgtcatcttcttggactgctgttactgcgcagcacccaagccccagggagacatggaagcaggtgattccttcaacacccagaatgagccagaagacatgatgaaaaaagagaaaaagtctgaagctctgaatatcagaggtgtacttttgcatgtgatgggagatgccctggggtccgtggttgtggtcatcacggccatcatattctatgtgcttcccctgaagagtgaggacccgtgtaactggcagtgttacattgaccccagcctgactgtcctcatggtcatcatcattttgtcatctgccttcccgcttatcaaggagaccgctgccattctgctacagatggtcccaaaaggagtcaacatggaagagctgatctggtaacaaatagttaatggactgacactggtatgcagaccaaggctttgagtggcactgcgtgcatggaaaagagaagagaatcaaggacggagccctggggcactctgacctttggagatctggcagctgggggaggagccaacaaaaaagctggaggaagagcagccatgagtccagcctgaggaatgcctgctcaactggtttgatcattttgactgaaacaagtggtcatttcatgtcctatgggatgcttgctgaggacattaaacacagaaacaagtagaacatgaattcagagtgaaggagatgttaaagggatggagaaatggagaaagagagttgaaataactctcctattaccatcaagcaaatcaaacacagaatgggaccagcatgccacattccctctgtgaagccttggagtgcaactgcattagctcaatggtgcatttcacaacgtcacaacttcatctcagatcatcacaaattgtccatattgaaacctgggtgcaatgagaataatcacttaaattttctctggtcccacttttctgctttacagtggtagttgagaatgtcatacccctaaggacatggggaagatgtgtccttgactgattgatccctgtgacacagtctgacactttgcttttgttcagcaattctcaaagcactggattgcaatgatgccctgttgacagcactgttcaaaagtcgacctgttgttgctggaacctccaagaatacagtgtttgatctcagccaggatcctgtcttggaagaggagagggaatcccaaaaactacttgtgaagaagatcccattgttcaatcaaatcctcgtcactgtagcaatccatgcatgccattgcagttggcattctgacacgtgtacacagtgttttcatctcttccctggagttgcagccaaagcctgagattcctttcgacacgaccctgaaaaaactctgggtttgtgctcccctctgctctgcaataacataccagctctgtgatgtggccaatgtttacctagttggtgggaggactttttaatatcaaaaggaaaacatttcttctgcattccacatagaatctgccaaggacattcccaaagatctacttacttattagagaaaccaagagagtcccagcagcacagagggatcgagaagactgagaacagaactggagaacaaaagtgaagtggtggcaaagtgctggaccagatgttagaagtctccaatttgctctcgacaacaacaatccacaagtaaccctgagaaaagtcatctctgtttccccactggtaaataatggtaagaaaaatagtgcctagtggggcttacgtagaggactgggaagctgaactgtgaaaaatgattccaaggtttctggtcaccatggctactactcttttgtacccagttctttgctcctcaaggagccttgttttctatacttgtgaatatttcaaccaactaataaagatttaatggc

SEQ ID NO: 1930 - DNA, 1826 bp, Homo sapiens
ctttcggtcaatcatggatggtgtgaaacacatagccagggctctccggaatgtgtggcagtggctcctgcacatcggcgatgtgtgcaactcggaactgggcaacccttacctgaagtgtgcacgggttttcgatgatgccaaggacagctgcatgatggtcataccacaagcctaccacctgtgttacgtgctcatgcccttcaaactggcgctctgtggacttgccagcctggtccaggtgttctgcgtcatccctaagtacattcaacccttcttgcgccagaccatcggcacccccgtgattcagttgctcaaccgggtgcgtcaggagtttgagttcaacatgacagccacccaccacttctctgtggatctcaatgcctctcggagcctgtcccaggtagccatggacctccacgaggctgtcagcatgaagctgcaccgtgtccgagaggccctggctctgatgggcttcaccacgcctctgctgcttgtgcttctctacctccaagccctattttaccggtattgttacctgaactgggaccattatgacaatatctacatcactagccgattcctgcgcatggaggctgtgcgctccacggcagggctgcccacagtgctaccgctcagtgctcacgaggccaggcgctacatcccaccgggctccatcttcttgtcccaatgggagaagtttttttacattctggagaccttcaaccttatccgacacctcctcctcgtgctgttcctagtcttcctagactatgctgtcttctgggtgcttgacctggcccggcaccagctgcagggggagattgtggcccgcagtcctgtgttggtgtctctaaccgtggaaggtactggctacgctgggaatatttatcgtgacctggtgtcagcatttgatgtcctgcagcaaggcaacatcagtattttgtcccggcgttgtctccttcgtccctcggagcctgacagcactggctacatagtcattggcgtcatgtatggcctatgcttcttcatcaccctgtttggcagctatgtcagccggctgcggcgagtcatctgtgcctcctactacccatcccgggagcaggagaggatctcctacctgtacaatgtacttctgagccgccgaaccaatctgttggctgccctgcaccgatcagtgaggcggcgggcggctgaccagggccacagaagtgccttcctagtgctggccagtcggtgcccctgcctaggtccatttgtcagccacttttggctgcatcaggcctactgcctgggctgtgggcagccccaggatgagggagacatggagaacactgtgtcctgcagtacccccggctgccaaggtctctactgcctcacttgcttccgcctcctggacaatacctgctccgtgtgtgcatctcccctctcctaccagggggacctggacctggagctggactccagcgatgaggagggccctcagctatggctggctgcagctcaaaggaaggaccctgagcaggcatggttattgcagcaacagctccaagaagtgctcggcaggagcctctcaatggagtccacttccgagtccagtgacctggatgaggagaaggggcctcagcagaggaagcacgggcagcagcccttacctgaagcccatcagcctgtcagcattctcaccagccctgagcccacagaccacctgagacatcctccgccactaaaggagcccccactccagcttcagaaccctcagtccctctctcacctccctctcttcctgatccttcccacccaccccccaaataaaccaaaagtgg

SEQ ID NO: 1931 - DNA, 2570 bp, Homo sapiens
aatcggtatatttactgattgtgtattggtgaattggtgctggctctcagttcccgcctcgcggcggggggggcctgaccacccctgcgatgggtgtcctaagagccagggggggaagaggggctggctgtcagtccccgcctcccggggggtgcctcccgcccctacgatggtggttccaagagtctgggggggaagaggggctggctttcagtacccgcctcgcggggggtgcctcccccaggtgcgatgggggtcctaagagccagggggtgaagaggggctggctctctgtcccctcgtcgcgggggttgcatcccccccctgtgatgggggtcccaagagccagggggggaagaagggctggctctcagtccccgcctcactagcaggggagttgctgccaaggccctcaaacatgggggccatcctttagaaaccctgtctagttgtttagagacataggccaccgacctcatccagggccccacagtttgggttaaaagtccacctgccatcttttctctctctgacacatacaatggaaaaggctttgtcagatcgggtaaccccagggctgaagctgccagaagtttttcctttaactcatgaaagacttgctgttgttaggatcccccttccaaaggttcccggtccccgacccctttgtgacctcatacaaaggcttggcttatactgcaaagtttgggatccacagtctacaaaaccccacagctcctgagaattctctcgcctgccttcggcccttaggctctggtagattgcaaataacatgctttctttctgttcccgggtggcttcggacccctgtcggatcggaaatcccaagtaaggtacctgccctgggcagatttgagctttcttcttggacacctaatacccacagtcctccaggctgaggtagattgcaaatgacctgctttctttctgttcctgggtgccttcggacccctgtcggatagtaaatcccaagtaaggtacctgccgtcagcagatttgagctttcttcttggacacctaatacccacagtcctccaggtgggtcctaaagttcataggatccgcgatgggggtcccaagccagggagggacgaggggctggctctcagtccccgcctcgcgggggggtgcctccccccccccctgcgatgagggtcctaagagccaggggggaagaggggatggctgtcagtccctccctcgtgggtggtacctccgccttctgcgatggtggtcctaagagccagggggagacgaggggctggctctcagtccccgcttcgcgaggggtgcctcccccccccgcgatgggggtcctaagagtctggggggaaagaggggctggctctcaatccccgcctcgcgggggtgcctcccccaggtgctatgtgggtcctaagagccaggggtgaagaggggctagctctctgtcccctcgtcacgggggttgcatcacccaccctgcgatggaggttccaagagccaagggggtaagaggggctggctctcagtccccgcctcgcggagggtgcctcccccaccactgcgatgggggtcccaagagccagggggggaagagggtctggctctccaccaccacaaaatggggggcctttatgttcaggttttgcccaagagtcagcttatttgcttcttgtactagcagggcagttgctgccaaggccctcaaacagggtgccatcctttagaaaccctgtctagttgttcagagacgtaggccaccggcctcatccagggccccacagtttgggttaaaagtccacctgccatcttttctctctctgacgcatacaatggaaaaggctttgtccgatcggatagccccagggctgaagctgccagaagtttttcctttaactcatgaaagacttgctgttgttgggatcccccttccaaaggttcccagtccccgccccctttgtgacatcatacaaagtcttggcttatactgcaaagtttgggatccacagtctacaaaaccccacagctcctgagaactctcttgcctgccttcggctcttaggctatagtagattccaaataacctgctttctttctgttcccgggtggcttcggacccctgtcggatcggaaatcccaagtaaggtacctgccgtcggcagatttgagctttcttcttggacacctaatacccacagtcctccaggctccagtagattgcaaatgacctgcttactttctgttcccgggctgcgttctgacacctgtcggatagtaaatcccaagtaaggtaccagccgtcggcagatttgagctttcttcttggacacctatacccacagtcctccagtgttttagacgcccagctgcacaacttgattgccttacaaatgacctgcttccaggatgcggaaattcctaatttcttctgtgacccttctcaactcccccatcttgcatgttgtgacaccttcaccaataacataatcatgtatttccctgctgtcatatttggttttcttcccatctctgggacccttttctcttactataaaattgtttcctcc

SEQ ID NO: 1932 - DNA, 1538 bp, Homo sapiens
agtttgggcacctcctgaacccgtacgtcatccgttatggtccccacagccacagcctttctgttttcccggtcaggaagctttatgttctggatcatccaggagagggacagaggtggtcggttggtgcgactcataaacaacctcttcagcacaacctggttgaatgtggagttgttccgtctgaccagaaacctgtacagtttgaccaacagcctcagggtgttggtgtccctctgttgcccaggctggagtgcagtggcaagactggctcactgcaacctccacctcctgggatcaagcgatcctcccatctcatcctccaggagctgggactaaagaaagagaaattgatcagaatctactgacagttcttcctgtctggctgtgtaatggattagcatagagacgagcagcacacctctgtcagaaaacctaaatttaagtcacatctcggggctctaacaatttaccaccaacagcgtctttggagctctgaagaagatcctgattttctcaaaaacaagtcattgagttctacactgtaaagcaagacatggattactacatcctatattttataatacacatgaacacattaggaaggagtatgcaggatttaatattctctgtatatttctgctacattgtttctaaagagagtagtggaatagtcctcctgtatcttctattagtgcctccttacttccttaattttgattgaattacatattttctgactctatgtgacatgaattacacttaaacatcatacttcttagccaacagatgtgcaaagttgtgacataccttagaaaatttttcatattgtttatctcatttggctaatagatggaaatcatgcaaactagtaagaattatctgatagctcctgcatgaaaactcaaatttttcttaggagaaaaaccaattattcacatttttacttggatgagcattcacttgtggtcagtgctataacaggaagatctctcagggtacccaatgtgggatcatttttagtttgccaaatgatgaaatttccagacagaaagagccctttttgaataataaattactgcaacatatctacaagaacacttccaaaataaaagtgttcattttattttagagcaagggactttcccactagcttagtattaaaattacatgattgtaatgtatgggagattactgggaacataatcaatattttgaaatttaaaagtatgtaatattcctttggggtaagtttccgaagaataactgtaacactttgaatttgtctaccactacaaagtcatcataaaccatacatcaaccaactcaatttacagcacctaaaatttgcttcctatataaattaacagattaagtctttagtatagtctattctttggtcagtgttgtaagtatgatcttatgttagaaaccagatttaaaactccttgaaatctctcactatttcatccatcttgatagtgcttgttttcttcaacaaataaaaaatagtgtttattttactcttttgatatact

SEQ ID NO: 1933 - DNA, 2001 bp, Homo sapiens
gaaaccaagacaacccctgctgattcctcacagctgacttgtgacatgcctagtatttcccatcattatctcaaacaatgacctcctgaaaatacatctgatgaagagagctggggacacagatgtagcagacctggtcattcttttaatggaagggtggccctcaataaagacacgggaatggcagctgtgccagcgccaatagacctggatgatgcggacagcgttgagcaaacgacagtaacgctggcggacacaccacatgcggacccaggactgcagcctgactgctgcccattcctgctgcacatagaactccaacaccatcctccgcctctttgccagcagcttctccagcacctgcctccaccagcactgaatgatccaagccctgagggctgcatgcagcagtgtgcgtcgcaccagcatgccccgccaccaggcctggatgaaaacagctgcagacctttctgtcatgatggtcttctcttctgggccttacaagagaaaacagacacactcagggtatgccaggaaggggccctgatcctctatcaatgatggctccttcctctaaagttcagcactgggcagggcaacagctgaacccaggagaccaggtgtacatctgccctagctacctcatcccattttccatggaccttgctggccagtctagagcaagaacactgtgacttagaggtaaaagagctgccatctacctgggatccatgactcttcccttcagagccctcccatccgctgaagaagcggtgtcctttgctcctcctgccctctttactctgacttcaagtcaaacccacaagctgctgtgttccttcctcctcaccaaagtggtaacagattcctccacctcacacacattgtgaacagcttgaacttcagctatgcatgcatctgtacaaacatgcacactccacacactaacacacattttgccccttggtccctgcattccccacagtccccacttgcagcccccagccctatatggtccgggatcacactcctctgccccactcctggccacagtctccactccgtatctcagccagactcacatctctccgcctgacaagaaaatgggggcaagagacagccagtccccattcattccagctctgcataccctgacgtttcaccccagtttttctggaacaccctgattgatgtcaggtaatgaggacaggtgcctgtttccctcactgaagccactctttgtacaataaattacagggtcatagatctttgagtcactctgctggaccacaggggtcagagatgtcactagttaaggctctctggacccagccactcacggagttgtgggtaagggtgtggcctggtaggggtgagggtgttgggggtggagtcgcttccctcttctcccctttgttccttccagctctgttctatcgatgtgatttcatcattatctttaatgatcatttaaaacagcttgccatccttctggaatcagagtgtatggggggaaatagggaagaaagtgaaaggtgctctcccactgctaggtgccaagtcaaacaccattctcactgtttctagacagcttcctggctttctctaggacttcaaacatggaggggggtcctgtcatgagtaactgtggggaacttactctcccctcagaaagctagtgtggttctgactgcctcttacaaaacatctgactggggacaggtcgtaaaattcgcacaggtctggactttactaaattacccatggttaggggctagatggtcccatcaccctccggcccgcactcctccgatcaggactccaacaggaagagtggaggaagggcgggacctgtgatgtcataagggcacctgtgatgcaggcaccaggacagcttccagcatatgagcctcttctaaggaaaacctagaagaccccaagtactgacccattgacacaaaggtatataatgctgctcattaaaatctggctggtattcat

SEQ ID NO: 1934 - DNA, 2434 bp, Homo sapiens
aacggtcaccgggattcctggaagagacggggatttgggggaaacggagagggttctgcgaggagacgggaccagtgagacaggcaggaccgggtggaggcgtccctacgagcaggagggcaaggaagatggggcaagacgcggggaggctgcagaggaggagcagggtggggtttggagagaatggagcctgcagaaaggagcggcagaaactggcgctggaaggctcaaaaaaggggccctggaaaggacggagcggggacaggaaagggaaagggacaggaggagctgggcagaggagcccgtgtaaacacagagtggcccatgcccaggatgagggacaggtgcagctttcattctctacctcgctgctcccagtcctagggctcggactccccagcctttccgcagccgcatccacccaccatggcctcagggccgtgacgcgcgtggggagggaggcggctgggggctgagcagcggccatgagtgtggacgggggagggcggcattcccgtctggcagctctgtttgggtttctgacggggcctcttcaaacctccaggggctattctgggcctgtccgagttgggaattccccagagacctggaacttgctctccacagccacagccttggccccgccctgtatctgtgctgccgccagtaaggctgcccctggggagggcggagccagaacctcacagcctcacagggcagagcaaggctggattgacggacaccaggccgagaagaaacccttggggttggcggcagttcttagtgagggcaattcattcaatccagagccagaaacaggattttatttaaaatttattgtaatggggtccgcgcaaaaggaaggggtggagggtggggtacatgcaggggacacaggaacacgatgacatggccagggccacaacttcttctgtcgtggggaagagggatgaaaagacaagaccagggctggagctggggtggaagaggggagggggacactggctgcattcccccgcccccaggaagcacctctaggccctggacccctcgctcaccctggcccctaagactccatctcttctctgcctctggccctcctggctcttcctcctgctccccttgactttttcccctgacagattctcaagtaggacgatgttcagggcctgaccccaaccccccataccaccttatgaaggtacaacctttgccggccctgcttctgcccctcctcaaacctcaccgctttccctctttgggacagctctgatccccctccttcctctcccccctccccctggaaaaaaaaaaaaaaggaaaagaaagcaccaactccccggggaggggctgcagacagcagggggagaggactggaaggagagaagaggaccgtcgagggaagaggctcacaagtccctgggaagacagggcatgggcttacagagaggagagggggtacgggcagtggctgctcgtgtcctctgccacccctgcccactgtccaggggacttcaacacaaccgaggggacaggtttgtgtggggtcaggtctgatagaagaggagcaggagaaacaaatcgttaaaacctagcgaattcccctaagaaaacatttcttcctcctttccttctggaggctccttggttggtagggaaataggagttggtgggaaaagaggggggagaggagcttgtaccaagggactctactccattctcccctctcccccgcaaccaacttggagctcaccagggttgggagggaagtggctgagagctcacaggcaccccctccgcccccgagaggagcccacagctgtgggaggggctgctactgctgccgctgctgccgctgccgccgctgccgctgccgccgccattggacaaacctcaccagtacctgcacaggagaaacaccacggatcacagcgcgatctgaatgggtgcgtgctggtaaagcccggcccgtgtactccacctgccccaggagctggagacaagaccttgtggctgcgcagcggaaaccttgccttgtgacccctggaactggctttcttgactactccttccccagagcagccaagttccactcccgctctccccacacattaccaggaggttcaacctctctggcagatcatctcttccaaccaggacttcttagagtctaatgatgttcattcaggtgtccccccgctgctcccttgacctcttgtaggaatctagacgccacgagctcttggctacagcacccttaacccgtatccgtggcaaggcgtctggccaggcgcccaccctctgcccctggccctcccggcagccctcggcatgtacctttgttgcagagctcacagacatggtgaggaccctggctgtgcaccttcatgtggtccgaaatataagccgagctcagcatcttgccacacacgtg

SEQ ID NO: 1935 - DNA, 1839 bp, Homo sapiens
gaggggcccaggctccctgagccaggaggagaggagaaagtccaaggaaagatggctggcagtcacccctatttcaaccagcctgactccacacacccatcgccgccctccgctccacccagcctccgctggtaccaacgctgccagccctctgatgccaccagtggcctgctggtggccctgctgggtgggggcctgcctgctggcttcgtgggccccctttctcgtatggcttaccaggcttccaacctgccctcgctggagctgctcatctggcgatgcctcttccacctccctattgccctgctacttaaactgcgtggcgacccccttctgggaactcctgacatccgaagccgggccttcttctgtgccctgctcaacatcctcagcattggatgtgcctacagtgcggttcaggtggtgcccgctggcaacgctgccactgttcgcaaaggttcttccaccgtctgctccgccgtcctcactctctgccttgagagccagggtctcagtggctacgactggtgtggactgttgggctgcatcctaggactaatcatcattgtgggacctggactctggacactacaggaggggaccacgggtgtctacaccgccctgggctatgtggaggctttcctgggaggcctggcgctgtccctgaggcttctggtctatcgttctctgcactttcccccctgcctcccaacagtggccttcctatctggcttggtggggctgctgggctctgtgccaggcctctttgtgctgcaggcccccgtgttgcccagtgacctcctgagttggagttgtgtgggggcagtggggatcctcgccttggtctccttcacatgtgtgggctatgcggtcaccaaggcccaccctgccctggtgtgcgctgtcctacattccgaggtggttgtggcccttatactgcagtattatatgctccatgagactgtggcaccttctgacatcgtggcggcaggggttgtgctgggcagcattgccatcattacagcccagaacctcagctgtgagaggacagggagggtggaggagtgagatagaacttgggagcccgggggttgggagggacagggataaataaaggcaaagactgaagacaaacatgggaggagaagtgactggaaaagaactggtgtgggagagggatacctctcagagtcaagggtgacttggggacttggtggagagggactacgtggaagacctggggccagcctgggaccaagggatgtggagtccaggctgggtcctagaatcagggcataactaaggggtaaagtctgaggagcagatccaaagggctgaggcagggaggccgtgggccatggggaggacttcactcagcagcaaagagaagagcattggggctggagtgttccggcaaagacagagccagcagctgcgctgggggagggaagcgtgcctccccacccctcccctcacggcgaaggtttcctttcctcgtgcttgtgccccccgcttggggtggtgacgtgacattgacatcaaacaaggattacagtgaatgtgaaaaaaaaaaaaaaagatacctgaataggcatttctatgacattttaaaagccatgaatttattttggcacaaatattttatcatatgcagtcacttctttgtaaatgattttttgtaaagtcattggatataaaagagtgattttcctcacctgagtacatgaaaagaaaatgctgaaatcaatgtataaatcaaatcatctgtactagcactgttaatctagaagaaagtggttgcatagagaagagtaagaatgtagaccagcttattgaagt

SEQ ID NO: 1936 - DNA, 2098 bp, Homo sapiens
aaaagtgcctgtaaataaaccctgagtgggcaacatgaatggccgcagaccagacaaaatgagaatccagttaaacaagtgcatgaaatatgccccttagtccactcagcctgcaacacaaaagcacagaacagccagcttctaaaccacagacattgacttccgttctggaggccggaagtccaagatggagggtcccgcagattccgtgtctgattgttgcagcagatccaactgaaggatacaccaaccattttaatcggacacaaaagaacaggctgtcctcacctgaccaccacccacaacaaccgaactttaatcagacacaaaagaacaggctgtcacctgaccaccacccacaacaaccgaagggcagggtgagtccatttagagtctcgagaatttcagacgtgcattcactttaaagagtcttgctgtgtcaccaggctgatctcggctcaccacaacctccgccgcccaagttcaagtaattctccagcctcagcctccccagtagctgggactacaggcatgtgccaccatgtccagctaatttttgtatttttagtagagacagggtttcaccacgttggccaggatggtctcgatctcttgaccttgtgatccacctaccccagcctcccaaagtgctgggattacaggcgtgagccaccgtgcctggccctggtttcctttttcttagcaatcttttcttcaatatactttttccaactctcacattttactatgagcagcaagaagaaaccaggctcttccttcaacattttccttagagatctcctcagctaaatatccaagtttgtcccctacaggttatactttcgacacaacaagacacaattgcaccaacttctctaccatgttgtggcaaagatcatctcctgcgttttccaatagcatgttcctatttccgtctgagccctccccagaatcacctttaacatccatatgtctaccaactgtatcttcagaacaattgagtcttcttctgacataaatgttaaaactctctctgcctctaaccgttacccagttccaaagccaccccggcattgtcaggtattggtcacagcacttcctttctcagaaccaaaatctctcttagcctgctcaggcttccagagcacaggaacacacaccaggggacttaaagccaaagaaacccactgtcgtagagttgtgaggtctagaagtccaaaatcagagtgttgccagggccaacctacacctcgtgctgtaaagggggccctcccttgcctcttcctcctcctggtcaccccaggcattactcaccctgttgacgggtcctaatctctgcctctgacttcacgtggattcttcctgtgtgtgcatctgtctccaaatgtccccatttcataagggcacttctttaggcatttcattaaggctcaccctagtgatttcactttgaattgtttgcttaagatcacattttgaggtagtgggggttaggctttctacatatctgttttagataaaaattccaaattcagacaaaattcaacctatgacaaagtcatgctattgctattacatactcgacctataacgaagttacactattaactcactactacatactcagtataacaaactcactctaatactcactactacatactcagtataacaaagtcatggtaatactcactactacatacttggtataacaaagtcacgctaatactaactactacatactcggtacaaagtcatgctaatactcactactacatacttgacctatgacaaagtcacactattaccactgcccaaccaacctataacgcagtcacactattactcactgctacacactcgacctataagaaagtcatggtattaccgctgcatatccgacctacgacaaagtcaccctattactcactgctgcatactcaatcccagatttacaatcggaagcctctgctggtgaaaatatggaagtcaatactgaatgtccctttctttgccataaaactgccatcacacagaagagagaacttaccaagcaataccaacacattcattctccaataaaattattaatttcttc

SEQ ID NO: 1937 - DNA, 2148 bp, Homo sapiens
agaactttgctgctgaggctgctgtggcctctgtgtgcccaggaagggacttcatttctgcctgtggattctttagaatgcccagtcgtctgcgggtcctgccctgatcacaaggagaagccaggagcctcctcttcaggctacaaccttccttcttaagggccacagagtttgtggccccacccccagcacagccccaccttggccccaggaaccctgggagtggccttggcttcctgcaggacagccatggacctactctggatgcccctgctgctggtggccgcttgtgtctctgctgtccacagctcaccagaggttaacgccggtgtttccagcatccacataaccaagcctgtgcacatcctggaggaacgcagtctcctagtgctaacgcccgctggcctgacccagatgctgaaccagacccgcttcctcatggtgcttttccacaacccatcctcaaagcaatccaggaacttggcggaagagctgggcaaagctgtggagatcatgggcaaaggcaagaatgggatcggctttggcaaagtggacattaccatagagaaggagcttcagcaggagtttgggattaccaaggccccggagttgaagctgttttttgagggcaacaggtcagagcccatcagctgcaaaggagtggttgaatctgctgccttagtcgtttggttgagacgacaaattagccagaaagcatttttgttcaacagcagcgagcaggtggcagagtttgtgatatccaggcccttggtcatcgttggcttcttccaggatttagaggaagaagtagcagagttgttctatgatgtgatcaaagactttccagagctaacgtttggagtcataacgattggcaatgtcattgggcgtttccacgtcacccttgacagcgtcctggtgttcaaaaagggaaaaattgtgaaccgccaaaagcttattaatgacagtaccaacaaacaggaactcaatcgtgtcataaaacagcaccttacagattttgtgatcgaatacaacactgagaataaggatctgatttccgagttgcacatcatgagtcacatgctgctgtttgtctccaaaagctccgagtcatatggtatcataattcagcattataagctggcatcaaaggaattccaaaacaagatccttttcatccttgtggatgcagacgaacccagaaatggacgtgtcttcaagtacttccgggtcacagaggtcgatatcccatccgtccaaatcctaaacttgagctctgacgccaggtacaaaatgccttcagatgacataacctacgaaagcctcaagaaatttggccgcagcttcctgagtaaaaatgccacaaaacatcaatccagtgaagagattccaaaatactgggaccagggactggttaagcagctcgtggggaagaacttcaacgtagtcgtctttgacaaagaaaaggacgtgtttgtgatgttctatgcaccctggtctaaaaagtgcaagatgctgttcccactgttggaggaattgggcagaaaatatcaaaaccactccacaattatcattgccaagatcgatgtcacagcaaatgacattcagctgatgtacctggaccggtacccattcttcaggctgttccccagcggctctcaacaagctgtcctgtataagggagaacacaccctgaagggcttctctgacttcctggaaagccacatcaaaactaagattgaggatgaggatgagctgttgtctgttgagcaaaatgaagtgatagaagaggaagtgctagctgaggaaaaggaggtgcctatgatgaagaaagagttacctgaacagcagtcgcctgagctggagaacatgaccaagtacgtatccaagctggaagagcccgctgggaagaagaaaacatctgaggaggaggtggtggtggtggctaagccaaagggacctccagtgcaaaagaagaaaccaaaagtcaaggaagaactttagcttctccaataccaggaaaaaagatgcttattttccagatcctggcatcattttctgaatggattgattccaataaaagcatatatcattgtggtagggtaggtggggcgggggtaggggtggataataaagcctctgagtgtc

SEQ ID NO: 1938 - DNA, 1576 bp, Homo sapiens
aaagcgccacccggaggcggaaatcagcccgcgtccggcgcaggcgggagaagggagaggagtgacatccgtttgtcggaagtcgctcctcccccttccttcgctttttttccttgtcattggttcctggcactcgggccccacctcctccggctacgcccctcacggccgcttttcccgcctccgccggggccgagccgctgttcggctgacagttgaggatggccggagccgagggcgccgctgggcggcagtcggagctggagcccgtggtatcgttggtcgacgtccttgaggaggacgaggagctggagaatgaggcgtgcgctgtcctgggcggcggcgactccgagaagtgctcctactctcagggctcagtaaagagacaagcactatatgcctgtagtacctgcaccccagagggagaagaaccagcaggaatttgtttagcttgcagttatgaatgtcatggaagtcacaaactatttgagctatacacaaaaagaaattttcgttgtgattgtggaaacagcaagtttaaaaatttggaatgcaaattacttcctgacaaagcaaaggtaaattctggcaataagtacaatgacaacttttttggattgtactgcatttgcaagagaccttatcctgatcctgaagacgagattccagatgagatgatccagtgcgtagtctgtgaagactggttccatggaaggcatcttggtgccattccccctgagagtggggattttcagaagatggtatgccaggcctgcatgaaacgttgttcttttttgtgggcttatgctgcacaattggcagtaaccaaaatatccactgaggatgatggattggtgcggaacattgatggaataggtgatcaggaagttatcaaacctgaaaatggagagcatcaagatagtaccctcaaagaggatgttccagaacagggaaaggatgatgtccgggaggttaaagtagagcagaacagtgaaccatgtgccggctctagttctgaatctgatctccagacagtgtttaagaatgaaagcctcaacgcagaatcaaaatctggctgcaaacttcaggagcttaaagctaagcagcttataaagaaagacactgccacctattggcccctgaactggcgtagcaagttgtgtacctgccaagactgtatgaaaatgtatggagatctagatgtcttattcctgacagatgaatacgacacagttctggcttatgaaaacagagggaagattgcccaggccactgacaggagcgatcccctaatggatacccttagcagcatgaatagagtccagcaagtggaactcatttgtgaatacaatgatttgaagactgaacttaaagactatctcaagagatttgctgatgaaggcacggttgttaagagagaggacattcagcagttctttgaagagtttcagtcaaaaaagagaagaagagtggatgggatgcagtattactgcagctagagtggagtatgaagctttctcattcaagccaatgaaaatgcgcttcccattcttggaataaaagaggtgtggttcac

SEQ ID NO: 1939 - DNA, 2480 bp, Homo sapiens
aaaatggagaaagtgtgtttggaaaataacactaagggtgtggctaactgaccatttgatatggaggtcagtataggtgtgaaccatggacttaaccaaccagcggtttcccagcaggacaactgtcagtttgaactaaataggaaggggatggtaaagaatgaaggaaagttgttggactttttggattttacaggacaggactatagagctattcagttgtgaatgtgtgctcttgttaaagacaaggggaagaatgaacccaagggcaatgcagaggtcagtaggttaccttcttagtttcaaaaggagggaccattgccttgctttcaacagaaatgagctccacccaaagctgttggggataccacctcctggcagagccctggagctgcaagtcctgtccagcagagctttttggagaagaccacctcccaagtgggtctgcaagactgtacctctgccccagtgtgtccagtggccctagaggggagagcatcaagccacagaggattatcttcagcctgaagacctggtgaaagttgtcttgtgaggtttgggactcccttgggatctgttaacccttctttcttttctatttctccgtgtcagaatgggaatgtctatctatgtctgtctcaccactgtattttgaaaacatgtttggtttcacatgtttgcagctgtgaattttgcctcagaatgaattgtactctgagtctcaccttatctgatttagatgatacttagataagagtttggagttgatgatgctagaatgagttaaaactttgagggctttggggatggaatgaatatattttacatgtgagaaggatatgatctttgcggggtttggaacagaatgcagtggactaatgttcgtgttacctccaaaatttctatattgaaatcttaatcccaatatgatagtatttggaaatcaggcctttgggaagtgattaggtcatgagggtagagccctgataaatgagattgatgcttttataagaagaggccatttcatatggaaccaaaatagatcctgtatagccaagacaatcttaagcaaaaagaacaaagctggaggcctcatgctatctgacttcaaactatactacaaagctacagtatccaaagcagcatggtattggtaccaaaacagacatataggccaatggaacagaacagagacctcaaaaggaacatcacacatctacaaccatctgttctttgacaagtctgacaaaaacaagcaatggagaaaggacctcctatttaatacatggtactgggaaaactggctagccatatgcagaaaattgaaactggaccccttccttaaaccttctacaaaaattaactcaagatggattaacgatttaaatgtaaaacccaaaaccataaaaaccctagaagaaaacctaggcaatcatagggatgggcaaagacttcgtgaggaaaacgccaaaagcaattgcaacaaaagccagaattgataaatgggatctaattaatctaaagagcttttgcacaacaaaagaaactagcatcagagtgaacaggcaacctacagaatgggagaaaatgtttgcaatctacccatctgacaaatgtctaatatccagaatttacaagaaacttaaacaaatttacaagaaaaaacaaacaaccccatcaaaaagtgggcaaaggatatgaacagacacttctcaaaagaagacatttatgagccagcaaacacatgaaaagaagttcaacatcactgatcgttagagaactgcaaactaaaacgacagtgagataccatctcatgccagttggaatggcaattattaaaaagtcaggaaacaatagatgctggtgaggctgttggtgggaatgtaaattagttcaaccattgtggaagacagtgtggcaattcctcaggatatagaaccagaaataccatttgacctagcaatcccattactgggtatatatgccaaaaggaatataaatcattctactataaagacacatgcacatgtatgtttattgcagcactatttacaatagcagacatagaaccaacccaaatgcccatcaattgatagactggataaagaaaatgtggtacatatacaccatggaatactatgcagccataaaaaggaatgagatcatgtcctttgcagggacatggatggagctggaagccatcatcctcagcaaactaacacaggaacagaaaaccaaacaccgcatgttctcacttataagtaggagttgaacaataagaacacatggacacagggaggggaacaacacacaccagggccagttggggagtggggggcattaggacaaatagctaatgtatgtggggcttaaaacctagatgatgagtcgatagatgcaacaaaacaccatggcacacatatacctatgtaacaaaactacacattctgcacttgtatcccagaacttaaagtaaaatt

SEQ ID NO: 1940 - DNA, 1869 bp, Homo sapiens
agtagagagtctagaccccacccagtcttcatgtacggccgaccgcaggctgagatggaacaggaggctggggagctgagccggtggcaggcggcgcaccaggctgcccaggataacgagaactcagcgcccaacttgaacatgtcttcatcttctggaagctctggagtgcacacctcttggaaccaaggcctaccaaccattcagcactttcctcacagcgcagagatgctggggtcccctttggtgtctgttgaggcgccggggcagaatgtgaatgaaggggggccacagttcagtatgccactgcctgagcgtggtatgagctactgcccccaagcgactctcactccttcccggatgatttactgtcagagaatgtctccccctcagcaagagatgacgattttcagtgggccccaactaatgcccgtaggagagcccaatattccaagggtagccaggcccttcggtgggaatctaaggatgccccccaatgggctgccagtctcggcttccactggaatcccaataatgtcccacactgggaaccctccagtgccttaccctggcctctcgacagtaccttctgacgaaacattgttgggcccgactgtgccttccactgaggcccaggcagtgctcccctccatggctcagatgttgcccccgcaagatgcccatgaccttgggatgcccccagctgagtcccagtcattgctggttttaggatctcaggactctcttgtcagtcagccagactctcaagaaggcccatttctaccagagcagcccggacctgctccacagacagtagagaagaactccaggcctcaggaagggactggtagaaggggctcctcagaggcaaggccttactgctgcaactacgagaactgcggaaaagcttataccaaacgctcccacctcgtgagccaccagcgcaagcacacaggtgagaggccatattcttgcaactgggaaagttgttcatggtctttcttccgttctgatgagcttagacgacatatgcgggtacacaccagatatcgaccatataaatgtgatcagtgcagccgggagttcatgaggtctgaccatctcaagcaacaccagaagactcatcggccgggaccctcagacccacaggccaacaacaacaatggagagcaggacagtcctcctgctgctggtccttaggtgaatgaagaaggaagaggattccaggctgagagcactggacgtggcaactgttcagaggagaggcagtcttcaatttctacattcattcagaaaaatgttttttgagcctacaatactgagcgcaacaaggctgtggagacccatggtgaggagcatggagttaactaaaggatgtgtcagggaagaaagacttctcaaggaggtgcctccatcagacccaaaggactcatgggggctagctgcacctcacatttcttggacatataccgttggacatgtctatcttctggaaactatggcatggacagtaaggattcagaagtgcatgaaggcaccctgcctctgcagagcagaaagatcatagacaacatttatgaatgtgcccagtgctgccaagaagagaagccggtcctctgcaggctcaagcctatctgggcctctggggaagccccacagccttggctgtgcctgcccctgccctctcacccctaccctgaccttgtcctacttcactgcctttgtctgtgttactagtggccccagtatacctgggatggacatccaggtgcccttcatccaagctcctatgtgaggggaatggacattattaaaagaacaggggcagaagtggctcatttatgacccattcactagccccagggattg

SEQ ID NO: 1941 - DNA, 2387 bp, Homo sapiens
ataacggccgaggagggggcgtgcctggccgtggccagtggcgggttacaacctggaaaccaaaggtgccccagagggcgtctaagcggtcgaccgaaagttcagagcgggagcctgagacccaaggaagggcaaaggcgagccaaagccatcagttgagcttcagaaaagtcccacttgaaaggctggaaaagcaagtcacaggcaagacttgtcctagataaagtaaagtgtgaggaaggggtgcaaatcaagattagaggcatacctgatgtggacctccgaggatcagagatgtcctagtcccagctcatccaccaacttgccatatgactttgggcaagttacctcaccttcagatgcctccattggaaaagaatacaaggaaactcagccaagaaattcattgataaaaacacgcagcttaccctccaggtgtacagggaacaagctgactcttgcagagagcaacttgacatcatgaatgatctctccaacagggtctggagtatcagccaggagcccgatcctgtccagaggcttcaggcatacacggccaccgagcaggagatgcagcagcagatgagcctcggggagctgtgccatcccgtgcccctctcctttgagcccgtcaagagcttctttaagggcctcgtggaagccgtggagagtacattacagacgccattggacattcgccttaaggaaagcataaactgccagctctcagacccttccagcaccaagccaggtaccttgttgaaaaccagcccctcaccagagcgatcgctattgccgatcgcctgctgggcagcctggggcccgtgcccgtgctgcggttcgacgcgctctggcaagtgctggctcgtgactgcttcgccaccggccgccactactgggaggttgacgtgcaggaggcgggcgccggctggtgggtgggcgcggcctacgcctcccttcggcgccgcggggcctcggccgccgcccgcctgggctgcaaccgccagtcctggtgcctcaagcgctacgaccttgagtactgggccttccacgacggccagcgcagccgcctgcggccccgcgacgacctcgaccggctcggcgtcttcctggactacgaggccggcgtcctcgccttctacgacgtgacgggcggcatgagccacctgcataccttccgcgccacgttccaggagccgctctacccggccctgcggctctgggagggggccatcagcatcccccggctgccctaggggccaggaccggcgtgacagcctccagataaggaaaattattagtgtctccagatccaactttgaaaaatggaacattcagttcatgcaggaattcaactgccatctacaaaaatcaaagagggagctccttttcaccattgtccaaaaacactgttgttatgacaggcaaggaataacatacaagtagaaaaacccctcatcttaggcagtagagggacgctcagcaacttgaaagcaggcaaagatttgttctcagtcatttcattcaaatgcaaacattcatttgcatccacccatccattagcccaacaaacgtttggtgctggtctttgctggctacaggaatctggaaaagggctgggcgtggtggctcatgcctgcactttgggaggccgaggcgggcagatcacctgaggccaggagtttgagactagcctgaccaacatggtgaaaccccgtctctactaaaaatataaaaattagccgggtgtggtggcgggcacctgtgatcccagctactcagaaggctgaggcaggagaatcacttgaacctgggaggcggaggttgcagtgagctgagatcatgccactgcactccagcctgggccacagagcgagactccatctcaaaaaaaaaaaagaatctggaaaagaacctttcccctggccagaccctacctgccccaggggcccaaggccaaatgaacaaacatgaaacggtcatgacctaatcctgacccagaaaaccaggcagtgaaaacatgaatagcctcaaaggctttcccttctactcggccaaacgagcaggaaaaggggctatttcaattcttggcgaaagggggaaaatggagcatttttttgcccagcctctacataaggatccatggctggcagggcccattcaacccgagccctttcaggcctcaaagcacgctgcctacttaaaagtgaacctcagtcacttttttcagatataacgtcactgcttgaggttacctatttagtgctcttcaacatccttccctagtattcatcaacaagactcaggaaattggtaaatgtcagcaaatgcttgctgaaggaatcagtggatcacaagttataagagtaaaatctcagtttgctgtc

SEQ ID NO: 1942 - DNA, 1880 bp, Homo sapiens
gaaccgttattggccgggtcacaagcccgcccgcccgctgctggagccgcgaccatggaggagtctggcatggctcatgaatcagcagaggacttgtttcatttcaacgtagggggctggcatttctcagttcccagaagcaaactctctcagtttccagactccctgctgtggaaagaggcttcagccttgacctcttcagaaagccagaggctatttatcgacagagatggttccacatttaggcacgtgcactattacctctacacctccaaactctccttctccagttgtgcagaactgaacttgctgtatgagcaagcattgggtttgcagctgatgcctttgctgcagactctagataacctgaaggaagggaaacaccatctacgcgtacggcctgcagacctacctgttgctgagagagcatctctgaactactggcgtacatggaagtgtattagcaaaccctcagaatttccaattaaaagcccagcctttacaggcctacatgataaggcacctctggggctcatggacacacccctgttagacacagaagaggaggtgcactactgcttcctgcccctagacctggtggccaaatatcccagcctagtgactgaagacaacctgctgtggctggctgagacggtggccctcatcgagtgcgagtgcagcgagttccgcttcattgtgaattttcttcgctcacagaagattttactaccggataatttctccaacattgatgtattagaagcagaagtggaaattctggaaatccctgcactcactgaagccgtaaggtggtaccggatgaacatgggtggctgttccccgaccacctgttctcccctgagccccgggaagggggcccgcacagccagcctggagtccgtgaaaccgctctacacaatggccctgggtctgctggtcaagtacccggactctgcgctgggccagcttcgcatcgagagcacgctagacggaagccgactgtacatcacagggaatggcgtcctctttcagcacgtcaagaactggctggggacttgccggctgcccctgacagagaccatttccgaggtatatgagctctgtgccttcctagacaaaagggacatcacctacgagccaatcaaagttgctttgaagactcatctggagccaaggactttggcacccatggatgtgctcaatgagtggacggcagagatcactgtgtattccccacaacagatcatcaaagtgtatgttggaagccactggtacgcaaccaccctgcagacactgctgaagtatccagaactgctgtccaaccctcagagagtgtactggatcacatatggacaaaccctgctcatccacggggatggccagatgttccgacacattctcaacttcctgagacttggcaaactgtttttaccatctgaatttaaggaatggcccctcttctgccaggaggtggaggaataccacattccatccctctcagaagcccttgcacaatgtgaagcatacaagtcatggactcaggagaaagaatctgaaaatgaagaagctttttccatcaggaggctgcatgtggtgacagaagggccagggtcactggtggagttcagtagagacactaaagaaaccacagcctacatgcctgtggacttcgaagactgcagtgacaggactccatggaacaaggctaagggaaacctggtcaggtccaaccagatggatgaggctgagcagtacactcggcccatccaggtgtccctatgccgaaatgtcaagagggctggcaaccctagcacatactcacactgccgtggcttgtgtaccaatcctggacactgggggagccaccctgagagcccccc

SEQ ID NO: 1943 - DNA, 1611 bp, Homo sapiens
atactggagatctaggtgtaactgtctctagggctggaatgacagacatcaccatccactcagttgtccaagccagaagcctggggcttatctttgactctgacttgtctttaattttcatccagtcactaagtcttgttgatttttgaatcagactgccaccctccattcccattgccaaatttcaattcaaatcactgtcagctttgtctccattattgcagttgcctcttgttttatcctgccatgccatcagccttgttcctctccaaacctttctccacaggaaaggagaatttttcaaagtgaaagtataattgtatcatcttcttatttaaaatctttcagtggctttccaccgttttcagagtaagattcagtctgttaaaatggcttacaacagaacagagaaccaaatacagcatgttcttgttaccggaaggggtcctgatccagaccccaagagacacaagaaataattcaagctgtgcagacgttcttgcagaggaaggagaagtccacgtggcattatgtagaggacaaggtggaactcctgcggataagccccagagagaatggcacaacagttggcaagtggttgccatggcagccctgggggggctcattttaagcgacgtgtatccattcagctgtaaggctgtggcagggtacaagtgcactggatataggagtcaagataagtcctttcatgtagaaggtgctttgaaccatatcttcaccaggagcttaccttttgaaggttctcaacccagaatcttcaggatcaaactgggtaaccagtggttttcctttccagaaccagaagcacttgtaggaaagttgaacaggggtttcctggaagcaccttcatgtcatcctatcaaaaccataaatgagaaactcattgctgaattaggcaaagttttcccgctaaaaaggctgaagtgttcctaccctttgctgccacaggaaggtaccagtgttcttcctttctggaattgtgactttctgtcagctgctttttggattagtctccatgaagataactcaaattctgagtccctgactggtgggacatcacaagatgtggaagactttctagtgtcattttcagaacttagccttctcaagaatcctggaagagatggtaaagaagaagcttgtgaaggaacctgtggccaggccaagatctgccttagaccttctctcctagtgcatgttcaggatgtcatcgaagtaccagacttcctctcaggttctctgcacatcctcagtggacctgtctttcagaagtgccacattttgcctttcacaatgccagcatttcatgaaactttatttatccttggggttaatcaaaatctgaaggatggctgtcttcaatcactgctggatcatctgaagggcattctagatagcctgctgacccagacattgccggagagctctaagctgagcagtttagtcaaatttgtccttcagtcaaatggaaaggattatatgattcgtgtgaagactcataattttagcccagattgtactgaggatctaattattgggtctgttatcacatctgccactagtgttatacataaagaccagtgttttgtg

SEQ ID NO: 1944 - DNA, 2262 bp, Homo sapiens
atggatcccatcgtcaaaaaatggcggcattagcaggatctgagggtggaggttttggccttctgatgtcaaaaggcgaatcgggagacacggaaaccctcactgtgcatcctctatagaggggtcagaaccactccatgaaatctgtgcagatcagaacagaagctggcccacggctccacatcgaacctcctgtggactattctgatgattttgagctgtgtggggatgtgactctccaggcaaacaacacttctgaggatcgtccgcaggataccaaatctcccaccagtaccaagccctgtggttttaacttctcccttctgaatgcatgtggacattctgacccttcaagcagcgtggacaaagaaaggatcctcttaactattcaggatgtgatggagctgagaagaagcctggaacttagtgtaaatctacaaaggaaacaaaaggattgttccagcgatgagtatgactctattgaggaagacatactctctgagcctgagccagaggacccggcactggtgggccatcccagacatgaccgccctccttccagtggcgactggactcagaaagatgttcacggggaacaggagacagaaggacgctcttctccaggcccagacaccctcgtggtgctggaatttaacccagcttccaaaagtcataaaagggaaaggaatttgtctgcaaagcggaaggacaatgctgaggttttcgttcccaccaaacctgagccaaacctgactccccaagctcctgctgtattcccagaccaggagaggatgtgctccagacctggaagccggcgagagagacccctgtctgcaacccgcaaaactctttgcgaggctgagtacccagaggaagatgcctctgctgtgctccaagccatccaggtggagaacgcagccctgcagagggcgctcctcagcagaaaggccgagcagccagccagcccactgcaggatgcagaaggaccaccagcaaaaccatggaccagtctgctggaggagaaggaagagacccttgagctgcttcccatcaccacggcgactactactcaggagccggccggggcagcaggaggagccagggccatcaaccaggccatggacagaattgggcttctgggaagcagacaacagcagaagcttctgaaagtcctccaggccgtcgaaagtgactctgcccatctcggcagggtggtttcaccaaccaaggagcaagtatcagacacagaggacaaacagagaatgagggcagacgagatcaaagatgccttctacgtgaccatggagatcctgtccaactggggcaactcgtggtgggtgggtctcacagaagtcgagttctttgacttgaatgacacaaagctttatgtgtcgccccacgatgtggatatccggaacacagccacgcctggggagctgggccgcctcgtcaacaggaacttagctggcaagaaagactcctccccgtggacctgccccttccacccaccactccagctgttttttgttattcgaaacacaagacagctgggggacttccatctggccaagatcaaggttcggaattactggacagctgatggctctctctctgctgcccaggctggagtgcagtggcgtgatcatggctcactgtagcctcgacctcctgggctcaagcgttcctcccacctcagcctcccaagtagctgggactccaggtgtgcacaccacacacagctagtttttttattttttgtagagataggctggtctcaaactcttgacctcaagtcatcctcccgcctcagcttcccaaagtgctgggattacaggcgtgagccaccacgcccggtcctgattgaggaatttaaaagactactctggttgatttggagaatggatcagggggcagagggagccccgagagaggaggctcaaggcatagaacagcctaagaacagcctcgctgaagatggtggtggcctggatgagggtgtcagtgctcttggggtgcactttaggtgggctcaactcatcctatgaccatttgcattttcagcaatgcctttttctggaaagaagttttcaaatgaatgcaaaagtgaagagattagttcagtaatgaggcgtgtatccatcacctgcttcaataattacaaacattctgctattgttgtttcacgtatccccttaacatttgaaagtaaattgtagctatcacactatttcactcataaatccttcagtatacatctctaac

SEQ ID NO: 1945 - DNA, 2176 bp, Homo sapiens
aaggtagagacaaccatgaaagttgaacacgtcatctgtgcaggaccgttcatactgacatgtggcttgacaccagaaatctgggtattgtaatatcatgttggaaaggagtttgtgtgcctcaaacaactactctagagatgttttacaatgacaatgatagagtagaggaatcttctaattcctaccaaatcagaagggaattcctccttcctgcctgcctgcctgccttcctttctttctctacttccttttctttctttctttccttccttcctctctctctttctctctttcttcctttctttccttctttctttctttctctctctctctccccttccttccttccttccttcctgagacaaggtcttgctctgtctcccaggctggagtgcgatggtgcaatcatgattcactgcagcctcaacatcccaggctcaagtgatcctcccgcctcagcctcctgagtagctgggactacaggggcttgccaccacgcccagctaatttgcgtgtgtgtgtgtgtgtgtgtgtgtatgtggtagagatggggtctcactatgttgcccagctggtctcaaactcctggtcataagcaatcctccacctcggcctcccaaagtgttgggattacacgtgtgagccaccatgcccagtctctatttcttaatagtgtcagcaactgaaagatatagaaaaggaagtctgtttggtgtgtctgttgcctccccaaaatcttcagcctttgtaggacagtgcatcccactgggcaaaaccagagaatattcttttgtgagcccgtaagtaattgtctgcaatagacatgcaggggcctctactgtcatctcttatgcaactgaacttcctaaaaactgtggtgtttatctcttctgttgctcagcactgctgggactgggactgcaaaaaacaaaaaagcacccaggtttactgcccttaaaaaactgactgctagaggagatgagcatatacatgacaggatgtgataagatattaagcagaatgtgatcagaatcataggaagtatatacaaaagatgggaacactaatagaggtgactacaaccacctgctttgtagaggagatgacattcaagctgagttttaaaggatgagtaggagttggccagaaatggagagggagaataaaccatggggaagtagtacacaggcatggcatgtttagagcatttttggagcagggtaaccagaatatactggaggttgctagtagaggagattggaaaagaaagggtcagattattaatggatttacgtattatgcaaagaagtttatatttgacccttttttttgacaatctggcatttagccttatcataaaataaagatctctcaatgcttcacatagaaacttcatctgatctcttgaggatcaaaaaatggctttctgggttttttttctttctctctctcttttgtttttaatatctcacatatactttaaccaccataaattcaagttttctcttactcagacatgagttgcttaacaatggaataattcatttctttatttctcaacattgcccttttgaaggttttaggttttaggttttctaaaactctgaatacttttggctatcattatccagggaaagcctgaagacactccaaagcacaaggacaaaagagaccttgttagatctaattaagcgctccagcaccaggggcacggggagcaagagaaaaatacagagtcagaaactgagccgagttctatggtggtacagagtgaggcctgcttcactgtgggctggggctggggcagggaggccttcatcttgctctaagctgtgcaaagtacctcccacgaggctaagtatagagctactcaataaaaattatgcaatgtggctgggcacggtggctcacatctgtagtcctagcactttgggaggctgaggcaggtggattgcctgagctcaggagttcgagaccagcttgggcaacacggtgaaacctcgtccctactaaaatacaaaaaattagctgtgcatggcagcatgtgcttataatcccagctactggggaggctgaggcgggagaatcgcttgaacctgggaggcggacgttgcagtggggcaagatggcgccattgcactccagcctgggtgacaacgcgagactccatctc

SEQ ID NO: 1946 - DNA, 2534 bp, Homo sapiens
caggatgcagaggccacggaggagggctgggccagcttctcctgtgagctgtcccacgaggatgaggaggtcgagtggtcgctcaacgggatgcccctgtacaacgacagcttccatgagatctcacacaagggccggcgccacacgctggtactgaagagcatccagcgggctgatgcgggcatagtacgcgcctcctccctgaaggtgtcgacctctgcccgcctggaggtccgagtgaagccggtggtgttcctgaaggcgctggatgacctgtccgcagaggagcgcggcaccctggccctgcagtgtgaagtctctgaccccgaggcccatgtggtgtggcgcaaagatggcgtgcagctgggccccagtgacaagtatgacttcctgcacacggcgggcacgcgggggctcgtggtgcatgacgtgagccctgaagacgccggcctgtacacctgccacgtgggctccgaggagacccgggcccgggtccgcgtgcacgatctgcacgtgggcatcaccaagaggctgaagacaatggaggtgctggaaggggaaagctgcagctttgagtgcgtcctgtcccacgagagtgccagcgacccggccatgtggacagtcggtgggaagacagtgggcagctccagccgcttccaggccacacgtcagggccgaaaatacatcctggtggtccgggaggctgcaccaagtgatgccggggaggtggtcttctctgtgcggggcctcacctccaaggcctcactcattgtcagagagaggccggccaccatcatcaagcccctggaagaccagtgggtggcgccaggggaggacgtggagctgcgctgtgagctgtcacgggcgggaacgcccgtgcactggctgaaggacaggaaggccatccgcaagagccagaagtatgatgtggtctgcgagggcacgatggccatgctggtcatccgcggggcctcgctcaaggacgcgggcgagtacacgtgtgaggtggaggcttccaagagcacagccagcctccatgtggaagaaaaagcaaactgcttcacagaggagctgaccaatctgcaggtggaggagaaaggcacagctgtgttcacgtgcaagacggagcaccccgcggccacagtgacctggcgcaagggcctcttggagctacgggcctcagggaagcaccagcccagccaggagggcctgaccctgcggctcaccatcagtgccctggagaaggcagacagcgacacctatacctgcgacattggccaggcccagtcccgggcccagctcctagtgcaaggtgaggcggccaagtgtgctcgggcctaggctttgaatggcacggagacttggaggtggacaggcccagcctcagtttcttatcatgagggtatagggggtgcaccctgggtggtcactgaggctccccagcatggctgtgaatgagctgctggtgctcacttactcgtgtgtttatttggtcactgtgtgtttctcccacatgccccgtgtgcctggcccccatgcgtaagctcagcgtgtatccgtacataaaacgtgtcacccttatcccagagggacagcctgactcagccgtgccaggcagcctcaggtgctcccagggaagaactgatggtcattagggttgtcattgagagttacagtggcattttagtctttttcttgttgtttacaacagaatacctgaaactgggtaatttataaaggaaataaatttacttcttacagctctggaggctgggaagtccaaggtcaaggggccacatctggtgagggcccttttgctgacaggaactctctgcagagtccccaagggacggcacagggcatcccatggggagggggttgagtgtgctagcttgggcctctcttcatcttcttttaaagccaccactcatatggaagcactttaacccattaacctgttaacccgttgatccatgaatgggttaatccattcccgccttggacccaatcccctcttaaaggctccacctcttaatattgccacattgggattaagtttcaacatgagtttccagggggacattcagatcatagtaggtggctgttcgatcttactgtttggctccacatttgagtggcaggcagagtgagagctgtcattctctcaactctgtagataagaaaactgaagctttagtgggtccatggccagggcaaggtcatcaggcacattgggatcagagcaggcgaggcccagccccatcaccgcagccttcacttggctctgaagtcccgggctggtgtccagagctgagtttgcaggaggtccctactggggtctgaccacagggcgttcacagggttcagtatttgaaaggccccagttgtgatcatcagaagtaacgtaaaccaggaatcatcactgattttttctctccaatggatttggtgaccctggtgaaagtattctgttagcacagtaacgccccatgatctaataaagttggtacccagagttaatttttaaaaaagtc

SEQ ID NO: 1947 - DNA, 1817 bp, Homo sapiens
atactgcaaagtttgggatccacagtctacaaaaccccacagctcctgagaattctctcgcctgccttcggcccttaggctctggtagattgcaaataacatgctttctttctgttcccgggtggcttcggacccctgtcggatcggaaatcccaagtaaggtacctgccctgggcagatttgagctttcttcttggacacctaatacccacagtcctccagtaaatcccaagtaaggtacctgccgtcagcagatttgagctttcttcttggacacctaatacccacagtcctccaggtgggtcctaaagttcataggatccgcgatgggggtcccaagccagggagggacgaggggctggctctcagtccccgcctcgcgggggggtgcctcccccccccctgcgatgggggtcctaagagccaggggggaagaggggatggctgtcagtccctccctcgtgggtggtacctccgccttctgcgatggtggtcctaagagccagggggagacgaggggctggctctcagtccccgcttcgcgaggggtgcctcccccccccgcgatgggggtcctaagagtctggggggaaagaggggctggctctcaatccccgcctcgcgggggtgcctcccccaggtgctatgtgggtcctaagagccaggggtgaagaggggctggctctctgtcccctcgtcacgggggttgcatcacccaccctgcgatggaggttccaagagccaagggggtaagaggggctggctctcagtccctgcctcgcgggggttcctccccccctgcgatgggggtcccaagagccagggggggaagaggggctggctctcagtccccgcctcgcggagggtgcctcccccaccactgcgatgggggtcccaagagccagggggggaagagggtctggctctccaccaccacaaaatggggggcctttatgttcaggttttgcccaagagtcagcttatttgcttcttgtactagcagggcagttgctgccaaggccctcaaacagggtgccatcctttagaaaccctgtctagttgttcagagacgtaggccaccggcctcatccagggccccacagtttgggttaaaagtccacctgccatcttttctctctctgacgcatacaatggaaaaggctttgtcagatcggatagccccagggctgaagctgccagaagtttttcctttaactcatgaaagacttgctgttgttgggatcccccttccaaaggttcccagtccccgccccctttgtgacatcatacaaagtcttggcttatactgcaaagtttgggatccacagtctacaaaaccccacagctcctgagaattctcttgcctgccttcggctcttaggctatagtagattccaaataacctgctttctttctgttcccgggtggcttcggacccctgtcggatcggaaatcccaagtaaggtacctgccgtcggcagatttgagctttctccttggacacctaatacccacagtcctccaggctccagtagattgcaaatgacctgcttactttctgttcccgggctgcgttctgacacctgtcggatagtaaatcccaagtaaggtaccagccgtcggcagatttgagctttcttcttggacacctatacccacagtcctccagtgttttagacgcccagctgcacaacttgattgccttacaaatgacctgcttccaggatgcggaaattcctaatttcttctgtgacccttctcaactcccccatcttgcatgttgtgacaccttcaccaataacataatcatgtatttc

SEQ ID NO: 1948 - DNA, 2048 bp, Homo sapiens
gagctcaggttcagcctagagagagaggaggccaccatggaccagccagccgtcgccaccgcttccacctcaataagggaagacctggtgggtggagaatcattcatcacagcttcgaaaccagcccaaaagacttcctcttttgaaagagaaggatggtggagaatagcattaacagatactcctatacctggcacttaccacttgaaaacttttattgaagaatccctattaaatccagtgatagcaacctacaattttaaaaacgaaggaaggaaaaagccacctcttgtgcaaagaaacaatccagtcctaaatgatcttccgcagtatatgcctcctgacttcctggacctgttaaagaagcaagtggctacttactcattcaaagacaaaccacggccaagccccagcacactagttgacaaagatcagtcacttcagctttctccggggcaatacaacgtgcttcctgcaccagttcccaaatatgcttccaggagctgtgtatttcgctcaacagttcaaagattcccaacaacctattttattcccgtaagtataatgtagacagttaactcatgatgaatttgatgtttaaaatacgctgtgctttctggagtggagcaaggtggccacatagaaccctccagtgatcgttccccctagcaggaacaccattatccacacaattatccacacaagaaaacacctctgtaagaaccaaaaagcaagtgtgggatcgcaataccaggttttaacattgtatcaaggaaagaggcactgaagagggtagggtagaaaagacagtcttgaattactgacactaccctcccccatcccctggcagcagccacgtggcatgaagagagaatctgcccttggggaagagggaatgccgtgacggggggactttgcacgggaacaccgtgctgcctgtaacagggaaagcaacacaggacagaattcagctagtgcccatggagggagcatttagaccagcactagccagccaggaattgcccatcccagccgttcgatactgagttccagctctccctaccactgtgggctgaagtgctctgaggtcctaaataagcttgaaaggcagtctcggccacaaggactgcaattcctgggcaagttcaggtgctctgctgggctcagaggcagtggacttagggtacacaagacctagtgagacaccagctggggcagccaaaggagtgcttgtagcagccatcccccagccccaggcagcacagcttgcagcttcaagagagaggccttccttttgcttgagaggaggagaggggagagtaaagaggacttgtcttgaatctggataccagctcagccacagcagaatagggcacctcaggcagagtcctgaggcccccataccaggccctagctcccagacaacatttctagacacatctctggctggaagagaatccactgccttaaagagaaggacccagttctggcaagattcatcacctactgactaaagagcccttgggcttcgaataaacaccagcagtggccagacaacactcactgcaggccttagccagtgctgtgctgcttcaggtgtgatccagcactttcccagctacagtggtcacagagagagactcctgcttgaggaaaggagagggaggagtaaaggggattttgtcttgcagcttgggtaccagttcggccacagtgaagtggagcaccaagcaggctcctggggttcccaattccaggcattggctcctggatgtcatttctggactcccactgggccagaggggagcccactgccctgaagggagagacccaggcctggcagccttcctcacaagctgactgaagagccttgagtgaacattagtggtatccaggcagtacttgctacaggcccgagtggcatagagagattctttctgcttgaggagaggggagggacgagtggaaaaactttgtcttctggcttgggtgccagcttagctgcagtagtatagagtacccaataaattcctaagtttcctgactcc

SEQ ID NO: 1949 - DNA, 1820 bp, Homo sapiens
aatcatttattaagcattgccctggcctaagacaccacatgggtcatttcttccaggctccaacttgcttctgctttgccatatggtaacacgccgtattatggaagcaccatcattaccgccatttgcaggggaagcctaaagagataaatgccagccagcctccctgtctctggggccctggagaggccttcaacacacctggcctcactgccctgtggcttcaacaaagaggccgagcatctcctataaaccttgaggtccatggatgacatagcggaatgatggatttcagaaaaggcaggtgcttcccactctttaaatttttgtttattctttccaagtttcccatcaacagccctgcagtaaaaattcagggcttcagagacaaatatttcatgagtacagactgtgatgaggaaaagcaagccattccctctctatcaggatccagagcacactgctgttacgactccagaaccgataaggaagctatgtgtggaagtatgagctcaggtcgccttctgaccctctgtgacggtctatttcaggcagttatggatagataacattacagacactgggatctttaacaaatgacacaaacaagagaaggcagataagaaaatggctgagaagtggcagagtcaaagttccgatgcaggcccatgggccctcttggttcacctcctccagcccaggcttctaaaactacttcccatacctgctgtattgcagcaaccatgctaatttagcaacttcccatcccagatgcataaagaagatggaaccaattcaccatgaatctatccacccaggcatttagacacaaagatgaaaataacaacaggccctgtcctcgagaaactcctcgtccaacaggggaagggggagagtgccagcaaacagggccgttgagctctgtcccagcagtggggacaggcttgcatagaaccaccctcactcctgcagcaacttccctcatgccagacaagaatagagtgaaaggagacccccaccttagctttcttggcctggggctccatcctgctgtgcctagcaagaacacaacacacagacacacaccaatagatacatgtatcttaccactactgggggagaaagaaaagaaaaaataaatcactgggaaccgcagcagggtgagaacccagacctcagcaagtcccaatttcagaggtgacagcatctttaaatgccgcaggagtgcgctcctagctgaggcaggtgtgtggattcaacagtcgaccccagctgtcgcagagcgcgaggaagctgcgcagtaaaccccttacatatcaacctctgaggaccggtttttctgcacctggtggtccttctagacgtctaggaggatcgtgttctcaggagagggttcttcagcatctgtgctgaagaacactgccccagcgggtcacatgcaagattccaccttcgagcaacatagctgacactctgcagcccagttgtcacttgtaacaaaccccagtgggtcacatagtgaggggaggcaaggcagcgtaaggcagtggctgaactatcccagaaaacaaggatcacaggcccccagtgacaccaatgttgcagaaacacctgcagtggcaagtcagatgtcctccaggaccaggcagataacaaggagtaggggtctgcagaggcctcgggagggtctgcaccatccaaagaaatcaattgttctgcacagtggtaaggatccagtgttcccagcacttccaaacatttgaatgaagccagaattccagataattatgtgaaatccccaattactaaatattggcaac

SEQ ID NO: 1950 - DNA, 2331 bp, Homo sapiens
gctgcgctgctgcttggtcagccagcgtctgggatgggagcgctcctgcattttacatgactgcggggcctgttccttgcgcctgtctggtcgcgtcacatcatggagggtttctcggggcggccggccgcctctgagcacagccagggtggtgtttgcagcacagctgctgcctaggcctcgctgcggaggtgctgggccacggccccgtggaggcagagccgcagggccatcgacatgtcctttgaaaacgggcatttccccaactcatgcaggtggaggggagagcgaagccaaatgggacaccggcccccacacactgccccggctcctgcatttccggagatggaaacctggagagcagctgggtatggcgcatgattgcctgaaccatatgaaggctggcgctgtatgtgtgaacgcatgtgtggcggaacatgtgtgcgcctgcacctgtgtgtatgaatgtgtgtgcacatgtgtgcatgaatgcgtgtacctggacctgtatgaatgtgtgtgcacatgtgtatgaatgtgcacatgtgtgtatgaatgtgtgtgcctgcacctgtatgaatgtgtctgcacgtgtgtatgaatgtatgtgcctgcacctgtgtgtatgaatgtgtgcacatgcgtatatgaatgtgtgtgcctgcacctgtgtgtatgaatgtgtgcacacttgtgtgtctgaatgtgtgtgcctgcacatgtatgtgtgtgcacgtgtgcatgaatatgtgtgcctacccctgtgtgtatgaatatgtgtgcacatgtgtgcatgtatgtgtgtacctgcacctgtatgaatgtgtgtgcacatgtgtgtatgaatgtgtgtgcctgcacctgtgtgtgaatgtgtgtgcctgcacatgtgtgtatgaatgtgtgtgcctgcacctgtgtgtgtgaatgtgtgtgcctgcgcatgtgtgtatgaatgtgtgtgcacatgcatgtgtgcccgcacctgtgtttatgaatgtgtgtgcactggcatggagtgtgcatgtacatgaacgtacgtgtgcatgcgtctgtgtgtgtgcatggatctgtgtgcaagtgtgtggagtgtgcatgtgtatgaatgtacgtgcatgtgtatgaatgtacgtgcatgtgtatgaatgtacgtgcatgtgtgcacacgtgtggaatgtgtgggtgtgcatgtgaatgtgcacacacgtgtattgtgtgcatgagtgtgcacaagtgtgagggtgtatgtgaatgtatgcatgtgtatgtgcattgggtggatttgtacatgtatgtgcacacatgcgtgtgtgggcccacatgtgcatatgtgcatggtgtgcatatgtgtttgagatggagagagcgcttctcgtgggcaccgtccatgcccagcagattcccagcaagtgaatcaatgattcaataactcaataattatcaatgaaccaatgacccaaagaagaggaggcatttgacactcacgggccaacacccaacctgctacacagggcatcagacacaccgtggggtcatagcacagacctggatttcctatttccaaatcgtgaggataatgaacattttgtttcttaggatcttgaaaacgtgggttggactgcgtcaccccgacccctgcctcaaagcccctccgtggttgcctacagcacagcttgaagccccttggttctgcttcccgggcctgcagcgctggccccagcctggccgagcgagcatttgttcacccaagacctttcccctcctgccctcgtggagcctccacaaggagtaaacaaccacttctgtgagccttgatctccctgtttgtaaaatgcagataaaacgccttcctagctgagcagtaggagcgggggccgccccctgctcagcatgggcctgggtgcaggaacaggaattttctttctgctctgtgagcctatcttttcaagggtagggtccatgttttctccatttcagggtccctcaaagcatcaactctgtgccttgcagacagcggacacgtaacacagccacgcggcgtgaacatgagcagacttcttttttccaggatgtgcacggtttccacgacaatgcccactgcacgccttatggcctcaccagagacgtaaagcagatgccaagaaacttccccccaaaatgggctggcttgccaagcccaggaccgcctgtccagctggggctgggggcaaggatcccattttctgtgactctctttgctctgatggtcaggttcaccggccgtacgtgtaatctgaagcattcggtagcgatctaattaaatgttaacacatcattaaagtgatttgcgat

SEQ ID NO: 1951 - DNA, 2194 bp, Homo sapiens
aacaaaatacatggcccagatccaaaaggataaagcaaatatttcagagaaaagtgtaatgcatcccgagtacatagctgtaaaggcagagaaatcacccctttcccatatactaaaaacaaaggaactgcaggtgaacatcagtcaacaaggggaaaaggcacaagaaggtgaggtggaaatagttgtacttctgagcaaaacttgtccttttgtcacttcttcagctttccttgagttagactcaataaaagaagaggaaggtgaaccacgaataacaagaagctttatgccacatcttgagatccaggaatcattgccttcaaggcaaacagcacctacaaagccaacagagagccttgtaaagaaagagaaacaactccttccacagaaagaagacagagtacaaacagtatccatgcatggcctgatgcaccccaatggtgccgttttcaaggcaaagacatcagcacctccacaagtgttcagcatcactgagcacagtcctctgagtaagagaaaggagccacagtggggcatgaaagagagagcaggacagaagcaggacaggacaggacgtcctcatgtgattctgacaaaaactcatccattcatgccttctctctctcaccatagattctctccttcacaaccaaagcttcctatatcatcaggtgcaggaaaaagcagacttgcaaattcaaatgaaggtattagctcacataaagtaatactaaaagcaaaccaacaaatgccatataaagaggcaaaggacagagtaaaaatagaaggcagggaaggtagaatactccccaaaaggatacatttgagggcagaggcactcccacttgcacttctatgcaatggaaagaactactctttgcacattgaagagcaaggggaaggagtacaggaaagcaaaaaggaacctggagtggttccgaggaaacctgcttcattccctcctcctccattttacctgaattgtgacactagaaggaatgaaaaggaaggcacattaggaaaaacacaattcagttttccaccactaaagattcaggattcatcagattcaggcaaaaaagcatatactgagtcactgcatggttacacattaagcaactcaaaaggaccagtgcaacccacagcacagggagaagagaaaggtggactcagaatagatatggaagacaaaatgctccccaaatgtacagacctgaaagcaaagcaattactactctcagatatactcaataccaaaaaattgcagtggaaaagtaaagaacaaaagagaaagattcaggaagataaaaataaacaagttaaaggactgccaagcattaatacttctttacttactccaccatatcttaagtttgatacaacagaaggacaggagaacgtgataagaattgcaaaagtgtctctcccacagtcacggtccaaggaatcatcagatgcagggagaatagcatgtccagaagcaacccatggagaactttcaagtgatgtaaagcaattaaaagcacacctgctacagaaagaagagaaggatagagaaaaagttgcggatatgaccagtgtactggatcccaacaaaatgtatttgaaggcaaagaaatcgcctgtcttacatacgcacagtttcagtgatcttcagtggaaaactagagagcaagaggaggaaaaggtccagaaagttaaaagtgggccaggtgtcatgttgtctaagagtccttctagatcctccccacttcaccttaatgtgaatacagggtttcaggaggaaagcataccaatattaacaagaccctcttttcccctagtaaaactccaggtatcaccagatactgagggaggcacatgtataaggccaattgctggtgatattttaatctatctacaaaaaggaaaacatgtgtcacagaacaaggaagaggatgacgtgcaaatagtaagcatcttaatattccccaaacatcaggaagagaaggtgcaggaatgtgaaggtgaaccaggtgtggttctgaccaaatctacttcattgccatctctatctcaactagaattggataaagaaacacatttaggtaatgaaatgctaagacttaaaagacctattttgcggagaatatcacacataggggagactgtacatagagagtccgtcgttggtgatatcccaaaagatgtt

SEQ ID NO: 1952 - DNA, 2223 bp, Homo sapiens
atttttctcttgctgccaccacgtaagaagtgcctttcgcctcccgccatgattctgaggcctccctagccatggggacctgtaagtccaatgaaacctctttttgttccccgttttgggtatgtctttatcagcagcgtgaaaacggactaatacaccctctccctaccagcgggtgtagtctgatgaggtctatgcggcagcgttgggtggcagccatggaggaatgctgttgaaatgtcccttctgtcctcaggggccttcagaagccacctggtcagtgtccgagcatggccaaggtgcagggtggctgctgggactccatgcaaggctcctctatgggcaacctctgcggcagcatttcctgcttggctgcccaaggattcccagtgcttcctgcagtcaggcacttcctgcccggttctccctccttcccatcctcctttcccagggaccagacctgcatcgcatcctgaagctcagcctgcctactccttctccatcttttctttatccttcacaactgcagtcctcaattaatctctggtgcacttaactctgtctgcttcctgaagatgctcatagattctgaggattccccatgtgctgtgatgtgagagttaggggcgagggaggaaaacagccagctccactacctgtctaccctccctcccgaccattgagaaagttccctgttagagattcattcctttggaccatgaagccttttgattcctattaaccttgagtgagtcacgcttaagccttttaaaaaattttctgagtttttgtttgtgaaatataacatatataccaatgaacatgagatatataaatgcgttgtatgaataattagaaagcaaactatattccagcaagcgaaaacataacacactgccccagaagcacccacaatccacgagtaagcacctccctccccctgaggtgcataagtaaggagaggaggggcagaggagctgccaggggaaggaccaaggatgtgctctataggtcagccccctggctctgcctctccttgttggcagagatcagcctgagggccgcgccgcacaccacaggcccatgaccctccatcggagtcaccgggcgctggctgaacaagcaccttcagtgagctctggattacaacacagctatgaaaagaagccagccggtgctctccctacccatatggagagattgccaggcagattccaaagtggaaaagtcagaggcaatacaggagggcctgtgtgcccagctcccactgtgaaaaccaacccagctgatggggattcttctctattgctttgtaggtcgtcgctgccctcagcctccagatgcagcccccctgccaccttcaggacccctggctctcccctggactcagtagcgaaagggtttatgtgctcggagggagaccttcaggaatctgtgcatagaatgccatagtgcagaggaaagtaagactatgcagttgtatttgacttaaaacctccggaaagataaatagggaagcaacaaaacctacagggaacaggggaggaagagggatggggctgcaagccaggggatgcctgcagccaccaggagatggggggaggcagggaggatcctttcccagagcctctggaaggagtatggccctgcctacaccttgatttggatttctggcctctgaaactgtgagagaacaactgtctgctgtggaaagtaacctaggtttgtgggaattcgttacagcagccccagaaaatggaacagctgctaagtgagactcctcagccaggccagagaatgtgcattctgacggactgcttctcatttgcactgatcactgtgagtgtctgatgggtgggcatccggcgcccagagaaggagttgctctattatcctggcactccataaagaacaggtagaaataagcgcttcttaccaagatgaaatccacccatcatttctgaatggctcagttttgatttcatctcccaaggtcttctttctgaaaccagcccaacttttctcccagagagtatcatggaactgaactttcaagatcatggcatctggacatcgagaaaacggaaccctcatctggccacctgctgctttttgaccaattcccatataaaccgctaacttcagtcagttggagggatggatttgagatttgccttctgtctctcaggtgatgtcaccagcaataaagccttcttccctggc

SEQ ID NO: 1953 - DNA, 1789 bp, Homo sapiens
acacacactgcaccccaaacactcaagtccctgtgtaaatcttcactcctccaagcacagagggaagcctgctccgtaggctctgttaagtgtactgctgccgctgacatcatcataaataggaagggagagagtccaggaaccacagggctcacttcctagcctctctatttaagattttcgagggcagatggcactatatttaaccagcacaagtagtattcattgtgcccagggcctcttaaggaaaactgaacaaagttttagaatgaacctgccctcacctcactcctgctcaaccatttcacccaacaacaagttagaggcagagaagatgaatattattaaaatgatgcttctaaatcaggaccttatgggtgctttggctctcaacttttttcataaaatatctgtccagtccagaccgaggagccagcttcgacagcattctggcatgatcatcttccttgtggaatttggttctgaatcaagggcctcagaaaccaagcccggttcttttggtctgcaggagagacccctccctcctgccaagtctacctgttctgggaggaagctccacccacccactgcaccaccagcaaagatgctgcctgaactaaaggccaaagtcccacatcctgtaggccatagtgattggttctgagaggtgcctgtaactgagccaggccaatcaaagcagagctcccagaaagagactcacccactctgtcccagtgaccttgaacctggaagtaggagagcctggaggctgagagtccgcagatggcacataaagggtcttgctttgtcactcaggctggagtgtagtggtggaaattagctagctagaactacagacgtgcaccaccacatgtgaagcctcatgacttatatgtcagattaagccttttgttaagaagatataagcattgtcatgagaaacaccagactttggtttaagttactgctctgcaactttcggacctacgtggccttacgaatgcataaacttcttcctggaagctggcgctacacaggagtcaagctgctctgaaaagagatataagtgagacttctgaatttccctccagcacccagaaaaagcctctcggcattgtagccctaccaggcacgtcagcacctggttcacggtatctactcataaggcactaaaggaatgctcattgaattaagatgaatgcagaagctattaggatgaccccttgatgaagggataaaggcctggattatggcttgacaatggaatgagaggaaaggtcagataggagagagattgagaaaaaagaattgacaatgcttggtagttgtcaaacaattggatgacagaatacgtttaaaagggagctatatttcactggaagatatttgattatctacatttcagccactctgagtaacgagtgtaagaacattcaggtggaaacctccagtggtcgtggggaatactggaatcatgctcaggagatgaatgaagatcatagtcatctgaatcaagggatgcaaacttgccccgtgaatttagagacgaccgacaactgccctgtactttcagattacagccacgtgtggaaaacatcagatgcaatcccagctgctttcagtacagtcttgggaaaagagtaaagaattgcttcctcccacaacccaaacctctatcgcccaaacctcaatctatatgggacatctcaaatgcaatacgagcaaaactgacctaatcccacacctgcccattgacttaatgaataaaggaatgaggtgaaacacctac

SEQ ID NO: 1954 - DNA, 2047 bp, Homo sapiens
gcagaggccgtggagttcaggtgtgaggggcagctgtgagctttgcagccagccccggggacgggctggacgggccaggacaggaggggacactggcatcttttccgtcccttcctgctcccacatgagacccagggcgggccagccccacccttcttgaacctgtgatcccaatggctttcctttccgatgccaggtttccttagcttccttagtgtgtctttgcgctcaccaggttcggggatcgcctctagcttcccaggacaaccagccacggatcctgtgggcaggagggctgccaaggcccagttggaggctcaatttatggcggcctgggggaagaagcatgcaggaaaggatccagtccgtgatgaatgtgaggaaagaaaccgttttacagaaacaagggaggaagatgtaactgatgagcatggggaaagagaaccttttgctgaaacagatgaacacacgggggctaataccaagaagccagaagatactgcagttggtgcaaataatttcaaaaactatcctgtacatattggcgtctctagtgaacaacatattttacttgattgttctctaagtaggcagaaacgtgattatatacattctctgaagttgctaaatgtccttgaagaatacatcacagacgagcagaaagaggaagaagaagaagagggagaagaggaagaactaattagaatatttcaagaacaacagaagaagtggcaacaatatagaagtgttaggagagagaggctgaaagagatgaagctgctacgtgaccaattcgtaaaggctcttgaggactttgaagacctttgtgacagagttttttccgatgaagacagtgaacttgataactagacatgtttttaaataaaatcatgtcagaactcttttggaaaagttggcacttacccagttgtctcttcaacctctgttattctgatgactgaagaaagaacttgaacctatgttatatgatacaagcacaacttgagctacagtaaactacatgacagtgttttgataattgttgtataaatcggtatagctcctctgtcactcgtctgttaaatgccagacctcgtttctatgatctgttgaatgaatcctagacacttctgtgagaaagcagggattgcatagttatgtacacggtcaattaaattttaacattaaagataatttagatttcgatttggcctctgtggatttgtatcagttccaaaaatgtagaaagcacaggcatagaaaagtacatttttctctaataaaagaagacaatatctgctgggtgtggtggctcacgcctgtaatcccagcactttgggaggccgaggggagtggatcacttgaggtcaggagtttgagaccagcctggccaacatggtgaaaccccatctctgctaaaaataccaaaattacccgggcgtggtggcacgcacgtgtagttccagctactcaggaagctgaggcaggaggatctcttgaacccgggagttggaggttgcagtgagccaagattgtgccactgcactccagcctgggcgacagagcaggactctttctcagaaaacaagaagaagaagacaaaagctatcttatctgtgcgttcttttgtatttactcattaggataaagaggcaattccaatgaaagtaggacttcaaaaaatagatatactctatggccatatcaaaattattaaaagcaccttactgtctgtgttcttaaaaaaaattatactgctgtaaatgattaaggcaactgagcaagatatattaatatcagtgctgagccactggtttgtgggtatgtcatttccacagacatcaaaatgctatttagtttgttttggtccatcattcaatgatacctccccttagaattgaatgaaagcattttgttaacatttatgtatgcttacaattatttcacatctgtggcaaggtaaattttgtagagtgctttgtttatccagtttaatattcgtggattatgtggaagtttatatggacatctaaaaacttgaatgatg

SEQ ID NO: 1955 - DNA, 2823 bp, Homo sapiens
atttcccggggatttggagcaggcacgcgcggcccgggcgtccggagctgtagcagcagcagcagccgccgtgccggggccgccaccgcggcgggcacccgcgtcccgggcgcccacggaccatggagagggcagtccagggcacagacggcggcgggggtagcaacagcagcagccgcagcagcagccgtgctacctcggcgggctcctcgccctcctgctctctggcgggccggggggtctccagccggtcggcggcggccgggctcggcggcgggggaagccgcagcagcccgggctctgtggccgctagcccgtccgggggaggcggccgcaggagggagccggcgctcgagggcgtgctcagcaaatacaccaacctcctccagggctggcagaacaggtacttcgtactggatttcgaggctggcatcctgcagtattttgtgaatgagcaaagcaaacaccagaagcctcgaggagtcctgtctttatctggagccatagtgtccctgagcgatgaagctccccacatgctggtggtgtactctgctaatggagagatgtttaaactgagagctgctgatgcaaaagagaaacaattctgggtgactcagcttcgagcttgtgccaaataccacatggaaatgaattctaagagtgctccaagctcccgaagccgaagtctcactttgctcccacatggaacacccaattctgcgtctccctgtagccagagacacctcagtgtgggggcccccggtgttgtcacaatcacgcatcacaagtcgcctgcagccgcccgaagagccaagagtcagtattccggccagcttcacgaagtcagagagatgatgaaccaggtggaagggcagcagaagaaccttgtgcacgccattgagtccctgccagggtccggccccctcactgccttggaccaggacctgctgctcctgaaagctacctctgctgccaccctcagctgccttggggagtgcctcaacttgttacagcagagtgtgcaccaggcgggccagcccagccagaagccaggagcctcggaaaacatcctgggatggcacgggtccaagtcacattccacagagcagctgaaaaatgggacacttggctctttgccatcagccagtgccaacataacctgggcaattttaccaaactctgctgaagacgaacaaacctcacagccagagccagagccaaactcaggctctgaattggttttgtctgaagatgaaaaaagtgacaatgaagataaggaagagacggaattgggcgtcatggaggatcagcgtagtataattcttcatctcatttcacaactcaaacttggaatggatttgaccaaggtggtgcttcccacctttatcctggagaagcgatctttgctggagatgtatgcagatttcatggcgcacccagacctactgctggccatcaccgctggggccacaccagaggagagagtcatttgcttcgttgagtattatctcacagcctttcacgagggccgcaagggcgctttagccaagaagccctacaaccccatcataggcgagacatttcactgctcctgggaagttcccaaggacagggtcaagcctaagaggactgcttcccgctctcctgccagctgtcacgaacacccaatggccgatgacccttccaaaagctacaaactaaggtttgtggctgagcaagtgtcccatcacccacccatctcctgcttctactgtgagtgcgaggagaagagactgtgcgtcaacactcatgtatggaccaaaagcaagttcatgggcatgtccgtgggggtctctatgataggggaaggtgtgttgaggctcctggaacacggggaggagtacgtattcaccctgcctagtgcctacgcccggtccattctcaccatcccgtgggtggagctcggaggaaaagtcagcatcaactgtgccaagactgggtactcagcgacagtgatattccacacgaagcctttctatggagggaaagtccacagggttaccgcagaagtgaagcacagcccaaccaacaccattgtttgtaaagcccatggggaatggaatggtactttagagttcacctacaacaatggagaaaccaaagtcatcgacacaaccacactgccagtgtatcccaagaagatcagacctcttgagaagcagggacccatggagtccaggaacctctggcgggaggtgacccgatacctgcggctgggggacattgacgcagccaccgagcagaagcggcacctggaggagaagcaacgggtggaggaacggaagcgcgagaacctccgcacaccatggaagcccaaatattttatccaggagggcgatggctgggtatacttcaatcccctctggaaagcacactgatggggtggaggtgcagagctttccagtatagccctgtttttgtaggaatattaaagtagtagagtatcagggttttgttggcattcactgagaccttgtattagcatccaagaaatgatgagagagagagaaattatatactatgaaaagtgcacccccacactctgctagaggaatgaatttattcaagagccattcggggcacgtgtgtgtacacaccgtatacgttcacacacatgcactatgtaaacatctgagtatgattacacatttaaatactgcactcaccaaggttaaagtgggtaatcataagctcctttttatcaatgaagtttgaagtttttctatttttcactttgccaaaaatgttttacactcacaaagattaagaaagaaatgtattctg

SEQ ID NO: 1956 - DNA, 1955 bp, Homo sapiens
ttttatctcttgatgtaatatggaaagtggagcattaacttacaaaagttcctacagacgatccacttaggaagatggcagagtacttggattccagtcgagttgaggtctgggagaagacctcctgcagcaaacaagttacatttttggtataccaagaaggagatcaattgaatttctttcctgcagtagataggggagatggcactttaacaccgttatctgactcttcaaagaaaatagattttcatttgcatgtcctacggagaaaaggagaacatcgtatgagtggtggttctatgtataattcagatacagatgaggatgaagaaactgagccttcttcttctgggcaacagataattgaaaattcaataactatgaataagatgaagctgctgaaggctaagatgaagaacatgaatctcagcaaaaagcctaagaaagctgtcaagataaaacctcacccacctgtagctcctcgaccttctagtggttccactgcaccatctcgccaccgattgttaagggtcctccccaacattggtcaatcttgttcacctgcttttgggaatgcatatccgcccgaaatctccaggaatggaatttcaagtttggcaactcgactctctgctgagagatgcatatcttctatcactggtgaatttcttaaggaagataatagctgggagaataacacactgtctcacttcagtagcaacgtcgaactacctcctcagataccccatttggagttgggaaatgaccaggagcttgctgactctgttctccatcttggatcatccctgcctaggcaaacaaaacattttttaggaaacttgccatctagtaatgggaacattgtcttaccttcagaagaatgtgtaaccgaacaatcacttctacctaaagtgggctcactggcttcatttgcagaaggaaatgctgatgaacagagcagcggcttagaaggtgcgtgcaaagtgaatctggagttgctactcactaatgctgacaaagggttgaaagctccagagcagcatctcaagcatgttgcaggagtgctgaatggggaatcagtagagacttcagttcttaactaccgggaattaagtcctcacaagaatagactcttgtcacctcttcgctgttctgcaccaatgtcgctacataattctctggtgaaaccagagagacagtccaaatgttttgagtttgggaagctacagccttcttcttctcagtcactggatgttcaaaacataactgattcttctttctctaggactacttgctttcaaggtgttaaagttgattcacttgggaaaagatctgatgttatttccaaagttgaggctcgggatatcacagaaatgactaacaaggcttccaaagagcctgttggttgtgtaaataatatcagttttcttgcctcactggccgggagcacaagcagaaatagattacagaccacacgtggggcaggcaggcttcagaactctggaactgggctgtctacaaacctccagcattttcaggaagaaaactttaggaaaagttctccccagttagaacatacaggagtttttttgtctacccatggtgttggaatgaatggaaataatgcagcagcagggaaaagcgtaggagaatgtactactcatcacctcccacctgtgaaagcccctcttcagacaaagaagaaaacaacaaatcattgttttctttgtggaaagaaaacaggactggctagtagctacgaatgcagatgtggaaacaacttctgtgcatctcatcgttatgcagaaactcatggctgtacctatgattacaagagtgcagggaggagatacttgcacgaggcaaatcctgtggttaatgcaccaaagcttccaaaaatctaactcttcctctacatcttactgttctgcccgggattcgtattataatgacag

SEQ ID NO: 1957 - DNA, 1945 bp, Homo sapiens
gatgcgtttccaggtgacattgctgcagagaggaagaggaagatgcttttccaggcgacgttgctgcagagaggaagagggtgggacgcatttccaggagacgtcgctgaagaggggaagagggaggcccctccagcagggccacctagatgtttgctttgccccgcgtggagtcatattccaggaacccccgaacccacctgcagcttgattctgctcctcagggccagaggttctagtttatgggaggagtgttttctcactggaaacatggagcccacacacacttctacgctggaagccgtgatgtgtgtcaggaacgtgttctgatgttggtgtgcaaaatcagtattgtgcctttgtcccctctgacccccatcacggcagttctgaggcttgtggggcaccccagctcctctccctctgcacaggccactgttcccagaactcgagggttccctgacaccaagatgacatgtggcacagacctggaatcacgaggaaatgcccgtcctcctcccacgggcagacaggtcgagtgtgtttccagataccgggccgtccgtggggcagtagcgcctggatgacgtctgctttcgcctggagccctggctgcaaggggcggtgccgggcaagggccaccccaggggtctgggagtgcagtgtcgggcctgtggaggtggagagcagggatcagcctctttttgtggatgaggaaatggagacacgtggaaacttctggtaagaagctgtcaagcctccaggtttcggttctggacaggtgcggggcaggtattggagcactttgggctctgaggtccacgtggcccagcggcctccaggagtcagctgcaaggcggagtccctgtccacaagctgcgttgcaggcacagagaccaggagagggctgtgaggcaactctgtgtttactgggctgaagcagcagctcttggcagtgccgccaccatgggctgtgtcctgtccccgtggcgacatcacagctgagcgcgaagctggaagcttgggcacgtcttggtgctgggtcttctccgaccccgagggccaagggtgctctgtagctccaggcgtcagagtctgagcatcctttgttttggcaacatccaggacaggagtctttggagagtaacacatccttattttgaaagagccctttaggtgatttgagaaaccgctgtatttgttgtagctccaagtattacccgtgaatcacctaggctgctcttcagtgaacatccagaatgccgtcagttcttgtgaaacccccaagtttcccgtaggtccaagctgagaagattgagtgaactctgagagctgagccgggccgtcttggcaccactagaaacggaatcagttccatgactgatctgtgccccaccccacattaacttgtgcaatatgacatttctggttttggtttttgttttataagccatccatggcaagtgcagtcggaggccccccactgccagaacttcctgtgagtaataatgacagatgggccctgaccctggagacgtctgagaaggtgtttggggtccgagaagagtccgcgtgtgcagtgactggaacctgtccctggtgtgaacttggggatgagtgggtgacgggggtggtgggggcctggggcacttccccgccctccggaccacactgttgctctccagccacgtgaagatgcagcggcccccggctgcagcagctactgtcccggagggcaggggagtgagggagagggagggtgtacggcatggggcctgctgcctggggcgctgggatcccacagcgaggccctgttcccactgcccaggggcactgagatcccacagggaggcccggttcccactgagcttgggttcccaacgggctccttttgcttcccaagcaccctctcccacccttgagctgcaaggaatgtttcagagcc

SEQ ID NO: 1958 - DNA, 1759 bp, Homo sapiens
caacaagaaggcctgatgtgtaacactaagctgaagaggccaaatcaagagagaagaaacttggtcccatcgtcacagccaatgactgagaacgcccctgatagagccaaaaaaggagacccgagtgctccttcccagagtgagctgcatccagccctgtcccaggccttccaaggaaaaaatagtcctcaagtattgagtgagttctcggggccaccactcacacccaccactgtaggagggccaagaaaggcatcatttaggttccgagatgaagacttttattccattttgtcattgaacagcagaagagaaagcgatgacactgaagaggaaacccagtctgaggaatgtctgtgggttggtgtgcgctcaccctgttctccttcccatcacaaaagaagtagatctggggggacatcgacccctcaggccaaaaataaaaattttgaagaaaatgctgaaaattgcagaggtcattcttcaagaagaagtgagcccagtcatggctcattgagaataagcaatgcaatggagccagcaacagagcggccttctgctgggcaaaggttgtcccaagaccccgggctgcctgatagggaatctgctacagagaaggacagaggtggcagtgaaaatgcgaaaaagagccctctttcgtgggacaccaaatccgagcccagacaagaggttggtgtcaatgctgaaaatgtatggagtgattgtatttctgtggaacataggcctggcacccatgattctgaaggatactggaaagactatttaaacagttctcaaaattctcttgactactttatttctggcagaccaatatctccaagatcatcagtgaattcatcctataaccctcctgcatcattcatgcattctgctctgagagatgatattccagtagacttgtcaatgtcatcgacttcagttcacagctcagactcagagggaaactcagggtttcatgtttgccaaccactgtctcccattagaaataggactccatttgccagtgccgaaaaccataattatttcccagtaaatagtgcacacgaatttgctgtcagggaagcagaagatactactttaacaagccagcctcagggggctccactatatacagatctcttactaaatccacagggcaatttgtccttagtggattcttccagctcctctccatcaagaatgaactcagaaggccatttgcatgtgtctgggtctctgcaagaaaatacaccatttactttctttgcagtgtctcatttcccaaatcaaaatgataatgggagcaggatggcagcctctggtttcacagatgaaaaggaaaccagtaagataaaggcagaccctgagaaactcaagaaattgcaagaaagtctcctggaggaggactccgaggaggagggagacttgtgtcgcatctgtcagatagccgggggttccccaagcaaccccctcctggagccttgcggctgtgtgggaagcctgcagtttgttcatcaagagtgcctgaaaaagtggctgaaagtgaaaataacatcaggagcagatcttggtgccgtgaagacctgtgagatgtgtaagcaaggcctgctggttgacctgggtgactttaacatgattgagttctaccagaagtaccagcaatctcaggcacaaaacgagctgatgaattcaggcttgtacctggtgctgctgcttcacctctatgagcagaggtttgcagaactcatgaggctcaacc

SEQ ID NO: 1959 - DNA, 2032 bp, Homo sapiens
gttttgttcatgaaaatccactggccccctttgctctttgaatgggtcttttacctatgcatgattttgaggaatcacacgctggtcatgtggagaattattcggaagctgtcacactcacaatgcgagaaacaagttttcaaaaattcctcttgtcatttgaaagctcaacattgtatcattggtgccagatactcccagctgttttccttacagggatgggcttacttggttgttttcaggaaaacacccaagcctgggtatgcagggctgttcgctgtttgttccatggaaactggtgttgcaagaataaaggagcttggttcagcttggctgccagacgcccacatggcacacacaaagcactgtgcgcaaacctccagctccatcacaaggaacgtcactgccgaatgctgctggcgatggtggcgagaagcctcacgagctcaaagccaccttgatctgggcccaggcaccagcaggtgtcccaccatcagccctctgccattgccgcgaatgtcaacacagagaaaaaggcaaggggcccgagatgactgtgctggtcttggagacccccctgaaaacacccaaaggaccacacgtgaagaactgctgttctgtggaacaaatgatgccaacgcttcaacaaatgcacagcccgaagagtctgggcagataaacaaggtgccggacacggccctgctgggtcctgtttcaaacaggccagacataaatagatgtgtggagaccccgggaaagcttccaggagcacttgggggctggagggaggcacacgggcctgcgcctgggagccgtgctctgcccactccaccccatgaccctcgaaggaagcacctcacggggcccccaggggtgcagggagtcagccgccctgttcctgtgtgagcggggcctctggggcaccgacctgcacagacctggtggggagaggccactccagcctctgggctgtcttgggtgaggcctgaagtggctcttcccacagtctgagcaagggctcagtcccaccagcagcaacatagcccagggcatggaagcccttgatgacgtacatggggctcgactcccacaaagccaaccccattgtggggtcagcacagctgcagagagtacccacgccagccgcagccatccccgaggagtgtggtgctggggacagtgagccgggtgtgtcaacctgtgaggggcacctgaggccagcatgagggcaggcgaggcggccgtggctcatgggtgctaggtctgcaggactgtgcccaggtgtaggctctgcctcccagccccacggcgaacacccatggtgcccctgccctgtagcaagaccctgacccccacacatgtccccagacacctcctggggcaacagtgctgccatgaggacctctgagatgaaggcaccggctccactgaggcctgtgtggttcccgccacctgcccccacacccttcctcctccacccgccctgcgctccggagtggcccggagcctgccccgtgggcgcccacagagtcaggcaccagcaggagatgaaggggcggaggaaggtgagagtgtcctcatcccaggcctcctcgtgaggtccctgcggcctggctgagcccctcccagggacaggcccctccgttgctcccctggaagctgctttcctcggacgtgggaacagccctgtccctgggccctcaggaatgggatagaacagggcccagggtgggaaccaacaccctaagtctcttcccacagaagcctaaggacagcaatggctgagggaggcgtcctgaggtgctcccgtggctgtgctcccatggctgtgctcccctcgctgtgcaagcatcgcagcgactcacacggctggagggcagggcccactgcctgcccaggcttcacggtgtggccctggctgcacacctgtgctgcaggtgcctgcgccgatccctggaggagctgtagtaagcatttgtgcatgtaaacacatccaagcttggaaatggcacagtaaaagcacagcaccgcg

SEQ ID NO: 1960 - DNA, 2366 bp, Homo sapiens
agactgctaccccgccgcgctcgcggccgcctgcgtcctcctcagcagccctgcgacaagtcccggctcctgctgcgattatattatttttatttttaattcacaatttcccctggccctcaaagcgtttttttgtttgcgggcaagagggagttagaggagggtaaaaaagactttgaatgtgaggcaaagatggaggaaggcgtccaggccccagactgggacagtgatgaaactgtgatagagggttcagtgacggagagcgacctggaagaaaaggagctgccctggagaaggttgctgtttgatcaagacgcatctcttaaatctgagttcagtctgcatcctgatacaagaggaatgtgcaaaggcatgccttctcctgagattcaacttggatttaagctcagagaggatctgcaagagcaaatgaataaaaataagatgatgcctgttcttagcgaggatacaatattacagtctcaagatgaaacagaacgaaatcaagctctgttacagactagaaaaaactgttcaatgttcattgggtcgtttcgccagtctggactttcattgaaccaccaaaatattgaagggccagaggctgaaagtcctgaagttttgccacacatagaaaaggaactaagtgaaggcagagattctcctgaagttagccttctctcaggcactgctattacagtatctgatacagttgctgtaaaggagacatcattagtagagccagagaagattttagcagcaccaaatacattttttgagcctagaaaggaagtcacaatgaccatgacttctgaagaaactaaggatgaagaaagctctcttgaaacctttgtgtctgccttagaaagtttacttacatcaccagaaagcacccaggaggaaagattgtttgaattagtaagtgattttgatcgtaaagaattgatgaacccattgagtgactctcttagttccatatcaatacctttgaattcctggtcggcatgtcatagagatttactagaagatgcaaaagatgatgcattgccagctgagttattggaagccctgaacacattgtcagaagccaaggtggaaaccatctgtcacagaaaagagggaggtagcagtctcattgccagaaatgaatgtttagaagtggagttcaatacgtctcagaccaatgaagattgtacacaaatagcagagactctgcaagacccaaatccatctggattgcaaactttggctcatcaaaatatcacttcttgtgagccactaagtaataagagaaattcaaattcagtgacaaatagctctgatcaggaaactgcgtgtgtgttgaggagatcatccagactagaaaaactgaaagtaagcagagatgcaaagtactcagatcacatgtataagatgccagaaaagattttaccaaaaatccttggctgtgaggacctaacaaataataactcttcagctcagaatttcagaatgcaggatccggctttaatgattgatggtagagagaagaatatgcattcagcaaggttcaagaatggaaaacagatcaggaaaaatgaacaattttcaggaaaaaaagaaaaaatgaaggtgaacaaaatatctcttcatagcattaaccggagaaacatttttggagagaacttagtatataaggctgctctacacgatgatgctgatcttgttcatcattgtataaaaaaaggtggaaatgttaatcagccaagttatgctggttggacagcacttcatgaagctagtgtaggaggattttatcggacagcaagtgaactattaaaaggtggagcagatgtaaatatcaaaggattataccagattactcccctacatgatgcagtgatgaatggacattataaggtggcagagttacttcttctgaatggagctgatccattatttagaaatgatgatggaaaatgtgctttggatgaggccaaggatttatgtatgaagcgtctccttgagagatatatccctaaacatcaaaaatgccttacatcagctcaaaggagtagcattgacccactagacatagaggatgtgtaccaacacaagaaaccaaagttcagttctaaaagtcacatttggcatgtttataatgaaaattccaacagacagaagctggaacatgtaaaagtcaataaaggaagcaaagcgagtttatttataaataaagaagatgtatatgaatattaccaaaaagatcccaaaaacacaaaatttggtaaatccaagcataaacaatcaactcttgaccagatatactctacaggactcagaaagggcaatctccataacgtcaaagatcccaacacaaacgtacc

SEQ ID NO: 1961 - DNA, 1941 bp, Homo sapiens
gctctgattgtctggagatctgcctgcatgcgtggaacagaagaggccctgctacactctaatctatgtacgttaaggactgggaattcccacatttcatgggagatgttgatgtaaatctccctggtttgcacacccctcacatgcagttcaagattcctttcttccagaaaatcttcaaggaggaatatcgtattcacataacaggcaaatggtttaactatggaattatcttcctcgtcttgattttggatcttaatatgtggaagaaccaaatattttataaacctcatgaatatgggcaatatatcggcccggggcagaagatatatacagtgaaagactcagaaagtttaaaagatttgaacagaaccaagctatcctgggaatggaggtccaatcacactaaccctcggactaataaaacatatgttgagggagacatgttcttacacagcaggttcataggagccagtcttgatgtcaagtgtctggcctttgttccaagcctgatagcctttgtgtggtttggattctttatttggttctttggacgatttttgaaaaatgagccacgcatggagaatcaagacaaaacttacactcgcatgaaaagaaaatctccatcagaacatagcaaagacatgggaatcactcgagaaaacacccaggcttcagtagaagaccccttgaatgacccttctttggtttgcatcaggtctgacttcaatgagatcgtctacaagtcttcccacctaacctcggaaaacttgagctcacagttgaacgaatctactagtgcaacagaagctgatcaagacccaacgacttctaaaagtacacctacgaactagactcggagatagacttggagataacacaaaaagcaaccttgagtgtaactttaaaaatttagtctttccttttgtatatgtaaggtttacgtagtgttaggtaaaaatatgaacaatgccacaacggtgctcaacatgcttttctaggattcattgttttctatttgtattataatacacgtgcctactgtatactcaacagtcctctagagattgcttttcacaattgcacaagctattactgactttacagcatagtggaagattagctgatgacccatgtatctgatgttcaaccatagtggtgccttgagacattaaactgtttttaactgtaccagaaatgaagtgtggaacagttacctaacctatttcacatgggcgttttgtatacaactattttgatctacacttgatgtctgagcagaaaacagaaatagctaaatgtgactcaggaagtatctcttggtttcttattcagcagcagagttggtgactttgacaactggactgcagagaaacatggtgatcaccttttaatttttattggctgtctgccaaatataaatacagatgcaaaattcagtaataggagatccataacccaacatgggtcactactcgtgaaatgtgactttctcccaccagtaattgaaatgaggtgatgatacctaattatgttttcctaattaaagataaattgctacttgattaaaaatcctgcccttcacctttgggaacaaaggttaagagacacagttgggcgaactctcaaatttattggcatttacacaaagtcccagacaaccaaggaactgaagttttcatcatatgagagcagcacatcccaccatttacaatattcgtatatctttctgcaaatatggctctggatagtgaaaattgaaaaacatatgccaaccctgagcaagggaactcctcaaaaaatcatgcagcggaaccttgtcaggtagagaagccgtgcatgaaagaatttgtttaatgtcttgttttgcgtatgtgttttttgtttttgttttttaagaactaaatattgcacattaataaataagaattatacagcagt

SEQ ID NO: 1962 - DNA, 1978 bp, Homo sapiens
gactccgactcctggcttgttcagagaaggagagccccgactcctggatccctgggagtcccagcggccatggggacgcgaagcagccccgaggaggggaccccgccgccgctggtcccggaatgcgacgtggaggtccagccccagggccatcccgaggagtcccgggaacaggaggcatccgaagtcctggcggaaccttcgagccgcgggggagctgagcagcaggcagaggaagaagaagtgggagaaggcagcagcactgagagcagccgcgacgcgcccgaggctacgcctccgatagctatggcggccacacctcccgcatccacctcttcgcgggaaggggtgcgaggggcggcgcggcgcctgcaaggacagcagctggaggcattgactcgtgtggccctgatggagcagcgagtgaaggagctacagcgccagaggaaggagctgaggatcgagatggaggtggaggtggccttgctgcggggtgagctggctggggagcgagtggccgctcgccgggaggaggagcagctgcgggagctgctggagcagcaggcggcctcgtagcagcgcggccgccagcagcgggaacaggaacagaggcggctgagccaggaacgggatcgcctagagggtcttcgccagagactccgcaaggcccagggacagctcgactcacagccagaggaccaacgcgagcggcttctgcagggtgtgcaggagatgagggaacaactggatgtggcccaacgtgcctatgaggacctggagttccagcaactggagcgggagagccggcaggaggaggaggatcgggacagccctgggccccaggtgccagaccccaaggtccaggaactccaggccagcatggcgcagcacagagtgagtcatgcctgaccagcgctgccccccttgctgctcctctctgtctcccctgctctgtgcctgcctttttctctgtccttgtttcctgcctgtcatgttcttctgaatagtaacaacaagagctgatactaatgaaacatttactatgtgccagatatggtcctgaatatttcatgagcatttcctcactgaatccttacaacaaacttatgaggcaagttctattacgttttttttttttcacgttataaataaagaagctgaaggtcaaggtgcttaagtaatcttttccaagtttccttagtaagggacagagccaggatttttttatttttattttttgagatagcgtctcactctgtcacccaggctggagtgcagtgacacgttcacagctcactgcagcctccacgtcctgtgcttaagcgatcctcccacctcagcctctcgagtagctgggaccacaggtgcgagcccctacacctggataatttttgtatttttagtagagacagggtttcacctggtcttaaactcttggattcaagcgatcctcccaccttggcctttcaagatgctgggattacagacatgagccaccgtgcctcgccacagccaggatttgaacaaacttggtattcaccaccacattctttgcctctattccaaaaagatgcttcatcagatccttcctgggagcctcacattcaagggtctgacttgtgagacccttgggaaaaaatgggcatgtttgaccatatttaacacagagtttcccaaagttttggattagaaagctcggccgggctcggtggctcactcctgtaatcccagcactttgggaggccgaggcaggcagatgacctgagtttgggagtttgagaccagcctgaccaacatggagaaagcccatctctactaaaaatacaaaattagctgagggtggtgacgcatgcctgtaatcccagctactcgggaggctgaggcagagaattgcttgaatccgggaggcggaggtggcggtgagccgagattgagccattgcactccagcctgggcaacaacagcaaaactccatctc

SEQ ID NO: 1963 - DNA, 2317 bp, Homo sapiens
agttaggtgaagaggagaacgatgtccaggcaggggccggggaagcccgtgccaaggcactgaggggaagtgctgcaatgaacctcagaggctggatcttgctgactcatctggggtaccaagggcagacaaaggacatggagtccaggcccaggaggcgataccaggccagcagtttcactgatgctcctgtcatgacgatgactgcctccctcctccccttggtccctgactcagtgtctgcagtgaccaggcaccaggcagggagcaaggaaccaagcctttcacctgctcccaccaactcctatggtgctccctttccaaggctaggtctcctctccacccagttccttatcacgtaccatgagaagctgtcaccttggcaactgtcaccttctggtgagatttacaattgcactgctacaactgcttgtggcatggtaaagttgcaccaggacctctgctgtccatgagatcaaagttccaggccaaggcaccaggggcacgaacagtgttgcccgcatggaactcacacttaatgggagcggcagccaacagagtcttgctgtgtcacccaggccggagtgcactagcacaatctcagctcattgcaacctccatctcccaggttcaagtgattctcctgcctcagcctcccgagtagctgggattacaggcctgtgccactatgctaattttttttttttgtattattagtagagacagggtttcaccatgttagccaggccggtcttgaacttctgacctcaagtgatctgcccacctcggcctcccaaagtgctgggattacaggtgtgagccaccgctcctggctgaggccacctcttttcttggggacacttgggctccagctttctccattcatcagcttagcatgagcttgaggaacgcagaggggggctgactgagaggagcaggcactggggacaatggggacatccacggttcctagcaatggatttgaggtgggatttccaattcctcttctcccaccttggatttgaccatctgaataccaaattcctgtcacttctaggatgtcacctaagatgagactgtggtctttccactcttgggtcccaaggaggtgccacagggcctacaataaggcaaggaaggctcagtgaggtccgtgttcaccccacccccacttcaacacgaggagttctgcttttattttgcctctgtgtgtgtgtgtgtgtgtgtgtgtttctaggtattattttatttggagaaaggatttgctcctaaggacacacacacgcacacacacatgcacactcacgcacacgtactcacaggttctgcaaaacactagtgtggcagaaagtgttgaaaactagttctagacctggcatgaatttgaccaggttcagccttagtctcctctcttagaaataaggtcatctgggccaggtgcggtggctcaagcctgtaatcccagcactttgggaggccgaggtgggcggatcacgagatcaggacctcaagaccagcctgaccaacatggtgaaaccccgtctctactaaaaatacaaaaattagccaggcatggtggcacgtgcctataatcccagctagtctggagggtgaggcaggagaatcgctggaacctgggaggcagaggttgcggcgagccgagatcatgtggggaaataaggccatctggaaatatccttcccatcacaggatgatacccggcaaattcttcaaagcagtgttctccaacttgaatgtttgtgatgtgggcgattctgactgagggggtctgtagaccacatcttgataaacaatgctttttaaaaaattcctagaagagaatatttgatttctggaaggatagagaagaaactaataagagtgtttacctccgaggaggaggagaattgggaagctgagagcagaggagggaggaagacttacttttcaccgtgttcttttttgtaccttttgagttttgtacgacatactgaatctttgacccatttgcaattataaataaaggcacatttatttggccgggcgcggtggctcatgcctgtaatcccagcactttgggaggacgaggtgggtggatcacctaaggtcaggagttagtgaccagcctggccaacatggtgaaacctcgctctactaaaacacaaaaattagccagatgtggtggcaggcacctgtaatcccagctactcagaaggctgaggcaggagaatcgcttgaacctgggaggcagaggttgcagtgagctgagatcgcacgactgcactccagcctgggcaacagagtgagactctgtctc

SEQ ID NO: 1964 - DNA, 1987 bp, Homo sapiens
gttaaagattgctgtgtattcagggtaggcaacgtaggatgtcaacacatttattaatgtttgtgatggacaccatggaagttcagcaacttcagatttcctcagaacctttggaacagacaacaaccattaagattgaaaatatgccacttgatgttgaattccagagacaacaagttcagcaagaaagattgtctttcaatcaggaatgttgtagcttcaatccaaaccaaagaaggtctgaatctcaagttgataagtggagatgttctgtacatctgggccgatgtcattgtcaacagcgttcccatgaatcttcagcttggaggaggaccactatctcgggcatttttgcagaaagctggtcccatgctccagaaagagttagatgacagaaggcgggaaacagaggaaaaagtaggtaacatattcatgacaagcggctgcaatctggactgcaaagctgtgctccatgctgtggctccatactggaataatggagcagagacttcttggcagatcatggcaaatataatcaagaaatgtttgacaactgtagaagtgctatctttctcatcaatcacatttcccatgattggaacaggaagtttgcagtttcccaaagctgtttttgctaaactaatcctttcagaagtgttcgaatacagtagcagcacaaggccgataactagccctttacaagaagtccactttctggtatatacaaatgacgatgaaggctgtcaggaggctttggctggacctaagagatgaagcatactgcatttttagatgaattcactaactggtcaagaataaatcccaacaaggccaggattcccatggcaggagatacccaaggtgtggtcgggactgtctctaagccttgtttcacagcatatgaaatgaaaatcggtgcaattacttttcaggttgctactggagatatagccactgaacaggtagatgttattgtaaactcaacagcaaggacatttaatcggaaatcaggtgtgtcaagagctattttagaaggtgctggacaagctgtggaaagtgaatgtgctgtactagctgcacagcctcacagagattttataattacaccaggtggatgcttaaagtgcaaaataataattcatgttcctgggggaaaagatgtcaggaaaacggtcaccagtgttctagaagagtgtgaacagaggaagtacacatcggtttcccttccagccattggaacaggaaatgccggaaaaaaccctatcacagttgctgataacataatcgatgctattgtagacttctcatcacaacattccaccccatcattaaaaacagttaaagttgtcatttttcaacctgagctgctaaatatattctacgacagcatgaaaaaaagagacctctctgcatcactgaactttcagtccacattctctatgactacatgtaatcttcctgaacactggactgacatgaatcatcagctgttttgcatggtccagctagagccaggacaatcagaatataataccataaaggacaagttcacccgaacttgttcttcctacgcaatagagaagattgagaggatacagaatgcatttctctggcagagctaccaggtaaagaaaaggcaaatggatatcaagaatgaccataagaataatgagagactcctcttccatgggacagatgcagactcagtgccatatgtcaatcagcacggctttaatagaagttgtgctgggaagaatgctgtatcctatggaaaaggaacctattttgctgtggatgccagttattctgccaaggatacctactccaagccagacagcaatgggagaaagcacatgtacgttgtgcgagtacttactggagtcttcacaaagggacgtgcaggattagtcacccctccacccaagaatcctcacaatcccacagatctctttgactcagtgacaaacaatacacgatctccaaagct

SEQ ID NO: 1965 - DNA, 1794 bp, Homo sapiens
agacctacttacagccaccgagcgtcagaaggcccatctcctggggaatggaaaagtgcccagccgctgggaggcctcaagctggagagctacgggggaagcagggcaggtgtggggctgggagaagctactaagccccacaccccaggtgctctggggcctcgcagcccagctgcagggagatggaacactgtgagcagctgttcttcttcctggccatttggttcatctacttcttttctgatgccaacctctcttccacctactcaggggctggaagggcgactggagagccaagcccctgcgagtgaggacagagaatggccaaaggcagagccacagggtagacctttgcaccttgggaggagagatttggagaatggtgctgcctgggcccctttgcccccaccaaaccgcaggggtaccatggccctgacctgcgttcagagggccaagtcaatgtcacaggaaggggaagagacatgtgcccacagaccctgtggtcatggagggggtggaagatctctggagggcagcagggccacagcaaggctctgaggtcctgagtcttctccgtccgtggacttaaactctgcgtgtttacagctgttctgtgcctgggtccaggctctagtgagaaataaactgccttcagagccaggtcatcgacaggaatgacagcctggcaagctgcagtgactgcacacagctaccctgtgagctccacttgtgtgggtgcaggtgggcgacaggagtgtgtgacacagacaggcactccaccaggaggaaacccacagcagacgtcaaccatcgctttattaaggctgcgagtcggggggctgagtcatgcactccacagacacccccactgctcccaaggtccacttttggatgaccctgaaggcagagactcctgagatctgggccacaatctagggaggcacattcggggcccaggatgctcccaggctgctctggtaaatcaggaaggaaaacaggccagggttaggaaagctgctccatggtccaggctgctctgaggggcagagccttcccaccgtgctgctgcagcatctggcttcatccctcccgagtccatcccagtctgatcaggtggccaaggctggagcaaggcacagctcactctgacaagataaactgcaagaaatgtgagaggcgacaagagaaggaaaaggcagaatgcccttatctggagacctggcttagaccacacccattccatgacgccaccccggattgcccctttcctgtgctttcagagcccaccagcccttctcagcctccaagatgacaacagcaattctgaaccacttagaggcaattcacccttcaagaggtcaatttcccttttctctggctgatgtgttccccactatcttttctgtactacatgaggggctcctggcaaatggcttcctgaagacatcaaagatgagtaccaagtgccaaagcctgacaagcaagacccaaggagacctgagttgtcaactgatgtaccagacagggctgttgctgcagaaaactccataaaagttccaagggtgccagaatgactttctgaaatgcctgcctaactctgctgtcagccactttcttccagagcccatagcacatcatcatttagttcatcaaagaacagcagggcaggtcagtggctctgttccagtagcccagctacacaggcttctctagatggcaggaacatatgtatgaatttctgtgtgaatcagagcagaattctctcacactaaatttttatacacttggttcttt

SEQ ID NO: 1966 - DNA, 2479 bp, Homo sapiens
attctagtgcagccctggttacgcctcctctggctcagtcacacagcgacgtagaggtgactggaggtatatacttgtcctcacctggatcatgctgatgtggccccaaccccacctccctacccatccccacctccctacccatccccacctccctacccatccccacctccctacccatccccacgtccctacccatccccacctccctacccatcctatgatgtccaaagaaaccagacagagcaaattggccgaggccaaggaacagttgacagaccatcatccccagaccaaccctagtgttggtacagcagcaagcgacaccaaaaagaagaaaataaataatggcactaaccctgagacaaccacttctggtggttgccactcgcctgaggatgaacagaaggcaagccaccaacatcaggaagccctaaggagggagctagaggcccaggttcataccatacgaatccttacatgtcagaaaactgagcttcagatggcactctactacagccagcatgctgtcaagcagttggaaggagaggccagggatctgatcagccgcctgcatgattcatggaagtttgcaggagagttagagcaggctctctctgctgtcgctacacagaagaagaaggcggataggtacattgaggagttaacaaaggagagggacgccctgagtctggaactgtacaggaacaccataactgatgaggagctgaaggagaaaaatgccaaactacaagaaaaacttcaacttgtagaatctgaaaagtctgagatccagctcaacgtaaaggagctaaaaaggaaactggagagggccaagctcctgctgccacagcagcagctgcaggcggaggctgaccacctgggtaaggagctgcagagtgtgtcagcaaagctccaagcccaggtggaagagaacgagttgtggaaccgcctgaaccagcaacaggaggagaagatgtggaggcaggaggagaagatacaggagtgggaggagaagatacaggagcaggaggagaagatacgggagcaggaggagaagatacgggagcaggaggagaagatgcggaggcaggaggagatgatgtgggagaaggaggagaagatgcggaggcaggaggagatgatgtgggagaaggaggagaagatgcggaggctggaggagatgatgtgggagaaggaggagaagatacgggagctggaagagaagatgcacgagcaggagaagatacgggagcaggaagagaagaggcaggaggaggagaagatacgcgagcaggagaagaggcaggagcaggaggcgaagatgtggaggcaggaggagaagatacgggagcaggaagagaagatacgggagcaggagaaaaagatgtggaggcaggaggagaagattcacgagcaggagaagatacgggaggaggagaagaggcaggagcaggaggagatgtggaggcaggaggagaagataagggagcaggaggagatatggaggcaaaaggagaagatgcacgagcaggagaagatatggaagcaggaggagaaggtgtggaggcaggaggagaagatgcacgaccaggaggagaagatacgggagcaggaggagaagatgtggaggcaggaggagaagataagggagcaggaggagaagatacgggagcaggaggagaagatacgagagcagaaggagaagatacgagagcaggaggagaagatatgggagcaggaggagaagatacgagagcaggaggagatgatgcaggaacaggaagagaagatgtgggagcaggaggagaagatgtgtgagcaggaagagaagatgcaagaacaggaggagaagatgcggaggcaggaggagaagatgtgggagcaggaagtgaggctgcggcagcaggaggagaagatgcaggaacaccaggagcacctggaagctgccatctaatgagcacatgacaagaaggcaaagacaataaacatgtaaaagccggcagcaaggcctggagaagagtaagccgccatgtgactgtttagaatatagtctgagcacaaacctgaaaaaaaaattttatttattttaaattgtggcaaaatactggccaggcatggtagctcacgcctgtaatcctagcaatttgggaggccgaggtaaatggatgacctgaggtcaagagttcaagaccagcctggccaatacaaaaattagccgggcatggtggcgcatgcctgtaatcccagctacttgggaggctgaggcaggagaatcgcttgaacctgggaggcagaggttgcagtgagctgagatcgtgccactgcactcaagcctgggtgacagagcgaaactccgtctcaaaaaaaaaagtttcttccttacatgtatgtttctattagttttcttcttggtctttctcatttagtcttgtgttgtcttttgacattcatagtaaacttttatctgcctccagag

SEQ ID NO: 1967 - DNA, 1829 bp, Homo sapiens
ggcctggtcccaggggctgttgtggggagttgaagaacaccctggcctcctccatcatgtcggccaagagggcagaattgaagaaaacacatctgagcaagaactacaaggcagtttgcctggaattgaagccagagccgaccaaaacatttgattacaaagcagttaaacaagaagggcggtttaccaaagcaggagtgacacaggacctaaagaatgaactcagggaagtgagagaagagctcaaggagaaaatggaggagataaaacagccatgcctttcttccttgttagataaaggatctaatggacaaggattttgataaacttcacgaatttgtggaaattatgaaggaaatgcagaaagatatggatgagaagatggacattttaataaatacacagaagaactataagcttccccttagaagagcaccaaaggagcagcaggaactcaggctgatgggaaagactcacagagaaccacagctcaggcccaagaaaatggatggagccagtggagtcaatggagcaccctgtgctcttcacaagaagacgatggcaccacaaaaaacaaaacagggctcacgggatccccttcatcactgtgggacctgctgcgagaaatgtttgttgtgtgctctaaagaacaactacaatcgggctgctcccctaaaggaagctcgtcacctcctgacagccaattctattgacccttctgcagctcttgttcttctgattgagttcctgcttttgaccctggtaacaggtgcggcagccccaggccttgacgcatgtggtcatcagagaaacatgagggatgaaataaactcagagagaaggtaatgagcataatctgtctgaggtcacaggatacgtggcagagctgaaattcgaatcctagcattctgacttcagaacctgtttcctggacactctggcttctctcgatgtggtccccggcccggcagcatcagcactgtctgggagcttgtgggaggtgcagcatctcaggctctaccccagacctactgaatcagaatctgcattttcacaatacttcctggggtcagagaaaaggaataggggaaggacagtgtggagaagagagagaaaggaagggagacaagtaggagcgagaggactggagagaaaaagaagctgggtttcaatcccatcatgaggcggagatctcaccacgttgccttggccggtctccaaccccttgtgagctcaagtgatcctcccacctcggcctcccaaagtgctgtgattataggtgtgagcccttacacccagcctgtttgcatcttttaatgagtacccaaattaacctctaattgggacttgattttctacaagtgctgctccaagaggcttctacacccccgcagggaggcaagcaccgttttgaggtggccgggctggcgaggagattgggggcaggagctgctttttcaatgagaagaatgaacagacctagtgggcgttgcctttagacccaggatgtaaaaggtaatgccagcagacgttggcagtgctggagacacctggtgggcagaggttacctggctggagtggcaggtgtgaggagatgcctcccagcataaggaatgtgggcttctgttggatctcttgttccaggcctcacatatgttcaaggcagcctgggtatgtcttggcccgttcaatccctcaaagccctgtttaattctcatcttgctgtcacctatgtggtgccaagaaacaagtcaccaaaataatgaaatgcctacctaagcttaaaaacaaaaccatgaggtctttctaaataaattatgaaaaagtgc

SEQ ID NO: 1968 - DNA, 2264 bp, Homo sapiens
agagaaatctggcaggtctctaggcagacaaaagggaacatctggtagggactgggacatgtagaaaaaaggtcaggaaaggcattatgagtcccattttatcctgagggaaaccaaagctcaagaccatatggtgctaaatagaaaatcttcaacaacagtcttggtgtggacaacctggacccatccatgttcccaatgcagaagggctccctcaacctcctgaggcagaaatgggaatcttgtgattatcagagaagtgagtgtcatcccagggacagccattgtacaattttccagcctcaggaaagcaaattgcttgcgcctgaaggagaggtagtatcagcacctcaatctttggatcccacaagtctgccctacagtacaggggaagagatgtggagttcgaagccggaagagaaggattctgtggacaagagtaacaacaccagggaatatggtcggccagaagtgctgaaggaggattccctgagcagtcggcgcaggattgaacgcttttccattgcccttgatgagctgaggagtgtgtttgaggctcctaagagtggaaacaaaccagctgagtacggtggaaaggaagtggaaattgagcgaagtttgtgctcgccagcttttaagagtcaccctgggagccagctgaaggattctgtgaaagattcagacaagaaaggcaaggaaacatcttttgacaagatgtcacctgaaagtggtcacagccgcatctttgaagcgactgctggccctaataagcctgagagtggatttgcagaagacagtgctgctcggggcgagggtgtgtcagacctccacgaagtggtctccctgaaggagcggatggcgaggtaccaggcagctgtttccaggggtgactgccgcagcttctctgctaatatgatggaagaatcagaaatgtgcgcagtgcctggtggtttggccaaggtgaagaaacaatttgaggacgaaattacttcttcccgtaatacctttgctcaataccaatatcaacatcagaacagatctgagcagggggcaattcatagcagccaggttggcacttcaagaagcagccaggaaatggcaagaaatgaacaagaagggtccaaagtacagaaaattgatgttcatggaacagaaatggtctctcatcttgaaaagcacaccgaggaagtaaaccaagcatctcagtttcatcaatatgttcaagaaactgtcattgatacacctgaggatgaagagattccaaaggtttcgactaagttgttaaaagagcagtttgaaaagtctgcccaggaaaagatcctttattctgacaaagagatgacaaccccagccaagcagattaagaagctgctgctccaagacaaggaaatatgtatactttgtcaaaagacagtttatccaatggagtgcctagtggcagacaagcagaattttcataagtcctgcttccgatgccaccattgcaacagtaaactaagtttgggaaattatgcatcacttcatggacaaatatactgtaaacctcactttaaacaacttttcaaatccaaaggaaattatgatgaaggttttggacataagcagcataaagatagatggaactgcaaaaaccaaagcagatcagtggactttattcctaatgaagaaccaaatatgtgtaaaaatattgcagaaaacacccttgtacctggagatcgtaatgaacatttagatgctggtaacagttaagggcaaaggaatgatttgagaaaattaggggaaaggggaaaattaaaagtcatttggcctccttccaaggagatccctaagaaaaccttaccctttgaggaagagctcaaaatgagtaaacctaagtggccacctgaaatgacaaccctgctatcccctgaatttaaaagtgaatctctgctagaagatgttagaactccagaaaataaaggacaaagacaagatcactttccatttttgcagccttatctacagtccacccatgtttgtcagaaagaggatgttataggaatcaaagaaatgaaaatgcctgaaggaagaaaagatgaaaagaaggaaggaaggaagaatgtgcaagataggccgagtgaagctgaagacacaaagagtaacaggaaaagtgctatggatcttaatgacaacaataatgtgatttttatactgctgctgcttgtcacaattattataacttctctgtaatttcctctgaaataaaattgaatcacctgaggtgc

SEQ ID NO: 1969 - DNA, 1777 bp, Homo sapiens
acaaggcccgggttgccgtggcagcagcggaggcgggcggcgcgcaggcctgccatgagggaaagccaggatgccgccggagctcatggctggaaccgcgtcggctccacggccaccaagtggttcaccggggcgcccttcggggtgcagagccacaggtttgacatctctgctgtttatcccaactggaagaagttcagcaccttcactgaggccccatactccacgcgttattctacccaagtgtcccacataggccctgggacttacagctccaaagagacctgcttcagcaagaagaagctgatgaaggaggtggacacaggctgggccaaggcccaggaagccacgcggctgacccagctaccccacttccagtaccaggccatcatgaaagagaagcggctgaaggagcaaaagctgggcccctgctcctacaacctcaaagacttcttagaacagctgcgggagaaaccatgtagcacccgggggctgctcagctctggggaggttcgcttccgaggactcactgggaactactatccaggccctggaaattatggggagaagggtaacccatacaccaagctggaggagaatgcctggaaccggtctcattccgagggcctcatgtgcaggatgagcaacaagccacacccccggcctcatcaggggagtggtctgggacccggcacctacttcttcaaaagcgaccttgagacatatgtggcacgatccgtcggcacccgcggcccctatgacactttctctggtgatcggagcaagccactgccttatgggcactactccatgcagaaaaaaaagcccagggaactgatgaatttcaagagctttgtagaagaacttaactcacatcacaataagaagcatggggttttttctaaacttccccgaaacccgaaaacccctacagagaggatttactgggccaacctcagccagtgcccccgcacactggccacatctggccccagtttctggcttccacaagagaagaaatgcaaacccgtcaaccagcccccattcctgttgacctccaaggggtcaggtgcaaaggcctgccagatgattatgggaagctggaacccagtaggtgtgggccgctacctcaacacctggctgatggagacaaaggacaggcggcagcgatatcgatccctattcctgagtggatccaaacgctacctctcagacctggcccgggacatgctcatgcaaatcaggctgttttgttggaaaggcctagaagtcatcaattttggcctctcaccaatgtaggatctcctgtgaagcagaaccaacagggaaaggatcacaccatttactaagggaaagtgccctccaactgtggattacaattcagatcctactccttaaagccacatgcgaaggacagcctgcagtgaccagagagcccaaaggcctgaagacaaatctgggggtgacagcatgggcatgggagtggggtgtcttagagaaaggacacatgggcttgggagaggggagagatgtatggggatcacctttgccagagctgcatacctgaaggtcacagtgtcttccgggacagctggggacaggtatcttttgttgcaggagatcaattatcctgagaactcaactcagccagtgacatgaacatgggggccagagagcagatggactgaagggatgggacgtagttgacacttgtgggaccctttctattctaaagccagagtgcttggctccttgtttattaaagttcagaaagtag

SEQ ID NO: 1970 - DNA, 2000 bp, Homo sapiens
cttgggcaacaagagtgaaactctgtctcaaaaaaaaaaaagaaaaaacaaatagaaacagccccaggcatggcacagttgatagagtaaatagacagaaacattttttaaaatgcaatgggtgtgtgtttcaaatctaggcagaaaaaatgctccttgtaattccttaaacataagcatgtctcattcatctggtcattgttttgacaaggatgtgccatccattgtgctaagttctgaggagtcagaggtgacagagacagagaaagtgccagcattcttggaaccttctaacgaaggagagggacaagccaggcatggtggctcacgcctgtaatcccaacactttgggagactgaggctggcggatcacgaggtcaggagtttgagaccaacctggccaacatggcgagaccccatcgctactaaaaatacaaaaattatctgggtgtggtggtgcgcacctgtggtcccagctactctggaggctgaggcaggacaatcacttgaaccctggaggcagagtttgcagtgagctgagatcgtgccactgcactccaacctgggcaacaagagcgagactccttctctgaaaaaaaaaaaaggagagggacaataaacaagtaagcaagacaatctgattaagaaggagttggggttagctgggcatggtagcaagcgcctgtagtctcagctactcgggaggctgaggtgggaggatccttgaacccaggaggttaaggctgcagtgagctgtggtcgcaccactgcactccagcctggatgacagagcaagaccctgtctcagaaaaagaagaaggagttgggggtggggtaggatgggcttggactcactatcaaggtgggtgggagtgtgagaacccggcaaggtgcaaagagagaagcagggaagggaagcttaggacaatgatggcaggttgggtattgggtgatgggaagaggcaaaggacgtggagcttggcaaaaaggggacttgtggggatttgggccatgtgagcatgtgggggagacagtgttccttccataacacgtgtccagggactgccagggctccgaggcagagcaggtgtagagaggttggctgtgaatgttggatgttgaaaacatatgtgtcaaatgtgggaggaaaaagcagtgtttccttgaatacaagctcctcctcaccttgcgaaaagtggcctctgagtgtagccctgaatgcatctcccaaggaataggaggaagcagcaaccttttcagagttaactgctttatttgggttttccatggcctcgtgccagccagcagggctgagccggtttcacccacactgagagggaactcagcaaagagcaagcagcatgccagctggtactcttccctctccattcactcagctcctgatctcaggagggcagcccctccccaggccagcacccctccccttctggccccaggtgtgggatgttgttgttttcttttctccgaaacatctcctgggtttgtcttttccatcactgtctttagactgaggcaagcagtccccatgccttcagccccatgttttgggggtaacctgtgctttgacatgctttgctaaaaactttctaagtctccctctggtgctgggaccagccatgaccaacaacgtcatccatgcaggccacccctaacatagtccaggcctcatgtgggtctcagttcccttttcttctttcaggaagttctccagtgcatgcatagggttgaccagatgtcccaaggtgctctaggacttatgcctatgaagctgttttagggcttcctagtcagtccctggttccaggaaagcagcctgatgaggagatcattcccgctggctggtgtggcatttcttttatggcactacctgggattgggccaccagacctgcgctaacatgctgatttgatggactcttaacatcataggacaaagaatcgtcatgtgaaccaattagacaataaacaaatgcctaagtg

SEQ ID NO: 1971 - DNA, 1939 bp, Homo sapiens
aaatagactgaatgaaagatgagcttctgcctttatatccttctctcctgctacccaactcattgtggtgaaggaaaaagaaaacgcgggtggagactgcactatatgcttaggactgaaatgcaactgcagaagcaacatgtgaccttttagagatgcttgtgggactgcataaagtgaagagggaaactggaaaaaaacaatgaagtaaggaaaaaatgaggaaactgagacacagcttaagaattttgcccaaagctacaaagattgaatagggaaaacctgctttctgcaaacaactgaaaaagctgcatttagaaactgtttctttggccctcatcgagaagctggaacttgtattgttaggccccttatgggacaaactctcaactgctgatcacccagtgattgtcaccatggccagcaagaggaaatccaccacaccatgcatgatcccagtgaagactgtggtgttgcaagatgccagcatggaggcccagcccgctgagaccttgcctgaaggaccccagcaggatctgcccccagaagcatctgctgccagcagtgaggcagcacagaaccccagcagtactgatggctctacactggccaatgggcatcggagcactttagatggctatttatattcctgtaaatactgcgatttcagatcccatgacatgacccaatttgtgggacatatgaactcagagcacacagactttaataaagacccaacctttgtatgcagtgggtgcagttttctggcaaaaacccctgaggggctttccttgcacaatgccacatgtcactccggggaagccagctttgtgtggaacgtggccaagccagacaatcatgtggttgtggagcagagcatccctgagagcaccagcactcctgacctagcgggtgagcccagtgctgaaggggctgatggacaggcagaaatcatcattaccaaaactccaatcatgaagataatgaaaggcaaagctgaagccaaaaaaattcatacactcaaggagaatgtccctagccagcctgtgggtgaggccttaccaaagctgtcgactggagaaatggaggtgagagagggggaccattccttcatcaatggggcagttccagtcagccaggcatctgccagctctgcaaaaaacccccatgccgccaacgggcccctgataggaacagtgccagttttgccagctggcatagcacagttcctctccctccagcagcagcccccagtgcatgcccaacaccatgtccaccagccactgcccacggccaaggcccttcccaaagtgatgatccccctgagcagcattccaacgtacaatgcagccatggactctaacagcttcctgaagaactccttccacaagttcccctaccccaccaaagccgagctctgctatttgactgtggtgaccaagtatccagaagaacagctcaagatctggttcacagcccaaaggctgaagcaggggatcagctggtcccctgaggagattgaggatgcccggaaaaagatgttcaatacagtcatccagtctgtgcctcagcccacaattacggttctaaataccccactcgtcgccagtgctggcaatgtccagcatctcatccaggccgctcttccaggtcacgttgtggggcagccagagggtacaggagggggacttctggtcactcagccattgatggccaatgggttgcaagcaacaagttcccctctccccctcacggtgacatccgtccccaagcagccaggtgtggcacccattaacactgtgtgttcaaatacaacgtcagctgtgaaggtggtcaatgcggcccagtcgctcctcacggcctgccccagcataacctcccaagccttccttgatgctagcatcaacaaaaaataaacaaaatcaaaaacaggaacatg

SEQ ID NO: 1972 - DNA, 2126 bp, Homo sapiens
ctgtggcctctcaaggcccttgcaaagagcctctgcagatcccctacagctgccctttgccttcatccaaggattccagctgtagcaccaatcccagctgtagttcgactattattagcaaatgccagagtagtgacagcgagagcaggagttcccaccaaagccaaagccggagccaaagcaagagtccccatgatggcagaagtcagagctggagcaagaggcatcatctgagcagaagtccaagtcagaaaagcagtccctatcctagcagaagctggggccggagcagtaatcctcaacaaaacacaagtcagggccagagtgagagtccccaacttagcataaatgagcaccagggtgagagtccccaaattagcagaggtcagggcaagagcaagagtctatgatggcaaaagtcggaaccggagcaagagtccccaacatggcaaaggtcaaggccagagcaagagtccccaacatagcaggagccagagcaagagtcccagcgaggcaaaagtcacagagcaagagtcctcaccataacaagaaatgagggccagagcaaaagttctgaccagaccaaaaatctaggccagagcaaggcatagatagtaacaagattgccagctatagcaagcatcccagctgcagcaaccaggaccgacttgtgcactcctcatctgaagtcttcatttctcttttactctgcctccttgttcttgtcctcttgtcccctgctacccccatagcagtcatcctagaagtccctgttttggttcacacctcaagattctgtgggccctccttatccaacctttctggggtctgggaactctcccagcatgaccctcaaccctctgattctaagcatggtggtgctagtcactgtgtgacgctaggctgccacagagcccaaattccctgctgttcgactggctttgcagaattttgacatggcttacagtgtgcagtttggagatctttggccatcaatccgtgtcagtctcctctcagagcagaagtatggtgcactggtcaataactttgctgcctgggatcatacctggcagcctgggtgtcatggagtactacctgatggatgctgcctccttgctgcctgttctggccctcggcctgcagcctggggacatcgtgcttgacctatgtgcagctcctgggggaaagacactagcgttgcttcagactggctgttgccgcaatcttgctgccaatgatctctccccgtcccgaatagccagactacagaagatccttcacagctatgtgcctgaagagatcagggatggaaatcaagttcgagttacctcatgggatggcaggaaatggggagaactggagggggacacctatgaccgggtgctggtggatgtgccctgtaccacagaccgccactcccttcatgaggaggagaacaacatctttaagcggtcaaggaagaaggagcgacagatattgcctgtgctgcaagtgcagcttcttgcggctggactccttgccaccaaaccaggaggccatgttgtctattctacctgctcactctcacacttacagaacgagtatgtggtgcaaggtgccattgagctcctggccaatcaatacagcatccaggtacaggtggaagatctgactcacttccgaagggttttcatggacacattttgtttcttctcatcctgtcaggttggggagctggtaataccaaacctcatggccaattttggccccatgtacttctgcaaaatgcgtaggctgacatagtatcacccaatccctgaagcaagaatacaaagggtatactctgttggatgcaccagaaactggaaactgggaccagtggcagagatgcactctcggtcctgtctccatcctgttcgtgtctttctgcagttttcggcaataagaagtagaagatttgctgtcctgctgtccaattgtggagcatcagcaggtttccaactcactcattaacccctaccccatctccaggcctgtactaaagtttgctgcccgcttaggggcttagaaggagaagccagtgagcaggctcacactaagttgtaaacataggagaagcatttggccaataaagttgttgaaactct

SEQ ID NO: 1973 - DNA, 2287 bp, Homo sapiens
accaaggcgacgcaacgccgcccggccagcttttcagtttcatagaggttcccagtgccaccttctgtgatgtcattcccaagaggaagtcagacccagaaaataaagcaccccattggtacacgaaagggaccattggaggtgccacccccaacagagaaggactggcctaaagacgatgaacaggatcatgtcctcgtggatccagatgaggagctggattccttgcctcagccttatcgaatgatcaacaagctggtgaaccttctgtttgaccagtcttgggaaattattgaagagagaaacgcactgagggaagctgagagcagccagatccagcccaccgtctaccctccacttggagaaatccagctcaacaaaatgccaaattgtatggctgtttcccaagactatgtgtttattggaggagccaaaggattctcaatttataatctgtacagtgctaaacaaatatatgcgtgggagaagcttaaggttgatgtcacttccatctgggccacagatttagggaatgaaatactcattgctcctgtggatgaaatgggtatcattagactcttttatttttataaggaaggactttacctagtcaaagccatcaatgaagtggatgataccagcaagcaaactacctgtataaagatggagatctctcaaggaggggactttgcagccttcctcctacaaggagccggagatatttggctggatgtgtataaattgcccaaggagacttggctcaagaaactagagcacccccaactcacttcaaatccaaagaaaaaagtcagacagccgcaactgaactcccttggtcccatttctgcagatcctttagaaatggatgcaaatgttagttttaaaggagacattaaattgagtcttccagtttacataatgaagatcaaaccacctaagcctgttacaggcaccacattcaaaagccccctggaagtctttgcaaagatcaaggactgctacggactgggctccgggcagaatcatttcatcaaggacagtcagtgggagcagcaagctgagatcttcaacgcttcctacaagaagtacctagatggggagtgggaggaagagccactcagtacggccaccttctatttccttcttcctagctgcctatttgcaatgccaccggaagtcaagggcccctcaggaatggcctgtgtccttggtatacactggaccagaagtcacaatttcttcctgtattcactaaaccgaactctaaaggataaagctgaccccgagggtgtgtggccctgtgctgcgcccattgcagtctctcagctcagctgctcctcctcctacctggtgctggcctgcgaggatggtgtgctcacgctgtgggacctggccaaaggacagaatatgtatcctgaaggtcaagtgaaatcccaaatgaaatgtgtggtgctgtgcacagacgcctccctccatctggtggaggctagcgggacccaaggacccaccatcagtgtgcttgttgagaggcctgtaaagcacctggataaaaccatctgtgccgtggccccagtcccagccttacctggcatggtgctcatcttttccaagaatggctctgtgtgccttatggatgtggccaggcgtgaaatcatctgtgcctttgcccctccgggagcctttcctctggaggtcccctggaagccagtgtttgctgtgtctccagaccatccatgtttcctgctccgaggagactattcacatgaaactgcgtccaccgacgatgctggaatccaatattctgttttctattttaattttgaggcctgcccactcctggaaaatatctcaaaaaattgtaccattcctcaaagggacttggataacatggccttcccccaagcactgccactggagaagagatgtgagcgtttcctccagaagagctatcggaagctggagaagaacccagagaaggaggaggagcactgggcccggcttcagaggtactccttgtcgctccagagagagaacttcaagaagtgaggctgccaccgccctgggatctctgaaaaggaggtttcagccacgaggcagctgctcccaggacactgaggccaagagaaatgtaacagagccacagctccacaggcctgcactcggagtctggggcctctgcagagccagcaaggggaaaagtataatctgggggaccttcaaccactaagcctcttgtcagagccctcaggcaggcagatgtgtcacccaaataaacagtgatattgtc

SEQ ID NO: 1974 - DNA, 1794 bp, Homo sapiens
gttctctgtgcccccagagctgtgctctccttcttatggggcaacctaaattcagagagcaccctggcttggtttgccactttgttgtgtgggcaggttcacgtcttccaccagggcctttgggtggcatatgacagtttgggactgtccagtctctgtactttctggggcctctcctgttgaatggctaggcacctgcaggtgtaggggctcagggtcacctccggcctgcaggtcaatgtcttgctgctcctgtcctggggagggcagctctctcctagcccaacccaaaagcccccagaagcctccacacagccagctccggagtctgtccttggcttaggtggcttcaggactgggccaggcacctccctcacaggacaatcagacatgaagggtacctttcaatcacgcaatcctacacagtcctagacattaggtgggtcctctgccctctgcaggtgacctcatcagagagcccagcagcatctgcccatttcctgtctacattctcctccctagtgcactgggagtgggaggagagcccaaagctcccccagatctttaggaagccccactgtcgggctgagtggagggccttagtgacaagtgataacttcagggaagtccagagtgggagacacatctggggtccagcttgctggtgggcactccctgctcatgcccacagcctcgaggggaaaaggtcataattgacaggtggttcctggggtcctgagatccagcccaagggatgggacgacatgctaggaaggggaaagtgacagaaggttcatatgcatcacacaccactttgacaaacccatacatagcattcactatagtgaatagaaaaactcacgaagcaccatagttccagcactttgcaaatatcccccacccaatacctttgaggtgagagttaccatcattgcctagttactggtgagaaaacagaggttccatgatgtgcctgaggcactgagggggatgatgtcagcacttgtggccgcacgtgcaggcacacgccctccatgtcacaccagtgcactcactttgcagatgaggagcgatgcctgagcactgggatggcatcattggcttgtgttggacagtgcctatataggagtccagcttctacccacttgttccagtctatccacattttccaccaacagaacgagtttactagaaacctctcctcaaattggtacaaggactacatgacatggcatgtgatgacacacacacagaggagatcctttttccagcatgcaggaagaggagatcccatacatgggcttgggggtggcttccctcactgtagtgtccggtcccccagcagctctgggagcaggagtgactatctccgttttgcagatgaggaagcagaaccataaaggtgaccttttttctttttcttttttacatttaaagttaaattggtctcccctcaaaaaatgcttagacttaattattttaattatcctcacatatactcctccggcttctttactgaagtgtaatttacacaccataaaacttaccatttgaaaacgtgcaattcggtaatctttagtatattcataaggttgtgcaaccaaccaacaccattatctaattttagaacattttcatcaccccaaaacgaaacccatacccatcagcagtcactctttgttacctggtagtaattacctacccctaccctcagcccttggaaaccactaatgtactttctgtttcttcagttatgcctattttggatatttagtataaatgggatcatacaat

SEQ ID NO: 1975 - DNA, 1799 bp, Homo sapiens
agtttgacaccttccttttatcccgagaaggtcccttggaagacacttcaggaaggcaggatggcaggacctggttcccttcatcctgcctgtgcctgctccacacctctgctccccagagtagatgggaggggaggtctttctaaacaaaaatgatatctatgtaaatatatgtagtttcaggcttgcacctgttatttcttttgttttcttttttaatggaacaacaatcgctttggctttattttgttttttcaacaaatgtcattttaaagttccaaatatcttgacaaccccctcccttcctttttccaagttctgggtgctgaggagaaacatcaacctccctttctgtcttccaacctgtccctctgaggcaggcatgaccctgctgttcgcagtgggttgcgtcttcgtcccgttgtgcttcactgccctgcgctggggcttgcagaaccacaccaacctgcagatggagagacaagaggctgtcctggtagcatccaagtaagaggaccagggtgagggtgtccttcctggggccatggctggtggaactgatcttttactttcagaatgagtttgtggtgaaagcagaagcagagtgtggagtggagctggaatgtggagtcaaaagacaccagcaggctgggcgtggtggctcacgcctataattccagcactttgggaagctgaggctggtctcaaactcctgatctcaggtgatctgcccactttggcctcctaaagtgctaggattacaggcatgagccaccacgcccaacctcttccaattcttgaatactgataagtaactaagaatttatttaagaactactatactgacaactgcatactggccaaacaaaacatgtctgtgggccggattgggcccttgggctgcagatctatgacctgtgtgacaaagcttaccataaaagtgcagtatcagcaaaccacaggaggcgtaggaggtacacggaacacagattttactagggtgtctacgtggattccctggcagacaaaaaaagcctgtctctactcatccaaagtgaaaccacagttccatgaccagccttgtagtcctcaatcgagtagttacggtggccgcccatcacccagcctccccagcctctgtcctttttgcagttttgctcatgagtggctttggggttatgcaactatggttttttggtttttttgttttcttttgggatggagtctcgctctgtcgcccaggctggagtgcggtggcgcgatctcggctcactgcaacctccgcctcccaggttcaagcaattctcctgcctcagcctctcaagtagctgggactacaggcgcatgccaccatgcccggctaattttttgtatttttagaagagacggggtttcgctgtgttagccaggatggtctcgatctcatgattcgccagccttggcctcccaaagcgctgggattacaggtgtgagacaccttgcccggctgcaaccatgggtttgaaacccagctttcatccgggcgtggtggctcccacctgtaatatcagcatgttgggaggcagaggtgggtggatcgcttgagcccaggagtttgagaccagcctggctaacgtggtgaaacttcatctctacaaaaaatacaaaaattagctgagcatggtggtgtgcgcctgtagtcccagctactggggatactgaggtataaggatcatttcagcccggggaggttgaggttgcagtgagccatgatcgcgccactgtactccagcctgggggacagaatgagaccctatctc

SEQ ID NO: 1976 - DNA, 2995 bp, Homo sapiens
tctcaaagaaaagacacaggctgtgtatggacatgggggcctctgaaaataattagccatccctcaaagctgctggaatggggaacactggggacagggagccgcatgatgccaaggacaggcctccaaactgaggtcacagggtggcccaaggccctggaaatcagggcagctgcctctacagtgggtgtaattccaggcagtagctgccaagctgagtgggcccctgcaagaagagaagtgcccgtcttctggtcaacctggagatttgcatctctccatcgtgcccagtctctggcaggaagccccactccccagccgacactgcaccatgctcatggaggaagaagctgtgcagcacagcccaacagcgttttcccctttcggttttctagagtagtcttgcagaactattttttggttttttttttttttgagagagtctcactctgttgcccaggctggagtgcagtggcaccacctcagctcactgcaaccaccgcctcctggattcaagcgattctcctgcctcagctccagagtagctgagattacaggtgtgcaccaaaacacctggctagtttgtttttattttcagtggagacagggtttcaccatgttggtcaggctggcctcaaactctttgacctcaggtgatctgcatgccttggcctcccaaagtgctgggattacaggcatgagccactgcccctggccatagtcttgcagaactactttgtcactccacagagatcagtagtttaaggcacagcgaaggtgcccagctgaactttgattatttcctatgcagcataaagttctgctcctcgggagtaaatctgcaaatcagagccttcctcaggaagatagctctacagatgacccaggggaacaagtacaagccgtgcgttccagcacccaggatttcttgtttcatgtcattttaaagaacacatggtttcgagtatactatggagtcctaggtttattcccagccttggcctcagttgtcaagctagctgttcctttttacttgggggattcagccccttcccattttacccaccaactcttaatcatctcccctgctctactcaaccatctttttctggacactcttcctgcttcctgcataacctagtttagagcagtccccttatgctagtctctaaagcttcctgttcttatcacaattttaatcaaagtatactctctctcttttttttttcttcctgagattctgtctcagacagagagagagagagagagagacacacacacacacacacacacacacagtgagattctgtctcagacagagacacgcacacacacacacacacacacacacacacggaaaaaatgcatttcaaaggaaactactagaaatgttcatattccctttgaccattttgctttcgtgagttttctctgtcacaggtttcctgccaagttaattcaaagcccagtgggactaacatgctcctctctgcaaaatattctccagagcttctgggaatacctcatagctactgctaccaggataccaaaatatttcccaaatacacttgcagctggaagcaagatataacatttcctctctaactccttcttgcctgtgcttttcaaataacctcagctgtgaatggagggcttagaagtaaacagttgtctcttatttgtttgaaggaccgagtatcagttttcacagatgtgaatgcttgcattgcatgtgtgaaatgcacagaaggtctttatgttctgttataaatcacactgcatgtatatgttagaaattcaaggcctgagaggtctttctttaatgctcagtgctgggagatggctgaagtaatcaggctgcctatttttagtgccaccttttggatgcttaggaaattgacattttaaagtaaattaaatgaacatagtcctacttgtcatttctgcgattaaatcaattccaacgcagctgtgtgaccgtagaatggtttgttttattattgctgatcaaaataactattatgagtagcagaattctagtgcctggaaatctaacaagagtagttttgagtttagaagaattagctcaactgtctttaatataaacttcaaggccttacacttgaataacaaataccaaagcagtttgacagctttgaaaaaaagttagtggaatgtgcaagatttagttggtgtttatgctggctggacttcacatacccatatatactctgtgttactcatttaagtgcgcttttgtatacagttgtcaccatcaacattggcccttattactgaaatctgtcagcctcatttaaatttttgcaaatgtgatttgggagatgtaaatataaaagtgagcagctctgtgcagatacatttttgtgtgaggcagaagtgctgggactacaggtgtgagccaccacacccagcccaaagtatactcttaacccagggtgggcacacactgctacgatcaatgatggtgtgaggtaatagtgagtggtggggactgtggagggaatatggccaccgaaaggacggtttcacttggctgcagcagagagactggttccatgagggtgtgcactcattgtttctggacctcccatattttcaaaggaagccagaatgtggagttttaaagtgaaatgccccccaatatttaagtactgacaatttttaaaaacaatgtaggccaaacaaaacacataggtgggccgggcgcggtggctcatgcccgtgatcccaacactttgggaggccgaggcaggtggatcacctgaggtcggaagttggagaccagcctgaccaacatggagataccctgtctctactaaaaatacaaaattagccaagcgtgatggtggatgcctgtaatcgcagctactcgggaggctgaggcaggagaatggcttgaactgggaggcggaggttgcggtgagctaagatcattgcactccagtctgggcaacaagagcgaaattccgtcccc

SEQ ID NO: 1977 - DNA, 1715 bp, Homo sapiens
aacataggattttttgggttcacacatacagctcatagcagtccctttttgatggatagttgggttgtttccagtctttttctattacaatgaatgtgccagtaaagagcttcatgaacaaaagtataccaggcaaattaatgaactagagggacagttccatcaaaaagccaaagaaattggcatgattcacacagagctgaaagcagtaagacaattccagaagagaaaaatccaagtggagagagagttagatgatctgaaagagaatttaagaaacacagagcggatacatcaggagactcttagaagactggaaagcagattttttgaagaaaaggcaattgaacgatgctggaagaaatgtttttaaagagaatgtttatcttcagaaagctctggcatatcacctgaaggaaactgacgctctacaaaaaaactcccagaagttgcaagagagtcatactttacttttacatcaaaagagttggtccctgagtcacttaggaatacatttagcggtgagtaacagtcctgacatcagtggcatcaccacacaagggtttattctttcacctaaaggaggcctggaggagatcaatgatctgttggttaaggaaaagattatgcaacttgtccagcagagatcacaaatccaaacccttcagaagaaggtagtaaacttggagactgctctgagttacatgaccaaagagtttgagagtgaagttttaaaactgcagcaacacgcaatgatagagaaccaagcaggtcaggtagaaattgacaagctgcagcaccttcttcagatgaaggacagggaaatgaatcgtgtgaagaagctggccaagaacatactggatgagagaacagaagtggaaagattctttttagatgctctgcaccaagtgaagcaacagatcctaattagcaggaagcattataagcagatagcacaagctgctttcaatttaaaaatgagagcagcatgtacaggaagaacagaatatcccaaaatcagaacatttgatggcagagagcacagcaccaatagtgtgaatcaggatcttctggaggccgaaaaatggacacatattgaaggaaatgtggatattggagatttgacctgggagcagaaggaaaaagtattgcgattgctctttgcaaaaatgaatggctgtccttctaggaaatacaaccagagttctaggcctccagttccagactatgttgtttctgacagtggggaaacaaaggaatttggggatgaaagtaagcttcaagataaaatcttcatcacccagcaaattgcaatatcagactcttctggtgaagtggtgctacccactattccaaaagaacctcaggagtctgacacaagcacacagaaaccatcagatgagaacttctcaacttcctactagcaaacctacaaaactgaactcaacctaatggagaaggtagccagcaagctccatgcaggaaaagtgaccgagacagtggtgcacgatcaatatatgtggactggatgaagaggtccccactcagccatcatcactttctctaggaagtctcaacctcaggtctatggtcactagattgttgtgtccccagcccctagcacaattcctggaagagagtcacttcagaagtttctccaaatgaatcagaaaatacatagtgtctgtttctgaaataaaagtacatggaaagag

SEQ ID NO: 1978 - DNA, 2129 bp, Homo sapiens
tgtcccaactgcaaggatggggagaagaggtctggagagcagggcaagaagaagcacgtgtgccacatccccgactgtggcaagacgttccgtaagacgtccttgctgcgtgcccatgtgcgcctgcacactggcgagcggccctttgtctgcaactggttcttctgtgggaagaggttcacacggagtgacgagctccaacggcatgctcgcacccacacaggggacaaacgcttcgagtgcgcccagtgtcagaagcgcttcatgaggagtgaccacctcaccaagcattacaagacccacctggtcacgaagaacttttgcctgaggcaaaatcttcaacttggcagttcggcttcctttgtcttttcccttggagagctcggagaggggactccagaggagggagctgtggtctctcagagcgatccacactgggaccaagaactaataggaactcaggggttgcgatgttgtgcagattaagattggagctagctcagtacatgtgtttaagccccacagggccctgaagagcatccggcctgaagagacaggcaagtccgcctcaagcatgtaaaggacagcatgtgctttcactcaccctcgaaaggacacagctgggattgctgttctgttcaggagtggcgaggctcgttttgagctatccattcccctgctctgttccctttgtcaccagccacctgtgtctgccagcaaacagcttttccttagagccagtcaaccctcaaatggctgaaaaagtaaaaagcccacagatctcagatggatccaggttctctgccctttccctcttctttgttaacaagcaggggcctttcctatccctacggaagtcgtttgggcaatactagaccaccagctgaatctaccttgacacagaagcctcttcctcagcccctcagctctgcatctcatcaccgcactggcagcaggtggaagacatgaggtgtatttattcctcatgcgtggactgcatgactagaaaactgccttgctgcattctgaataaggggattggtggagagaaggggaatattaacaaagtgacctctttttgccacgtttcccttggctttgctctcaggcacaaagaatgatcctttcctgggagctgatttcaagccatgtgctttatgcttccagtacagaaactgacctgactccccagcatcatttggaaatgaaggtgccagccccaagttgggcaggatgagcatttcccatgtaggatttcccttctccagtgagatgggggttcaaaagttatgtctgatcatctctgcctcccttgggatggctaagagcgagagaatgtattctgcctagctgagtgatggcacaaggaaagcacagaaagacttgtgggcaaattaaccctcctctggctttaacctatccattatttgagagttgcaggggaactgttgaaggtgtgatgcagtctaagctcaccctaggcaagaggctcccacagacacctgatcctgatgggcccttgatgaaaatctgggtgcagctcaagggtaggggccccacatgtgtagttcctcctctgtcctctactgtccccagcgtcatgtgcaccaaagcccatccctcatgcccttcctctctgtccagctgacacttggcattgtgctcattatcccacagcctaggattccatgcctggaagaaagagggactgggcaggatttccctcccaaaggcaaatccaggcattatatgtactttttttttttctttaacaaaaccagcaaatgggtcttccttgcccttccttcagaccacccagtccatttttacaatcatctttctggccgggcacagtggctcatgcctgtaatcccagcactttgggaggccgaggcgggtgaatcacttgaggtcaggagttcaaaaccagcctggccaacatagtgaaaccctgtctctactaaaaaatataataattagccgggcgtggtggcgcatgcctgtagtcccagctacttgggaggttgaggcaggcaggagaattggttgaacccagtaggcagaggttgcagtgagccgagatcgtgccactgcactccagcctgggtgacagagcaagactctgtttc

SEQ ID NO: 1979 - DNA, 1469 bp, Homo sapiens
gcgtgggtcagctgatcgcgcactgagggtgcgatcccgggctccccattccttcctggggcgcctccccggcccagggccaactgggtcccggtgtcggcaggcctggggtcggcgacggctgctcttttcgttctgtcgcctgcccgatggacgagcctcccgggaagcccctcagctgtgaggagaaggaaaagttaaaggagaaattagcattcttgaaaagggaatacagcaagacactagcccgccttcagcgtgcccaaagagctgaaaagattaagcattctattaagaaaacagtagaagaacaagattgtttgtctcagcaggatctctcaccgcagctaaaacactcagaacctaaaaataaaatatgtgtttatgacaagttacacatcaaaacccatcttgatgaagaaactggagaaaagacatctatcacacttgatgttgggcctgagtcctttaaccctggagatggcccaggaggattacctatacaaagaacagatgacacccaagaacattttccccacagggtcagtgaccctagtggtgagcaaaagcagaagctgccaagcagaagaaagaagcagcagaagaggacatttatttcacaggagagagactgtgtctttggcactgattcactcagattgtctgggaaaagactaaaggaacaggaagaaatcagtagcaaaaatcctgctagatcaccagtaactgaaataagaactcaccttttaagtcttaaatctgaacttccagattctccagaaccagttacagaaattaatgaagacagtgtattaattccaccaactgcccaaccagaaaaaggtgttgatacattcctaagaagacctaatttcaccagggcgactacagttcctttacagactctatcagatagcggtagtagtcagcaccttgaacacattcctcctaaaggtagcagtgaacttactactcacgacctaaaaaacattagatttacttcacctgtaagtttggaggcacaaggcaaaaaaatgactgtctctacagataacctccttgtaaataaagctataagtaaaagtggccaactgcccacaagttctaatttagaggcaaatatttcatgttctctaaatgaactcacctacaataacttaccagcaaatgaaaaccaaaacttaaaagaacaaaatcaaacagagaaatctttaaaatctcccagtgacactcttgatggcaggaatgaaaatcttcaggaaagtgagattctaagtcaacctaagagtcttagcctggaagcaacctctcctctttctgcagaaaaacattcttgcacagtgcctgaaggccttctgtttcctgcagaatattatgttagaacaacacgaagcatgtccaattgccagaggaaagtagccgtggaggctgtcattcagagtcatttggatgtcaagaaaaaagggttt

SEQ ID NO: 1980 - DNA, 1947 bp, Homo sapiens
gctgggaagtcggggcggcgaggcagcctctcccggggcgttcgggctcctccggctctgccccgatgtcgttattacggccgtttgcagcctccgtgccagggccgggggtgcggttcgggacgcgggatcctaggtcgggtcctgccccgcccatgtggcgccggcgtctgtgttgtctgcggtctccagggcagcgccggggcgggcgggggcccgggcggcggcggcggcggcgcgggaggatgcggggcccgtccgggtcgcggccgcggaggagcgccgggcaggtaacgcttttgtgaaccacaactttaaatatcagccagctgctcctatcaacacgagtatcccctgttaattttttgcatttttcaagatgagtaaacgtaaactaattcccaagctctctattcaatctcctgtccttcataccaacttaaatgtccagtccacacacccacctttgaagaaagaagacttacatcggatttcaaaagactccttggaatctgattcagaaagcctcacgcaagagattatgtgccattctgagtttgatgatcgaatccggggcaacggtatggagcccgacagcttagacgaggaggaaagccctcgatggggaagcctgcacgagatggaagaggaagcaagtggaaaagcagctcagatggctcgcgagcaaaaccaccatacctgggaccagggcgccaataacaggcaacaaccaatagaagacaaatattcagacctccgctatgacccgaactggaagagtaagaaggaggaagggcagctgctgtctgtggaagcgttgccggagtccacggacagctctttagaaaatctgcctttggctcccctctacccttcccaggagacgtcaatggaactctccgggggaaaaggcgggcagaaagagagtccacagagtgcagcttctttacttggtagtgaatttttaagcccaaactatgagcatggtgcccgtcgcagcaagccgttttcagagctgagcgacagtgacctggaggagaagtcgagcagcctttctccgtacgtgaagagctcaagttcacataacgaggttttcctgccgggatcacgtggccctcggcgaaggaaatccaaacaacattttgtggaaaaaaacaagctcactttgggattacccaccccgaaaacggactcttatcttcaacttcacaataaaaaaagaggggaatctcatccagaacaggtcattttgagagtaaattctctcccacgtgatggattcaaaaccttttggagccagtaaacttagttccatttcacaggtgcacataaagaccttcctgcccacctcctatggacatgtccagggatacaggacaagagtggggttagaatggtagagtccaccactcttactggaaagagcttgagatttatcacctgctaatgtgaggtcattttcaaatacaaaggagaggttattatgttaaatgtggttgcccttagacctattccaaatcccaactggtatttttttttaacatattctaacctgttctaacctctaagcattttctaatggaacaaaatagatgaggtggatgaacatttgtggcttttcttcagagactcccttttttgtcttaaagaattacgtctggtggcacgttggctcatgcctgtaatcccagcactttgggaggtcgaggtgggaggatcacttgaggccacgagttcaagaccagcctggccaacatggtgaaacccatctataccaaaaatacaaaaattagccgggtgtggtgatgcacacctgtaatcccagctactcgggaggctgaggcacaagaatcgcttgaacacgggaggcagaggttgcagtgagccgagatggcgccactacactccagcctgggttatagagtgagactctgtctcaaaataaat

SEQ ID NO: 1981 - DNA, 1780 bp, Homo sapiens
agtccgcggctgacccggagactgaaccccaaccagcccgtgagcgaggacggctgagtccgcagtgtgcgccaccagggtggtccccagagtgtccttaagtcggttctcctcggtggggctccaaggccgacgggaattagccgggatagaaaggcggggcacaggggcctgggggggttagaatgtgcgcgcagcggggggcgcagtctgtgcgcgcttggcagtggcaggagtccttcccggagcacaggaggcacgaggggagcgtggatgagaggggagcggcctcccccgccccagggcgggaacctttgggtacatagcgggttctagaatgcggagggggctgggtttcctgccagagctggcagtaggtgcgcgtgggcccggaggaccgaggccatgtctatctgctcctgaggagggagaggtggtgtcctgttccggagcgagtggttgggaggggggcatttgcggacaggagtgggtccccgcaaagagcggaaaggaggtggtgtgtgtgtccatgttggagttccaacccagggcagacgggaccatgggggtgttgcggggtgcgtgtagactccttgagcgcccaagccagtcgtttaggccgccttcagggctggggctcggtctgccccctcccacccccttcctctggaggtccctccgcctgttccagacgtagcttgtacacattttccgatttcctgcggggctccgccctgcagcggcagctgggtgactcaggaccccggtggccgggcccccagctccatgggacctttgtttgctccgttctttggctctggccctgtggcctagggcggtcagaggatttcctgagcctcgcccttgccctctgacagctgggccagcaggccccgctgaggtctggggtggggggtccctgagtctggggttgcggccccttccactgggctcaggagaagatggaacacagagaggtaagatggggttcctgcaacagcccgtgttgcggggcatcatgggttacccggcctgaggtcacctttggcaccggttggtttgaaatgctggcggctggaaaggaggtgttcctgttcctggctccaacctgggtgaagccgtgagagagccttctacttcctcccgggagctgagcagggagtgggcacccggagacctccccagttcctctctgtgcctctgctttgctacctgtggcattgggacatcaggggaacaagccctggctcccaggcccctggctgccttctcatgtggcttcgtgtgaacccctattcggcgtagcttttgtggctcctggactctactttgggtcccagatgtagagagagcagcctgattacccagggctgccagggacagctggggcccgagagatggtggcccctcctctgtgtcttgactgtgggcaagttacttcacctctctgggcctcagtttcctcactagaaaataggggtaatagtacaggcgtggtggctcacacctgtaatcccagcactttgggaggccaaggcaggtggatcacctgaggtcaggattcaagaccagcctgacgaacatggagaaaccccgtccctactaaaaatacaaaattagccgggcttagtggcgtgtgcctgtaatcccagctactcaggaggctggggcaggagaatcgcttgaacccgggaggcagaggttgtggtgaaccgagatcgtgccatggcactccagcctgggcaacaagagcaaaactgtctcaaaaaaaaaaaaaaag

SEQ ID NO: 1982 - DNA, 2785 bp, Homo sapiens
ttactttcttactcttgggtcagttcctgctacagctatcccaccatggacttcttgatgagtggcctggcagcctgcggggcctgtgtattcaccaatcccctggaggtggtgaagaccaggatgcagttgcaaggagaactgcaggcccctggcacataccagcggcactaccgaaatgtcttccatgccttcatcaccatcggcaaggtggatggccttgctgccctgcagaaaggcctggcccccgccctcttgtaccagttcctgatgaatggcatccgactgggcacctatgggctggctgaggctgggggctacctgcacacagccgaaggcacccacagtcctgcccgcagcgcagcagctggggccatggctggggtcatgggagcctacttggggagccccatctacatggtgaagacacacctgcaggcacaggcagcctcagaaattgctgtagggcaccagtataagcatcagggcatgtttcaggcgctaaccgagattggccagaaacatggtctggtggggttatggcgtggggctctgggcggcctgccccgagttatcgtcggttcctccacccagctgtgcaccttctcatccaccaaggacctcctgagccagtgggagatctttcctccccagagctggaagttggcgctggtggctgccatgatgagtggcattgcagttgtcttggccatggcaccctttgatgtggcctgcacaaggctctacaaccagcccacagatgcacagggcaagaaccgagtccccaagttctcagcaacatcatgcagtgcttcagcgcctttactggggaccaaagatgttaggatcgtgaagggtcagactggtcaccagctgttcaaagtcacccaggctccagggtgcagcccgattctcctgggaacccagtcatgagatacccgcccgttccttcctccttacgggggctgattgaaggtaagcaagagatcagtctggtactggggcagcctcagcaaggcctgatgaagtgtcacgtcctttgctacctaaggggatcagagtcaggatgcttacctggatctctgcgtccccgctaccgcccttccaggacattacacactctcgggccctcacctgctggttttccttagctatctgctgcttgccagagaggacccaggcttcttgacagcggcccctcagggccaggttctccaaactgagaggctgaacagactccacatggacagccctagccccctgcacgccaccaacatcctcaaagtggtacctggagtagggaagcggggtcaggaagggacatctctggtcgcctccccgggagcatctttaagttgcaggcctggctcccggcccgtgcgtggtctcaccgcccggattaaccgtcggccgcgggccccgcccactggtccgaccccgcccctgccattggccagccgggggccattccctcaccgcgcagccgcttcgccccgtacgtgggcctgcagctcgagaagttccactatcaggctctggtccgtcacgggatggcagaaaacttcttgattgtccgggaccggtcggaggtcgctggagtgaggcgaggcagaccctggttgaccccggtctcttcccacaacccacccagtcagccgcccctgggcgccccggccttctcaccttacgtcaatggcccccatggggaggatggcggaaaaggcgcccccgaacagcgggcagtctctcgtgggctccatgggtctgaggctgggttatgggcattagaaaggtttaaaagaagtccacattgggtcacgtggcatcggctccctgggtttcgcagctgccaccgccacccgggtctggcttagctcccggatcctttaagatttggctccgccctgcgctctcgttggccaatcggcgccaagaccctgggggcgggggtcagcggctttgctccggaagccgcgctcttaggagtgcgcctggcgggacggtggggtctgccttggggttggacttagggttagggtctatgtcgcccccggtggtcacgagcatgctcccgccagcctcctcttgattgattgattgattgattgattgacaggtctcgctgtgtcgcccaggctgtaatgcagtggcgcgatcaccgctcactgcagtctccacctccaggactcaagtgatactcctgcctcagcctcttgagtggctcctgctcccgccaccacgcccggctaaatttttaattacttgtagaaatggggcggggtggggagtgtctcccaatcttgcccaggctggcctcaaactcctggactcaagcgatcctcccgcctcggctccctaagtgctggaattacaggcgagagccacagcgcctggcctcctcgtccttttcaagtggtcacaccttccaagaaggtcgcctgagaccctcctgaggggcaggtgctcgtcaaaggggcccacgtctaggtagggtctcttgagtcaggaaagcatagtttcacggtgttctgggcctctgaaagaagaatgggctgccacccagaccgctaattcatagatctgctgctgggaattaggggaacaatgcgtccaggttaggattcaggtctcacatcttcctgaaagtgagagccaacctgggtattagaaatctaattcctctcaaatatttgccttgggaatgctcccgggcaggtgcaaccccacccccagctccacacacctggacagaagcacagattaaaccctcttttgtttgtctttt

SEQ ID NO: 1983 - DNA, 2744 bp, Homo sapiens
agaatgcgagaaagtgaagtcaaattcggacttgtaggcgatcagggctgaagacgctgattagagagaaaacagagggtgatggtggctgcacgtggggaatgggtgacatctcccagggggaatgagcacaaggcccagatcggaaaccccaaactcagattttaaggtttggacaagaagtacctgaggagtggaggagtgagaaagaagtgccagagagcctgaggaggaaaatcagcagactggcattatgaagaatgttgtcagaagtagggagtaggcactagtcacctaagataaggagctggattctgcccaaggcactgttatgtggtatacttgttacatgtcctgaggatccgctgaggtatttagagggaatgatcatggttataatcaaaagtggtcttcagaatcttctttgatgactccggaattgatgataaaagcctgtagcttttatactggacatttagtaaagactcatttttgcacttggagagacatagctcgtacaaatgaaaatgtcgtcctggctgaaaaaatgaacagagcagtgacatgctacaatttcagacttcaaaaatctgtatttcatcactggcactcttatatggaagaccagaaagaaaaacttaaaaatatgctattgcggatacaacagatcatctattgtcacaagctaaccattatcctaacaaaatggcggaatacagcaagacataagagtaaaaagaaagaagatgagctgatattaaaacatgaacttcaattgaaaaaatggaaaaataggttaatactcaaaagagctgctgcagaagaatccaattttcctgaacgaagttcttctgaagtctttcttgtagatgagactctaaaatgtgacatttcactgttacctgaaagagcaatattacagattttcttctacctcagtttaaaagatgtgataatatgtggtcaagttaatcatgcctggatgttgatgacacaactaaactcactgtggaatgctattgatttttcctcagtgaaaaatgtgattccagataaatatatagtgtctactttgcaaaggtggcgtttaaatgtgctgcgtttgaattttcgtggttgtcttctccgacccaaaactttcagatctgtcagccactgtaggaacttgcaagagttgaatgtctctgactgcccaacattcacagatgaatcaatgagacacatttctgagggctgcccgggggtcctgtgtctcaatctgtctaacacaactatcaccaacaggacgatgcgactcctgccgaggcacttccacaacttacagaatcttagtttggcttattgcagacggttcacagacaaaggcttacagtacctgaacttggggaatggatgccacaagctcatctatctggacctctctggctgcacccagatttcagtccaaggcttcaggtacattgcaaacagctgcactggaattatgcatcttaccattaatgacatgccaactctgacggacaactgtgtaaaagctttagttgaaaaatgctctcgtattacatcgctggttttcactggtgcaccgcatatctccgattgtactttcagagctctttctgcttgtaaactcagaaagatccgatttgaaggaaataaaagggttactgatgcatccttcaaatttatagacaagaattatccaaatctcagtcacatttatatggctgactgcaagggaataacagacagcagcctcagatccctttcacctttgaagcaactgactgtgttgaatttggcaaattgtgtaagaattggtgatatgggactaaagcaatttcttgatggtcctgcaagcatgaggataagagagctaaatttaagcaactgtgtgcggctaagtgatgcctctgttatgaaactatctgagcgctgccctaatttaaactacttgagtttacgaaattgtgaacatttgactgcccaaggaattggatatattgtaaacatcttttccttggtatcaatagatctctctggaacagacatctctaatgagggtttgaatgtgctttccagacataaaaaattgaaggaactttctgtatctgaatgttatagaatcactgatgatggaattcaggcattctgcaaaagctcactgatcttggaacatttggatgtctcttattgctcccagctgtcagatatgattatcaaagcactggccatttactgcattaacctcacatctctcagcattgctggctgtccaaagattactgactcagcaatggagatgttatcggcaaaatgccattacctgcacattttggatatctctggttgtgtcttgcttactgaccaaatccttgaggaccttcagataggctgcaaacaactccggatccttaagatgcaatactgcacaaatatttccaagaaggcagctcaaagaatgtcatctaaagttcagcagcaggaatacaacactaatgaccctccacgttggtttggctatgatagggaaggaaaccctgttacagagcttgacaacataacatcatctaaaggagccttagaattaacagtgaaaaagtcaacatacagcagtgaagaccaagcagcgtgaccttcagcctcaagcaggaagaacaaaaaatcaagaacttggcaagttttctccatttgttgcaagtatgtttactagctgaatctcaataacaatgtaaacaagcaac

SEQ ID NO: 1984 - DNA, 2369 bp, Homo sapiens
acacagccctttagagatcggtggtgctgaagggcagggatcttattccaccttctgaagcttctgtcgaaccagttgtaaggagaatggagagagcagtgagagtggagtccggggtcctggtcggggtggtctgtctgctcctggcatgccctgccacagccactgggcccgaagttgctcagcctgaagtagacaccaccctgggtcgtgtgcgaggccggcaggtgggcgtgaagggcacagaccgccttgtgaatgtctttctgggcattccatttgcccagccgccactgggccctgaccggttctcagccccacacccagcacagccctgggagggtgtgcgggatgccagcactgcgcccccaatgtgcctacaagacgtggagagcatgaacagcagcagagggccctgtccacctgatccagctccactatgcctacctgtcccctccccgtccctgtttccaaagcaccctagcggtcctgagactgcctgggctggcaggtgggcagctaaggtctcaggagcttgggggtcagtgccccatggccacctctgcaggtcatggtatgggtccatggaggcgctctgataactggcgctgccacctcctacgatggatcagctctggctgcctatggggatgtggtcgtggttacagtccagtaccgccttggggtccttggcttcttcagcactggagatgagcatgcacctggcaaccagggcttcctagatgtggtagctgctttgcgctgggtgcaagaaaacatcgcccccttcgggggtgacctcaactgtgtcactgtctttggtggatctgccggtgggagcatcatctctggcctggtcctgtccccagtggctgcagggctgttccacagagccatcacacagagtggggtcatcaccaccccagggatcatcgactctcacccttggcccctagctcagaaaatcgcaaacaccttggcctgcagctccagctccccggctgagatggtgcagtgccttcagcagaaagaaggagaagagctggtccttagcaagaagctggtatggccacccttttggggatggtgccgggcaatggcacagagggggttctatccatcccctgcaggagcagaggggcagtctacccccaggtggggctggggacagcagctcatgaggggaaggggctgagggcttggagacagaaatggagggccatctccatccccacagcaggcctgtcttctaggaaagaaactggacgcatctgttgccctgatctcctggttcccccgacccccttaaccctggtgatcttcatcccttcactttccctccaggctcagacactcaggcctgcagctcagtggctgctggggtcctagcctttgaggcttggccctaacttgggagcctcctgcattgctttctcctgcagaaaaatactatctatcctctcaccgttgatggcactgtcttccccaaaagccccaaggaactcctgaaggagaagcccttccactctgtgcccttcctcatgggtgtcaacaaccatgagttcagctggctcatccccaggggctggggtctcctggatacaatggagcagatgagccgggaggacatgctggccatctcaacacccgtcttgaccagtctggatgtgccccctgagatgatgcccaccgtcatagatgaatacctaggaagcaactcggacgcacaagccaaatgccaggcgttccaggaattcatgggtgacgtattcatcaatgttcccaccgtcagtttttcaagataccttcgagattctggaagccctgtctttttctatgagttccagcatcgacccagttcttttgcgaagatcaaacctgcctgggtgaaggctgatcatggggccgagggtgcttttgtgttcggaggtcccttcctcatggacgagagctcccgcctggcctttccagaggccacagaggaggagaagcagctaagcctcaccatgatggcccagtggacccactttgcccggacaggggaccccaatagcaaggctctgcctccttggccccaattcaaccaggcggaacaatatctggagaccaacccagtgccacgggccggacagaagttcagggaggcctggatgcagttctggtcagagacgctccccagcaagatacaacagtggcaccagaagcagaagaacaggaaggcccaggaggacctctgaggccaggcctgaaccttcttggctggggcaaaccactcttcaagtggtggcagagtcccagcacggcagcccgcctctccccctgctgagactttaatctccaccagcccttaaagtgtcggccgctctgtg

SEQ ID NO: 1985 - DNA, 1769 bp, Homo sapiens
actgactcttggaaagaagaggggggcctgggagatccaggttggaaggatcttgtttcgctctcccattggcccccaacactggcctcatggcccccttactggctccaggcatccccctcacccccaccaacgagccagctgggcctgttcccctctccactcccctctactccctccctgtaacctccggtctcccgcagaaagaaagaaaaaaaaaaaagcttggattaagtgatgagctgcccgcctctaaaaggaccaggaggcgtatcaagcctgagtgccggaaaacccacggcaatcttcagcagccaccacgtggggcagagaacgcgagcagtacctgcaggacccacagccggtcgggctctggcgccagcctcgacggcggccccgccatctccgcccggctgcccgcggcctcacctcctccgggggctcggttagcctcctggcgctgcaaggctgcctgcgcgcggttcgctccgggggagggaggaggagggaggcggcgaggagccgacggctccacctgatggagaagcgcggagagtccctagacctcggagtgcgctgcaagaggggagaggagagagaccgccgcccctgctggaagccttcgcgtccgggggcggcgcgcgggggaaggggtctctggacagtcggtggaggcggcagccctacagagacagccgaaagccagcaacttggaaaaccgcccgaattctgggtttctgcacatccaggctggctccaggtctcttgtgcccaccgtgcaagccggtgggatgccagcaggtggcatcctctccagcgtttcttcgccaggcgtggagtccggaggccgaatccatcagtccccagccccctccccaagcctccggtgccaagtgctgggtcctgtgagcccctggccccgccccccacctccgccagcggggcgagccggagctgggtgacccagaccctcgcggaggcgggagcctacagaggatgccggccggccccaggttctgctgctggctggccaagaagtgacaggagggcaaggctcccccggaaagcgtccaagccctgctctcctgctcttccaagccttgctgcgtgttgcccccagggttttctgagatctgggacgaagagagtgatgtgcaaggttctgggtcccggtgcaggagtgaggggtacggctgtcgagtgctcggagcaggctggcgtttgggcacactgcagacctcagctcaccgccactttctcctgaccttccttgtggctgtcagcccaatgtctatcatgtgttattccctcggtttgttcaaaggcctgttttggatacttaaagacatgtggaataactatgagaattcctgttccttgaaagtttgtcctctagttggaaagaggtatatacaggtggattacgagaccttaaccctgctccctgcagttggtctttccattgcagagggaaagggctcagagaaccagatattcaactttcagaagcatcccctgaagggcaggttgtctgctcccctgattcattgaggatcaggcctcatggagggagtctgccctatgaaggtggggacagcgcccctctagttcacagccgtctccacagctcttacccaggtaggcagtaggctctcactacgtactgctgaatgaatggtaaagttttacctagtgccccacattctatttcctgttttctgaatccaatttaacttattcttccctctgttattaaaccattgtcaaac

SEQ ID NO: 1986 - DNA, 2127 bp, Homo sapiens
agttgggagtttccctagcgactcagttcgggtgggcgttgggcgcctgagtcagccaaacagcctactcggggttcttgggtagcctttggggtgaggggacttgggcggccttggtctgtaagctctgcgttcccgggcgtggaatagactggccgcgcacatgcgtttctgtggttttcctggtttggggaaagcgggtaaatggtggctggttgcggctaactgggccgcgctaaaaggtaacccaaggcaggtggattacctggggaaacagctggagcagtggtcctgggccgccagtccgcggtcatcccgggagcttaagatgcggagtggtgataggctccggatgtatgagccctgtggctcaagggcgctgttctctctgctccgaaatagaaataatacctgtctcacagagctgttgaaaagctccactgaaataatgaccgcaagtgtgaactgtaaagcaatgtaagtagtatttattattaaaaggtctctactgaaagaaagagacctaggaggaatgcagtgcccggcgctgattggaaaacgggtggcgctgcgtcctgggccgaggcttccctagcgaaaaccttgtctccctccatttcgtcccttgcctgccttcccaggagagacgtggccgatagaagccgagtggcagtaactctaagttggagttacacggcggagaaggaagcactgactcagactcgggtaacttcctcttattccctcacacgtgtatcttgttcccttcttcgaagtctgtaaatttaaaatcctaagccccccaacaactgaacagacccccgtgaggccaaggggacaccagcaaaatcttaacaactgagttcccagtcataacgggatgggaggtcagacggacctggttataccctctcccttttgtgatttagaggagatagctgactggccataaagttaaaatagaggccaggcgcggtggcttacgcctgtaatcccagcactttgggacgccgaagcaggtgggtcacctgaggtcaggagtggatcacctgaggtatggcaaacatggtgaaacgctgtctctactaaaaatacaaaaattagccgggcgtggtggcacgcacctgtaatcccagctactcaggaggccgaggcaggagaatggtttgaacccggcaggcggaggttgcagtgagcggagatcgtgccattgcactccagcctgggcgacaagagtgagactctgtttcaaaaaaaaaacggagatgataggactgacggaattgactccatggcaataagataccaaagtataaacaggacctaagcccatgccaagcaagggttaaaagtcatgcatccctacgcttgaaaaataaactatgttctcactatgcttcaaggtttttctttagcagctaaacaagcgctggcctcacagtattaaaacaatttgcagttcatcgaccaccagacactaacaaccctctcccaccagccgtaactacagcttttattgatttcagttactttctcctgataagaaggtcactgaccatggacttgttctggccaatttatagtgattgcatgcttacgtaacttcctgaaaagatattttgatgtataggaccaaactgtaaatacatttaaatgttaagtctccaccccaaagtgaacatggattgtctgttaaacatgcatatttgtttaatatgcatgtgtcaagatcactttcatgaatattcatagccgctcctctaacttgttgaatatgtatgtttagccaaccagttaagcataaagttcctactccaactcctctgaagtgtctgtatgtggtcttggctggaggcatgcttcccagcctgcagaatggccaccttgcaggctgtaactccttataagaaacaaagtctctccttttctaaatctatagatcttatgattttttagttaacatgcacaataagaatacaggaagctaaggaaaagataactgcagaatcttactcctaagtgggaattgtgaacaataatgactacctgaaatgttacaggctttttaagaatcagcaagatcattcaggtttggttgtatacattaaatttacaaattggcaaaat

SEQ ID NO: 1987 - DNA, 2050 bp, Homo sapiens
gaaatcagtaaatttaagcaattttatttttcattctgtgcttcagggatctatgagggtcaacacatatttatcacacgctgaccttgtgctcaggcctataggaaaatgaacctccctgcccgcaatgaccttagaacctaactaaggatatggttaaaacaagcgcaggattgggtgagacctgctcaagggtcaggcgctggtttgtcggggagaaatgttgcccaggaaggacaggtgtgaaagaaagagaagatcctgcaagaccggagggcccaggaaagtctgggggactcaaaggagagtttcaggattgaccatgggtggacagggctctgcagaccaggatcttttctatgcacacttggggccagaaagttctttgtggtgggggctgtcctgtacaatgcaggaagctcagcagcatccctggcctccacccactcaatgccggtggcactccctccctagttgtaaatgtgtgcagacattagtacttgtcacctgcagggaagaatcaccccactgagaaccacatgctgagtcaaggcaacagcataggaattggagcacgcaagagagctggtcaacacagagagatgagcttcaggggctgctggatgtactccacctggaagcagaggccgaggacccctcctcctggactagggctcacctcgcctcctgactgtattctgcctgtgttctcctccagtcccacccttatttctctttgtctaaatggcaaactccctttaagcaagaattcatggcgtctccacattcggccctcaagaaacttttattgagttgaactaaaaccaggcatgtcttaagtgttcatggctgataatgcgggatccttcaacgctggaaacgcccagatggtaacgagagttctgatagtgccggatccttcgacgctggaaacgcccagatgaaacttcatgatgatcaaccacacctcacatttgcttcattcagtctatggaccaggaagaattttctgtgacacattcaggttcttactcatttacagagtcacagatctgtcagcctgggaaccggcccccaaatggaagacctaggcagttctgatgggtccatctgcaaggggagtcacagaagtgtgtgatgaggagaggaagagatacaacagatgtcttatgagaagcagagggaggacctcaagagactgcctggcccagtccctcactaggcgtaagaaacaaactcacccatccaaacccgaagaatggactcagagacccagagaacagcgaaattgaaaaatggagacgtcaagttccctagtcacagagcagctgtgatgggacccacgtaaacagccctgatcagtagtgaagagcaacatgtggcacacagggcctcctgcacaagcaacagtcgctgcttgctgttactgtgggctccacgttgggatcagacacacctgtcttcagtggcttgcagttgcagcaaggaccgaatggtctattctaaaagaaaacattacaggcaggcagtaccagaccactgtgcttgcagccctcatgagaaggctcagaagacacaggagctgccctgggtgtgaatttcgtgtccatgctggctcctcgcagtggcccttggcataggttgggatcttgcagcaagattcttcatcggtttctccatctctgaagacttcttgccaacagctgtacacaggtttgttctaattccccaaccttgccacgactgacctgggtcatcaccatgtgcttattgaagagccttggaatactgtatagacccgtacagagttgttcaaatagacaattgaggacgactataatagtttctcattagaaatacatgctaataaacatcatgtctttggtattaagtggcaattagatgaaacaacctgaaattctgtctgataccaagattgaactttgctgagattactgtttcactcaccgaaaatatcagaatactcaagggagttattttttttcttaatgtaactttcataaaggaaatgaaagaaatgtggagactg

SEQ ID NO: 1988 - DNA, 1500 bp, Homo sapiens
gcaatctcggctggctgcaagctccgcctccctcccagtagctaggactacaggcctacaggcgcccgccaccacacccggctaattttctgtatttttagtagagacaggctttcaacgtgttagccaggattcttatttgtagtaatcaagcacactgattctaacttaacagagcagaacatcaatgtattagttttcaaagagggctctatttgccctaggtccgtggttaccaagaaacaaggctattttctaattgttgtaggccaaggatttcagagggcttgataagggtctgggacttgtgtctatggaatagcaggaatagaagatgaacttgggtcatgtgaagggtatttggcttcaaattattaacactggagacaagaacatggttggagagtgggccttaccagaagaaatggttgacaatttaccaccctccaacaattgcatactgggccatattcttcacaggctagctgaaaaatctcttcctcctcgagcggaatcaacaacacctgaattaccttcatttgctgttaaaggatgcttattggggaaaacattaagtggaaaaactaccattttaaggtctctacaaaaagactttcctatacagatactttctattgacactcttgtccaagaagctatccaagcatttcatgacaatgaaaaagtcagtgaggttctaccaattcagaaaaatgatgaagaagatgctctaccagttctgcaagaggagattaaagaaagccaggatccacaacatgtattttcagctggtccagtttcagatgaagtattaccagaaacagaaggtgctaatgctgataaaacaccaaaagctgaagaagtcaaatcaagtgatagtttcttaaaactcactacacgtgctcagcttggtgcaaaatcagaacagttgctgaagaaaggaaagagcattcctgatgtgctgcttgttgacatcatagtaaatgctattaatgagatacctgtgaatcaagactgtatcctagatggttttccaatgactttaaaccaagcacagcttctggaagaagctcttacaggctgcaatagaaacctcacagaagtggaaagaaaaaaagcacaaaaatccacattggctattgatcctgcgacttccaaagaaatacctcttccctctcctgcatttgattttgtcatattattagatgtttcagatacttcctcaatgagtcgcatgaatgatattatagctgaagaattgtcctataaaactgctcacgaagatatcagtcaacgtgtagctgctgaaaaccaagataaggatggagaccaaaatttaagagaccagatacaacatagaattataggcttcttggacaactggcctttattggagcaatggttttcagagccagaaaatattttgataaaaatcaatgctgaaatagataaggaatctttatgtgaaaaagtaaaagaaattcttacgactgaaatagc

SEQ ID NO: 1989 - DNA, 1579 bp, Homo sapiens
agaggtcgctgcgagacggtacccgcgccccacagtccacccgctcctcggagtccccccgcgccccggagtccacccgcgccccggagtccacccgcgcaggtccacttctccatccctgctctcgacctccgcccctgcggtgggggaagttcctggggcggtggctgggaccaggccgggttttaggcgggcgcagatttccgggctaactttcctcgccgtctcagcgcgggaagggggaatgggaaacccgggccagagcagcggagcttcccagccgcacacttcctccctccagccgtttgtctcggcaggggagggcccaggcagccaagccggcaggcccactggttatccgaccttgtgctctggccgtgggtggagaccttacatccagctcagagcgcctcctcccatcccctgtgtcctctaggcctccccagactttgccttttagccttccagtgaaacaagttctgtatccaagatatacaactaagtggacaaagcagattgcagaaagtcttttcgtagctcacaaggggacatcaaagatgacaaagaggagtggaagaagacagagagaatcaatgtgaggagcctggaacagggctctgaattgtcttcccgcagtgaaatcacttgtctattgctgagccaagaatttgactctgagcatctaggatgagaaagaagaactggcacctacgccatctctgcccctcgggactgactattttggcccagtttcctcaacaatgaaatgggactaattatcccaggtcacacttctctctgggcttaccctgggaatcagatgattgagctttggatctcactctgttgcccaggctggaatgcagtgatacgatcatgactcactgcagcctcaaactcctgggttcaagtaaccctcccacctcagctttctgagtaactgggactacagaatgccccaccccacttagtccatagtgatgcccacctgtggttaatggagctgaggctgctggaccaaagggaggaagtctgttaggcatatgtggaacccaaaagaggaacttcatcaactgtcatggacagctctgccactttgtgaccctgtggactttttgggaagtgtttttgtggttcaccagtctctcattaggcaaggccatttgtcctgggttggtcttcttcattggtggaaagtacagctgggagatttggaatggttgcagattgacttgactctcataaggaactgccaccatgagcttttggggaaagacctcaagctgtggtgtgttgctgaggattgtgggattcctccaaatcttggggaacattttgagtcatcactggcagcagatttctgttgacaacttgagcaacttcagaatgaagaagccatcttcatctctcacatgaatatgactttgggtaaatcatctcgaaatctgaacccatggttgtgatccacactcctcctgagttctgatttttagtgtaacctttttcttctcattttttcttctttgtgcatctcttaaggaggtttttaaaatctcataattaaaaaatttatttcttc

SEQ ID NO: 1990 - DNA, 3071 bp, Homo sapiens
gacaactgagacggctgcagaccatggggcagggagcatatggagcacggatatgccagacagagggatgattcatatcccaggcaggatggagcagggcagtgtgctatttcatcgtgctactcagaacttatgaattgtttatttctggaatttcccatttaatatttttggactgtggttgatcgagggtaaatgaaattgcggaaagcaaaaatacagataagggggactgcttgctgtacaaagatagagacaagaggaaggagctgtcctcaagggccttttgtgtgaagacatctggcacacagatacgctgcatgcaggtggcttgagagaacatgcatccaggccctgaggaggcgggaagtggccgctatggaccccgttatatcaccgacatgggagctggtgaggatgatgaaggatttgaagacgacttagatttggatatttcctttgaggaggttaaaccacttcctgctaccaaaggagggaataagaaatttttggtggaaagcaagaagatgtctatatctaacccaaagaccatttctaggctcatcccccctacctcagcatctctccctgtgaccacggtggctccccagcccattcccatacagagaaaggggaagaatggtgtggccataatgtcaaggctctttgacatgccttgtgatgaaactctctgctctgctgacagcttctgtgtcaatgactacacctgggggggctcgcgatgccagtgcaccctgggcaaaggtggtgagagctgctcagaagatattgttatccagtatcctcagttctttggccactcctatgtaacgtttgaacctctgaagaattcttatcaggcatttcaaattactcttgaatttagggcggaggcagaggatggcttactgctctactgtggggagaacgaacacgggaggggggatttcatgtccctggctatcatccgacgctccctgcagttcaggtttaattgtggaactggggttgccatcatcgtaagtgagaccaaaatcaaactagggggttggcacacggttatgctctacagagatgggctgaacgggctgctgcagctgaacaatggcaccccagtgacaggccagtctcagggccaatacagtaaaattactttccggacacctctctatcttggtggcgctcccagcgcttactggttggttagagcaacagggacaaaccgaggctttcaaggctgtgtgcagtcgctcgctgtgaatgggaggagaattgacatgaggccctggcccctgggaaaagcactcagtggggctgatgtgggggaatgcagcagtggaatctgtgatgaggcctcgtgcatccatggtggcacctgcacagcaatcaaagccgactcctacatttgcctctgtccccttgggtttaaaggtcgacactgtgaagatgctttcaccttgaccattcctcagttcagagagtctctgagatcttacgctgcaactccctggccactggagccccagcattacctttccttcatggaatttgagatcacatttcggccagactcaggagatggtgtcctcctgtacagctatgacacaggcagcaaagacttcctgtccatcaacttggcagggggccacgtggagttccgctttgactgtggctctgggaccggtgtcctcaggagtgaagatcccctcaccctgggcaactggcacgagcttcgtgtatctcgcacagcaaagaatggaatcttacaggtggataagcagaagatagtggagggaatggcagagggaggcttcacacagattaagtgcaacacagacattttcattggcggagtccccaattatgatgatgtgaagaagaactcgggtgtcctgaagcctttcagcgggagcatccagaagatcatcctgaatgaccgaaccatccatgtgaagcatgacttcacctccggagtgaatgtggagaatgcggcccacccctgtgtgagagccccttgtgcccatgggggcagctgccggcccaggaaggagggctatgactgtgactgccccttgggctttgaggggcttcactgccagaaagcgatcatagaagccattgagatcccgcagtttatcggccgcagttacctgacgtatgacaacccagatatcttgaagagggtgtcaggatcaagatcaaatgtgttcatgaggtttaaaacaactgccaaggatggccttttgctgtggaggggagacagccccatgagacccaacagcgacttcatttccttgggccttcgggatggagccctcgtgttcagctataacctgggcagtggtgtggcatccatcatggtgaatggctccttcaacgatggtcggtggcaccgagttaaggccgttagggatggccagtcaggaaagataaccgtggatgactatggagccagaacaggcaaatccccaggcatgatgcggcagcttaacatcaatggagctctgtatgtgggtggaatgaaggaaattgctctgcacactaacaggcaatatatgagagggctcgtgggctgtatctctcacttcaccctgtccaccgattaccacatttccctcgtggaagatgccgtggatgggaaaaacatcaacacttgtggagccaagtaacaccagctggccttgtccaagggacagagccttctattctgagaatcccaggggccctcagaccctgcctgatgctatatgcagaggcccagggaccaggtgtgtttcctctcaccaagaagaaagtacacactgatgagaaactgagaaccaagacaggcatccctgggtggcctttcctgctgacactccacgagctgacccagcagaattctctgtgtaggaagcatcggactttgtccattgaatatgtagcggctgccagagatcacacatcaatgcaaattccagagcctgtctgctatagctcagtgactgtgttgtgattcatagtacattaaaaagagagagagagagaaagaatcccacagggcactattaaaatacttctctccttccctg

SEQ ID NO: 1991 - DNA, 1880 bp, Homo sapiens
ctaatttttttgtatttttgtagagatggggtttcaccgtgttggccaagctggtctcgaactccggacctcaagtgacccacctgcctcggcctcccaaagtgctgggatagcaggcgtgagccactgtgcccagcctcacctaatggtttcttagcaaacttcagtagaatgtttagaacgcggccctgataaacttgagtgctggtaggaggtgctacctcgctcaatctgtgagcaaccagccctgtgccctggatgcttggcgggtggagagaaagacagtgttatgtgggcaagcctccaactcaccagttgcagtagagcatctggctctctgtctgctgctatagccctgtgagtcagccagacgcgtggtccccaagccagcttcccacctagcacccttgttctgctacagctcccccacctgccctcctgcattgcctaggatcccacgccccgctttcagtctgctctgggacatctgtcttcttctttgcaggggactaagttatgacttaatgaatcctaaaaggaaaaaaagatgtcaggaaaaaaaagtgcacacaagaaatgttgcaacatctcatccttagcaactttgtttggttagtactgcataactcacagcagattccaaggcacctgccttgaacattgctacatgctctaggcattatcaggaacgcagccagggtgcctgcaaagttgtctccagtttctgggtaagaggaccatcatccatattgtctgtggctttgtgtctgagttgggctactgagcctgtgacttcagaccccttgtctgcctgatggatacattctgtataatacgttaccatcacaatttcatgaatgtaactaatgaagatctagcccttccatgcctcctgctgaactatgtcacctgtgataataaaacctctacacatagcattttatacaaagcaagtcaaacagcaatgatagtggcaagtgatgtatttggcttaaagaagcttgtgttactgaagttaacgcagaagtctggcctccgtttgtgggattattaaatatatatcctacgggatcagagtcatctattagaaacagtgatagccctgggtataaataaacatttctttagagtttggcgtcagtttttcaatgtccatcctcaaatcagacagtctgtttgaggggtcagttttcagggtgcatctgcaccgagaggcttgaggcagcaatgacccctgggctgcagttcggttgcaggcgctggtggcgggcagtccaggttggagggtggagatgggccaaggtcacagatgctgcagggcttcctgtccttgctctgtgtaaccgtcatcgcggtgggtgtttgcccactgtccaaaggactcctggatgtgcacgtttctctgtgtgttggccaggcgcttcttatctcgggagaagaagctaaacctttggaagggaaagcaaacacagaaatgagagctgaccctttgctgtgcaagtcacgttttttgcaatgccggagacatatagcagcaaacttagaagggagcaaatcaattcaaggtgtgaaagacaaagttgggggtgcaggtcaaagttattccaagaaagcagcagggtattctgcgtgtcatttggacacggtaccttggaggtcacgcggtatgggcaaggcatgcatgctgatgtgatgtgtgaggtgtcttccacgttagccgctatggaggatttatcccgttaccagtggaaatcaaaagctgctgaaacaaatcttgggtttctttaattaccctaatgacgcagagaaaggaatacttgaaaaccgtgtggaatataagaggattctgttgtaaacgaatgagtatttctaatttaaat

SEQ ID NO: 1992 - DNA, 3161 bp, Homo sapiens
acgctgcctccatgcctgcctcccctctctgccacgcccccaccacgcgctttgcactctggggcccacgcacttccctgaagagtctagaagctgctcctcatttccagactttccgggcgcccaccaggctcccgggctctcaccggagaccacagggaggagcttcaaggtaccccaagtccctgcggcctccagcagtgaagagttccacaagggagtcttcctacgtcactgaataatgaatgaagatgagaggggaaaagagaagagacaaagtcaatccaaaaagctctcaaaggaaattaaactggattccatcatttcctacctatgattacttcaaccaagtgacgctacagttattagatggctttatgattacactgagcacagatggagtgatcatttgtgtggctgaaaacatctcttctcttcttggacatttaccagctgagattgtgggcaaaaaattattaagccttctgcctgatgaagagaaagatgaagtctaccaaaagattattctcaaatttcctttactaaactcagaaacacatattaaattttgctgtcatttaaaaagaggaaatgtcgaacatggtgatagttctgcttacgaaaacgtgaaatttattgtgaatgtaagagatatttgtaatgagtttcctgtggtctttagtggcttgttttccagccacctctgtgctgactttgctgcatgtgttcctcaggaggatcggctttatcttgtggggaatgtttgcattctcaggactcagctcctgcagcaactttacacttcaaaggcagtcagtgatgaagctgtacttacacaagattcagatgaggaaccttttgtgggagagctcagtagctctcaaggtcaaagaggacacactagcatgaaagccgtgtacgttgaacccgctgctgctgctgctgctgctgctatctcagacgaccaaattgatattgcagaggttgagcagtatggtccacaagaaaacgttcacatgtttgtagattctgattcaacttattgctccagtacagttttcctggatactatgcctgaatctccagccttatccttgcaagactttcgaggtgagcctgaggtgaatccattgtacagggcagacccagtggacctggagttctcggtggatcaggtggactcagtggaccaggagggcccaatggaccagcaggacccagagaacccagttgccccgttggaccaggcaggcctgatggatccagtggatccagaggactcagtggacctgggggctgctggcgcaagtgctcagccattacagccatcatcaccagttgcatatgacatcattagccaggaactggaactgatgaagaagttgaaggagcagctagaagagaggacttggttgctgcatgatgccatccaaaaccagcagaatgcattggaattgatgatggatcaccttcagaagcagccaaacacattacgccacgttgtcattcctgatctccaatcttcggaggcagtgcccaagaaacaacagaaacaacacgctgggcaagtgaagcggcctctcccacatcccaaggacgtcaagtgtttctgtggtttatctttatccaactctctcaaaaacactggggagcttcaggagccttgtgttgccttcaaccagcagcaactggtgcagcaagaacaacacctgaaggagcagcagcggcagctgcgggagcagctgcaacagctgagagagcaaaggaaggtgcagaagcagaagaagatgcaggagaagaagaagctgcaggagcagaaaatgcaggagaagaagaagctgcaggagcagaggcggcaaaagaagaagaagctacaggagcggaagaagtggcaggggcagatgctacagaaagagccagaggaggagcagcagaagcagcagttgcaagagcagccactgaagcataatgtcatcgtggggaatgagagggtgcagatatgcctgcaaaacccacgtgacgtatctgtgcccctctgcaatcaccctgttagatttttacaggcccaacccattgttcctgtccagagagcagctgaacaacagccctctggcttctatcaagatgaaaactgtgggcaacaggaagatgagagtcaaagtttttatcctgaggcgtatcaagggccccccgtgaaccagctgccattgatagatacctcaaactctgaggcaatttcttcttccagcattcctcagtttcccataacttcagactcaaccataagcaccctggagaccccacaggattacatccggctttggcaagagttgtctgattcactcggtcctgttgtccaagtgaacacttggtcttgcgatgagcagggcaccctgcacggccaacccacctaccatcaggtgcaagtttctgaggtaggagtcgagggacctcctgatccacaggctttccaaggccctgctgcataccagccagaccagatgagatctgcggagcagaccagattgatgcctgcagagcaacgtgactcaaataagccgtgctaacagtactttcatgaccagtgatgaggggaaatggggggagggggcaggccaatgaggtctgcatggccaggggaccttcaaggtgcgtaaagtcccttggggtagggtttagtgggtagagacttatttgtttcctgataggttatgtttgtaattgtttgttaagcacagcctgtttcttggaagttatgctgtagaggcagcctgtgatccgtagtatgctagggtttgacagcagccagccacagctggatctgatgtcttgtctgccccgcccagctttgcatatccatgttctaccacaggaaggtggcctgccaagagtctgctcaaagttttcaacataaagaaaaaagaaaaaaaaatgccaaagtgcttttcaatctagtaaatctagagggttgttttgtcttagccacaagaattccgaggtcttgaccctgatgatcaacctgcctcccctccatagtcttgttggagaagcccagagagaatgggactccaactaagggaacctgaaatcaactcaatggaggcacttcagagctaaaataattatggctaccttgcttaataaacattttcgttcactgc

SEQ ID NO: 1993 - DNA, 1721 bp, Homo sapiens
aaacagattcatgcagcccctgaaataccttttttgtctgaaactcaattccagccttcaggttgaggccctagaaaggaaaaccagatctgagggatccaaagcctggcaacaggcacaataatgggcgatcagctgtcttcaccacccccagcttatactcctctagagtgtatcctgaaccactgggactgctttgaccctcagactctggaggaaaatggctcatagccctctgcacaaaggtttgggcaaattatgaaggactggcttggcctcaggaagaaaccattcatttcgatatcatccagcagttggagcttttctgtaaacgtgagggcaaatgctctgaggcccatatgtgcaggctttctataccgtgcagggcaatccagaccttagctgacaatgtagaattaatccagaccggtttgccatctcgggagaggctgcaaggggcaatcccagggaaccaaaaaaacaaatcccagaggcatccccagcagaggagccagctccctccagccctgctccgccaggtccaccccatcccccctatccagcttcagtctctcacttgccccctcctagaaattctcaccctagacaagccccagtctcattctttcccctccaacagatgcctggtgaatttaccccataaggtccaggtactcttctctctacagaacttgaagcaaattgagggggatcttggcaagttttcagatgaccctgagagatatatagaggcttttcagaacttaacccaagtatttgagctctcctaggaagacgtcatgttactttgaaccaaaccctgactaacactgagaagcaggccactctgcaagtgacagagagatctggggatgaggtttgtatcatacgtagcacccaggaaagggggtgaatattatccaactggaagagaaggagtatcaatgaatgtccctaaatgggatcccaatgacaagatgggagaatgcaagaggagagtttcaggtgtgcataatagagggcttttgtaggattagaactaagcctctctactatatcaagatatccatgagagaccagggatttaatgaaaatcccactgccttcttggggaggctaagagggacctttgtaaagcataggtctctgtgtcccgattccatcatgggacaactaatcctaaatgataaatgtattactcaggcagcccctgatatcagagggaagttgcagaaatgggccctggcgtcggggagtactttaggagacctcctgaaagaggccaccttggtcttttacagtacagatagggagacacaagaaagaggcagaagctttaagggtcaccatgcaaacccacaaaccccagaattcctaaggtgcatctgttaactcctacagatgtggcaagaacagttatctctcttctaaaatttaaccacacccatgcaagtcttaatttctttcactaaggtgaaacagctcagggtacaatgttgttagtatattacacttcctatttcggtaatctttggtggcaagaacagttatctctcttctaaaatttaaccacacccatacaagtcttaatttctttcaccagggtgaaacagctcagggtacaatgttgtgagtatgttacatttcctatttctgtaatctttggcactagattatttctttgtataatacacgtttaacccatgcatacttaacacctt

SEQ ID NO: 1994 - DNA, 1706 bp, Homo sapiens
agataatgttaacaatgtgatttagagtggaagcaataccagatagtctaacaatgtgatttagaataggggctttggatcaaatggtatcagctcaacttcaggaggagctggatgctaagatccaccatgagggaagtcaccatgttacacgatggaggcccaataaaaacactggacacaaggcttgggtgaacaggccttcacgatgaccagagacagaagcccctgacttggctaaagatacttctgctctccctatccccacatcctctttcagttacgcatcacctcactccttctgaaccatatggttctgatgtcagagccagtgtagtaaagagcttctgctgttcctgagaactgttgctgctggaagtgatgcttccactgctacagctggtacctgctaagctgctcaactcctcttgctccttggagaagacactgcagtgcagctgttccttccatgggattcccacaccctctgtgcagtggtggatgggaggagtccccgtgggtgtggatggcatggatggcagcctccaagtgacttccaccatgcttggcccctgggctaacagcaccatcagcctaactgaagagccagaaatgggcatgagacttctctgtgaggggaagaaccaaaacggaacccatgctttgagcatcctactgatgtcaagaaagagttctttggctgcccaggccttcgtgaaagggctgatccagggtgctatctatgcgggaattgtaattgcgctgctcttcctctgcctcctccctctcatagtgaaacatatcagaaagaagcaggcgaagaaagctgcagcgatcagagcaaaaaagagctctaaagtcagagcaagccaagaacttgagatgtctctgaagcctgaggaaccaggaaaacccgtagtcgccacattttctgagagccggatattggaaaagcaagataaacgagccagctaagcctgtggaacatgcctcatacctggagtcgccattatccctggaattacaaagatctgcaaaatttatagcgctcacagaaaccctggaggctgtaataaacctggagccccctggactctcctcagctcacaaaaccctctcaattcctacacatcccttgacactcattctccattgaataggtggttactcttagacctagtcttagaacctctgaagacacactttgtaatttgttgtttggctaaatgagaagaaatctgtgccaccctgggaaggtgtcaaaagaaggaaaaatacatgtgacaatatgaatcaagtccatcagcaagttacttttgagcgcctactgtgtgtcagtgcctgagatacacctacaagagcgccaggctttcaagccttcatatctggatagaatcccaacttcagtgcttggtggctgtctatctttggacaagatctttcattccccatcctttgaacatcacatgacccatatctgggtggagaatgggtgaaaagtactgttcagagatgcaggtgagaaaaaacatgacgatgggccctgaatgccaagattcattggagctttggagctttatcttgtaggaccttatcctgactcccttagaatgtaagttccaagagaacagggactttgtctgccttgttttctacttttatcaccagcacccagaatgatgcctaaaatacaataagatctcaag

SEQ ID NO: 1995 - DNA, 1667 bp, Homo sapiens
gtcattagaaggttttacaagatacatggattcacgtgaatgtctactgtttaaaaatgaatgtagaaaagtttatcaagatatgactcatccattaaatgattattttatttcatcttcacataacacatatttggtatctgatcaattattgggaccaagtgacctttggggatatgtaagtgcccttgtgaaaggatgccgttgtttggagattgactgctgggatggagcacaaaatgaacctgttgtatatcatggctacacactcacaagcaaacttctgtttaaaactgttatccaagctatacacaagtatgcattcatgacatctgactacccagtggtgctctctttagaaaatcactgctccactgcccaacaagaagtaatggcagacaatttgcaggctacttttggagagtccttgctttctgatatgcttgatgattttcctgatactctaccatcaccagaggcactaaaattcaaaatattagttaaaaataagaaaataggaaccttaaaggaaacccatgaaagaaaaggttctgataagcgtggagacaatcaagacaaggaaacaggggtaaaaaagttacctggagtaatgcttttcaagaaaaagaagaccaggaagctaaaaattgctctggccttatctgatcttgtcatttatacgaaagctgagaaattcaaaagctttcaacattcaagattatatcagcaatttaatgaaaataattctattggggagacacaagcccgaaaactttcaaaattgcgagtccatgagtttatttttcacaccaggaagttcattaccagaatatatcccaaagcaacaagagcagactcttctaattttaatccccaagaattttggaatataggttgtcaaatggtggctttaaatttccagacccctggtctgcccatggatctgcaaaatgggaaatttttggataatggtggttctggatatattttgaaaccacatttcttaagagagagtaaatcatactttaacccaagtaacataaaagagggtatgccaattacacttacaataaggctcatcagtggtatccagttgcctcttactcattcatcatctaacaaaggtgattcattagtaattatagaagtttttggtgttccaaatgatcaaatgaagcagcagactcgtgtaattaaaaaaaatggtcaaggtaatatggtcattattccagcatgagccaattagtttactatttctgtgggcatagactgcaccctagattgctatgtggtaaatgtgctcttgtgaccacaggtgaaccatagaaaacatagatatagtataattagaaattcatcagtgcttctggaaatcttttagtccaagatggaatgaaacattcacatttattattcatgtcccagaattggcattgatacgttttgttgttgaaggtcaaggtttaatagcaggaaatgaatttcttgggcaatatactttgccacttctatgcatgaacaaaggttatcgtcgtattcctctgttttccagaatgggtgagagccttgagcctgcttcactgtttgtttatgtttggtacgtcagataacagctaatgataaatgacatatcattagctatgcatcgcaataaaacagccaaaatg

SEQ ID NO: 1996 - DNA, 2065 bp, Homo sapiens
attcagagtcaagtacttcattggtagggaaactctgcagctttgtcatctaactcttccagacaagaaagtggaattgaaaactacaacatgttaatggaagcaaggcacctgttgaaggaaaaagaagatccatccttatagaaatagttgaaggcaactgagaaaaggtgaagccattatgagttgccagaaagctgtacttgagttaaacatagggtcacagcttgggccaaagagtcctgagagaacagaaggtgtaactgcatttgaagactatggcacaggcctgcttgaaaaccaactcagcgtgggtgactttgtaaaaatacagaaggcctttgagtccccacagccaaggaaaatcatttgtatgtccagagaagacttcacgcagaagatgacagagattgttggttggggcacgaaggaagaatatggggagctctttgacaaagtggatgtggcccaagatggcttcattaattgggacaagctgacttcatttatactgctagagctttatgagcaagatgaacgagcaaaggcaactgtggtgccccagtggaaggaccttgaattcctcccagtaaaacacaaggacaccattcaaaaagtaattttcttaaaaaattcaagtcattatctgacaattagtaaagaaggtttattggcaatctggggagagcatttaaagctgcaagaaacattccccatcacttcagatgccaccaagctcaaacacctgtgggtgacaagtctggtttctctggaaaatgtaaacaagatagcagtggcttttacaagtaaagaggtttgtttctatgatctgctgtccaaagaagaatttgcttgccaatacaaactccaaggcctgaaaggaacaccaatttgcatggattattggtatgatcctcttgaggccaatgaatcaattctttcttttggggatataactggaaaggttcaagcaattgctttcaccgcagccttgatttccctgtttgaacggcctgctagtgcatgtgaagatggagaagccactatgaccattaactgggcagagctgctctctggatgtcacaaatgttgccatatattagagcataaacttcatcaaggagattgggtcaggcaagttacttacaatgcatctttagacgctatcatttccagtacaaccagcaatacaaatagtgtggtgatggcttggagagagaaatcaaaaaagcgtcttaatatgacatccttcaacattgcccagggcattcatgcttttgattatcactctcggctcaatttaattgcaactgctggcattaacaataaagtttgcctttggaatccctatgttgtctctaaaccagtgggtgtcctttggggccactcagccagtgtaatagccgtccaattctttgtggaaagaaaacaacttttcagcttctccaaggataaagttttgagactctgggatattcaacaccagctgtccatccagaggatagcttgttctttccccaaaagtcaggacttcagatgtctcttccactttgatgaagcccatggacgacttttcatctcgtttaataaccagctagcattgttggcaatgaaaagtgaagccagcaagagggtgaaaagccatgagaaagcagtcacttgtgttctttacaattctatcttgaagcagccttctcaatgtgaagacgacacgaatgaagacccttatgataattgacttccactcaataaatactttgaaagctgtatttgatgagaaaaacctgtttcccaaggaaattctgcatcatgaacgaaaagccaagcaattatgccaagaaaaaagttgtgaagtgaagaaaaataagaagtaattacaacagaaaaaccttcactgttacataaggtacagatataaaatgcagaaaaagcatcaagaattctgccttttattttattttatatttaaacttcaggaagttttctcttcatgggataatttagtactgcttttatctatcatctgtcaatttctctgtattcttaataaaataaatattgaact

SEQ ID NO: 1997 - DNA, 1672 bp, Homo sapiens
acttactccaacagcagtcaagagaatgaacaggagggcatgacaagaggcagaagacagaaggcaagaagaccactcagcattacagaagcccaacaaacagatattttcagttaaaataagatagaggcaacaaaaagtaataaggaatgacctgaaatatcatgagggaaaatgtacaaggcagtgacagactggatgttggcagtgaagtacagagtgaagcggagggcaattcccaggttcctgaaggtttcatgaggaaagagtggtgccattaatcaagctcttgttcagcttctggaatttctgagcagccctcgtcagtacaagatggaccccgtagtcttgagttacatggacagtctactgcggcaatcagatgtctcactattggatccgccaagctggctcaatgaccatattattgggtttgcgtttgagtactttgccaacagtcagtttcatgactgctctgatcacgtcagtttcatcagccctgaagtcacccagttcatcaagtgcactagcaacccagcagagattgccatgttccttgaaccactggacctccccaacaagagagttgtatttttagccatcaatgataactccaaccaggcagctgggggaacccactgaagtttattggtctacctccaagataaaaatagcttttttcattatgattcccatagcaggagcaactcagttcacgcaaagcaggtagcagagaaactggaggctttcttaggcagaaaaggagacaaactggcctttgtggaagagaaagcccctgcccaacaaaacagctatgactgtgggatgtacgtgatatgtaacactgaggccttgtgtcagaacttctttaggcaacagacagaatcactgctgcagctactcacccctgcatacatcacaaagaagaggggagaatggaaagatctcattgccacacttgctaaaaagtagctattgaagtatatttgcgacttttgaaggctcctctttctgcccttccccatttgttggatggctgcaatctcagtgcctgagggaagatgcctagtagaggaaagcttaatactctttttcctgaaagaatatcatcctctgcattatccccatggaacgtttcactttaaccctgactggggagcaatatgttctgtgaaaatatcttgaaattgtacaccaaaaccttacaaccaacttatttgaacatttattacacacagggtttacgtaagacttttcttattggtatataattaatttcctttggtctcccttatccacattggcttattctggaggaaaagcagtgatctgtaaaacaaatcaagaatatattaaatctagaggaatgcagagaagaaaactataaaacagaaccaaaaacttgttgcacagcctacataattaagagatcaactggctggaagcagatcaaggcctaacttcattcaagacctaaatattatgagactcagttattcggttttatgtgacgtctcttccattcaccatgcacaggcttttccagctatctatataatgtttgcaaatatttgataaagatgatgttaccctatcttcctccatctgattcctggaatgcttgaagaaaggggaaatcttgagtaacctcattaaaattaatgtctggtgg

SEQ ID NO: 1998 - DNA, 1656 bp, Homo sapiens
aggcgctgcggcaggagggaagatggcggacgaggagaagctgccgcccggctgggagaagcgcatgagccgcggctcaggccgagtgtactacttcaaccacatcactaacgccagccagtgggagcggcccagcggcaacagcagcagtggtggcaaaaacgggcagggggagcctgccagggtccgctgctcgcacctgctggtgaagcacagccggtcacggcggccctcgtcctggcggcaggagaagatcacccggaccaaggaggaggccctggagctgatcaacggctacatccagaagatcaagtcgggagaggaggactttgagtctctggcctcacagttcagcgactgcagctcagccaaggccaggggagacctgggtgccttcagcagaggtgcgcaaggaatgggcctcaccaggttgggggacccttaccaccctgaggggtagaggccaggagggtctgggcattgggctcccaggtgccacaccggccttcggggtccagcaggtggcagcacagccccttcctcaggcttcagaggctgctctgctgggcagggccagggccacacagggaggggggctgcaacactttcttcctggcatcatctctaccctggggggcatggtctcttgtgtgtctgtgcaggtgtcttagtggggtggggcggcagcatggggccagcagctgcccacctcctccgaggaggctggtgggacagatgacatggcagggctgggaaccaggcccagggagacgagttcactaccgaagtggcccctaaatgcacggcggcggccgtagccctgcctgctatccttcatgctgtcctcgggcttcccagggcctccttaatggccctgccacccccagctgggccgccgctcagcactggcaataaacatggtgacggatgagtgtggacgagtgtgaggctcagcgcaggcgggagccccatctgtcgcggctgccacccgccctgcctcatcctggcctctgccagcccagccctgacacccccaccgcccctcctggctcccaggtcagatgcagaagccatttgaagacgcctcgtttgcgctgcggacgggggagatgagcgggcccgtgttcacggattccggcatccacatcatcctccgcactgagtgagggtggggagcccaggcctggcctcggggcagggcagggcggctaggccggccagctcccccttgcccgccagccagtggccgaaccccccactccctgccaccgtcacacagtatttattgttcccacaatggctgggagggggcccttccagattgggggccctggggtccccactccctgtccatccccagttggggctgcgaccgccagattctcccttaaggaattgacttcagcaggggtgggaggctcccagacccagggcagtgtggtgggaggggtgttccaaagagaaggcctggtcagcagagccgccccgtgtccccccaggtgctggaggcagactcgagggccgaattgtttctagttaggccacgctcctctgttcagtcgcaaaggtgaacactcatgcggcccagccatgggccctctgagcaactgtgcagcaccctttcacccccaattaaacccagaaccactgctctgc

SEQ ID NO: 1999 - DNA, 1920 bp, Homo sapiens
acgtgatagcgctgggcgactccgcggagctgcacggccatggacgtgggcgccgacgagttcgaggagagcctccctctgctgcaggagctcgtccaggaggccgacttcgtggaggtgagcgcgggtgccttggccgcctgcagatctacagtgtgaggagtgctggcgatgttctgcacccgaggactgctattttttgccttcctggcaggtctggacatagagttcacgggccttcgttctaacctgtctgggccccagcagatcagtctttttgatttgccatcggagtggtatctaaagacccgtcagagtgttcagcaatttacagtctgtcagattggattgtctgtgttttccgctattgaaggagaggcaaacaagtatatagcccattcttgtaacttctatctcttccctacaacgtttgggattttggactcagaattctccttccaggcttccagtgttcagtttttgaatcagtatggcttcaactataacaagtttctcaaaaacggaatcccatatatgaatgaagaacaggagaagaaaattagacacgatatcctgactgggaactggagagttcgcagctctccggataaagaccaaatcaaggtggtgattgacgaagtgacgcggtggctggagctggccaaggaaggcgactggatgactcttcctgggatcactggcttccaggcctttgaggtccaactggtgctgaggcaggccctccccaacatctggacggtgctgaaagatgagggggtggtagtgaagaaagtgagtaaacaacatcgttggtatcttcagaacacctcttgtgaccgagagagctgttggaaggaaaatattcttctctcagcaaggggtttttctgtctttttccaaatgctggtgaaagcccagaagcccttagtgggacataatatgatgatggacctgctgcacctccatgagaagttcttcagacccctcccagaaagctacgatcaatttaagcagaatatccacagcctatttcctgttctcattgataccaagagtgtaacaaaggatatctggaaggagatgaatttcccgagggtgtcgaatctttcggaagtctatgaagtcctgaacagtgacttgaatcccaccaagaattctggaccagagattgttcacgcgagcaggtgtgagaaatatgttgagacaaagtgcccccacgaagccgcgtatgatgccttcctctgtgggtcagttcttttgaaagtggcacacttgcttctacagaagatataccacatcgaccccgtgcccgagtcatcctttcctcagtaccttgacgtgctggctccttacgtgaaccaagtgaacctcatccgagcgggggtcccaaagatcaatttttctggtccagattatcccagtatccgacctcccatcctcatcctcagcgtcaaaaggtggcctggggtcagcgagcagcaagtctaccataagtttcagaatctctgcaagtttgatgtcaggcgactcacaagaagccagttcttactcctgaccaataagtttaaggatgcgcggaacatcctgaaggagtaccgggaccacccgaccctgtgcatctccctgtaccgctactggaggcactccccaaacgtcaactgcctgctccaagtctgtggcatagtgactgcctgggcccttctcgcgttcatccttggaagatctggtacctgagtgcagcgaggcctcctgcggccaccctcgggtccccatgctctctgggaggtgtgctgggtgtgttcgtgtaaatcagattctgtttgcagatggatctgtttggtcttttctagaaattctgttatgtcctgaacgtgaaattctgtcaacactctcaatgataaatcagtccttagatatcgt

SEQ ID NO: 2000 - DNA, 2214 bp, Homo sapiens
gaatgactggctatgatggaaacagccaccatgttgtgaggacactcaattagccttgtggagagacccacatgggtgagaaactaagggctgccaccaacagcccacatccacttgccagctctgagagcaaatagatcctgcaggcctagtcaagcctcatttgactgacgcctcagtcaacatcttgactgcaagcccatgcaaaacactgagccagaaaccacccacccaagaagctgtgaattcctgactggcaaaaaatgctgagcagaaaaccaggaaatggatggactccacctccgcagccacgcctgcccgtttgcgcttactgaacagaggtcctcaggaacgtgagcccctcttcttgggcctgcgattcctcacctggaagggagaagagtggacttcctgcctagagaacaccttggtaaactctttgtggttcctgtcatgagaaggtgtgcagcttagggaaaaagcctgtgagctctggaatcagatggaactggatatgaatttccatttagtgcttgttggattaaatgtgatgctacttctcccagccgaaagaataaaactggtaagaggaagggaaatgcagcctcagtaaggaggcctccattctggaagggcttcccaggcccagagaagggagaaagtaatttggaaccaccctagtattggtgatgccaggcctcaccctaccctggggatatttgaatctcaaaaagggagcatgggaatctgacaaagcacttgcatgtataaagaactcctccaaatcaacaaggcaaaaacctcattagatacataggcaaaaacctcagaagagccacatcgcaaaggagcacctccaaatggccaagaagcatatgaaaatatgttcaatctcattagctaccagggaattcaaattagaactacaccaggatggctgaaagtgcaaagactgacaatatcaagggctggtggggatgcagaacaactggaactctcctacgcactgcggaaggggtaaattaataccgcccctttggaagaacagtttagaagcatcactaaagctgaatatattcatgcctactccggaaatcctgagcccagtggctccctttgaagaactgccttggggttcatgttgcagcatcaaacagggatggaagatgcatcttgctttagcagcaggagcctggaaagcagctgaagccctggagggtgcctggcacacagaatcttgtgctgagcccggagcacaatgggagtgggctggcggggtgggttcacagctggactgggagcagcagacatacaggccgtaggcacagacatataaagacagtcatgcagattgcaggatgcctgagagcacagactctcacatgcacaaatacgtgcatgatcgccagtgtgcatccagacagccccacatgcatgcacacgcatgcacacatgtgatgtgtacatagatggacacatgtctatgcccacaaacactgcagagacacagaagtgtctggcaaggaacactattttgtcctcaattttctgccagtgagagtctactgactccatctctgaaatgtctctacttattgtccctcttctccacctgcaccacatccctagtccctgaaactcccaccgagacccctgggcaatagcaaagtctgcacaggattcctgctccgcctctaccccacccttaagcccatcctacatgcaagagcaggagttatctgggtatcaagcaaatctgaccacatcacctccccactgcttaaaaccctttcctacaggatgaagttgaaatcacttgacatcccatataaggcccttgattgtctggcatcagccatagtctggcctcaggccctggcatggagtcccctggactcagtgctctggctgagggcctccaggatgaagataccctgtgcaaagcctcacacttttgctgttgctgggctcactgtgtgaaattccctcctccctccttccaccttccctatgctgaactgccactcctccatcctccatggccagctaagccaacacctccccacttcctcctgacaacccaggcacagccactgacctgtcccatggctgtcacagccctttcttgggctctcaatggtatcattgtcacctgtgtgctcatgagcctctgccactcaactccaagcacatcaaataaagagctcaaaacat

SEQ ID NO: 2001 - DNA, 1948 bp, Homo sapiens
aataaaggggtctgagccggtcgcccgagcctgaaaagtgctgtcacgtcagcggaaggaggcgtcccagatcttctcagctgtcttggtgccagccttcctagtcttcctacccacactcctacctgctgtcacaggccacagccatcatgcctcggggtcacaagagtaagctccgtacctgtgagaaacgccaagagaccaatggtcagccacagggtctcacgggtccccaggccactgcagagaagcaggaagagtcccactcttcctcatcctcttctcgcgcttgtctgggtgattgtcgtaggtcttctgatgcctccattcctcaggagtctcagggagtgtcacccactgggtctcctgatgcagttgtttcatattcaaaatccgatgtggctgccaacggccaagatgagaaaagtccaagcacctcccgtgatgcctccgttcctcaggagtctcagggagcttcacccactggctctcctgatgcaggtgtttcaggctcaaaatatgatgtggctgccaacggccaagatgagaaaagtccaagcacttcccatgatgtctccgttcctcaggagtctcagggagcttcacccactggctcgcctgatgcaggtgtttcaggctcaaaatatgatgtggctgccgagcgtgaagatgaggaaagtgtaagcgcctcacagaaagccatcatttttaagcgcttaagcaaagatgctgtaaagaagaaggcgtgcacgttggcgcaattcctgcagaagaagtttgagaagaaagagtccattttgaaggcagacatgctgaagtgtgtccgcagagagtacaagccctacttccctcagatcctcaacagaacctcccaacatttggtggtggcctttggcgttgaattgaaagaaatggattccagcggcgagtcctacacccttgtcagcaagctaggcctccccagtgaaggaattctgagtggtgataatgcgctgccgaagtcgggtctcctgatgtcgctcctggttgtgatcttcatgaacggcaactgtgccactgaagaggaggtctgggagttcctgggtctgttggggatatatgatgggatcctgcattcaatctatggggatgctcggaagatcattactgaagatttggtgcaagataagtacgtggtttaccggcaggtgtgcaacagtgatcctccatgctatgagttcctgtggggtccacgagcctatgctgaaaccaccaagatgagagtcctgcgtgttttggccgacagcagtaacaccagtcccggtttatacccacatctgtatgaagacgctttgatagatgaggtagagagagcattgagactgagagcttaaggcagggctggcactatttccttggccagggtaccttatggggccatatcctacagatcctcccatttctagggaggtctgaagtagaattttcactttatgttagaagagagtagtgagctttctaagtagtgcagtatagtagaggctggagggaacaagatatgtatctttcttttgttacacatgagtaacttgcagatttatgttttatctctgtcagttatcaacattgttcctgttaagtgaaggtttattttgcttcagattatacaattatcaataacatagctctcacattcatggctgtttaaccaatctgaaagttacggtttgggaattaataaaacaaagtcatacaacacattttctttgtaattgagaactagataacatggtaacagagaattgattttcatatgaatcttaactccacagtaaaatagttgacatcataatatgaagagaaagaaaaggaaaaacagaaatgtaaaagttgtttaattcttggtttgcctaattcgttttcctatttcttttcatacaaataaaggatacctggatttatttaggtt

SEQ ID NO: 2002 - DNA, 2325 bp, Homo sapiens
tacaagaccaccttaacattcttgaggagaatattcggaggctgctgccccttccacctctggaaaatctgaaaagtgaaggccagacagacaaggacaaggagcacattcaatttctctatgaacgatccatggacgccctaggaaaacttctgaagaccatgatgtgggataatgtgaatgcagaggactgtcaagaaatgtttaatcttctccaaatgtggcctgtttcacaaaaagagtgggaaagagaaagagccttccagatcactgcgaaagtgctgacaaatgatattgaggcaccagagaactttaaaattggttcactgcttggacttctggctcctcactcctgtgataccctgcccaccatccgtcaggcggctgctagctcaactattggtctgttctatataaaaggcattcacttggaagtggaaagactgcagggtttgcaggaagggctggaaagtgatgacgtgcaggttcagatcaagatttcttctaaaatagctaagattgtcagtaagttcatcccaaatgaagaaattctgatgttcctagaggaaatgctggacggtctggagagcctcaaccccacttgtacaaaggcctgtggcatatggatgatcactgtcctgaagcagcagggagctgctctggaagatcagctattggagatcttaggcacaatctaccatcacatgccagtcctcagacaaaaagaagaaagttttcagttcattctagaagccatctcccagatagccagctttcacatggatacagttgttgtcaaccttttacagaagcctctgccttttgacagggacacaaagacattgtggaaggcgctggctgaaaagccagcctccagtgggaaactcttgcaagccttaatagacaaactggagactgagttagaagatgacatcgccagggttgaggcaatttcagtggcctgtgctatgtatgaagtgatctcaatgggcacctctgtcaccggcttgtatccagagctgttcactctcctcctgaagctggttagctgcacactgggccagaagatgcccacttgtccctggagccataggcggcatgtgatgcagcagggagaacagcagcagatcccagacccctgcaggctttcaactgctactttaaaatgtttgcaagcccaagccatgagagaaggccttgcaaaggaatctgatgagggggacaacttatggactctactcagcagtcctagtacccaccacataggcgtatgttcactggccaggagcatggcagtgtggcaacacggagtcatactggacatcatggaacagctgctctcatctcttacctcctcctcggagaactaccggataaccggcgcagctttcttctctgagctcatgaaggaaccaatcctttggaagcatgggaatctgcgaaatgtgctgatcttgatggatcaaagtgcctgggactccaacgccactctgaggcagatggccatccgagggctcggcaacacagcatccggggctcctcacaaggtgaagaaacataagcagttaatgctagaatctatcatcagaggcctgtatcacctagctcgcactgaagtcgtctgtgaaagcttgaaggctctaaaaaaaatcctggagctgctgacagaccgagacgtgagcttctacttcaaggaaatagtgctgcaaacaaggaccttctttgaagatgagcaggatgatgtgagattgactgccatcttcttatttgaggacctggcacccctaacaggaagaaggtggaagattttttttgctgaagaaataaaaaagagcctgatttcattccttctgcacctttgggatcccaaccccaagattggagttgcttgccgtgatgtcttgatggtctgcattccctttttgggcctccaggagctctatggggtattagaccgtctccttgatcaggatctaccaagggccagggatttctataggcaattctgtgtgaaactggccaagaaaaaccaggaaattctgtggatcctccacacacactccttcaccttcttcaccagcacctgggaggtgatcaggagtgcagctgtcaaactcacagatgccgttgttctcaatttgaccagccaatatgtggagttactagacagagaacaactgaccacacgactccaagcacttcgtcaagatccatgtattagtgtccagagagcagctgaggctgctttgcagaccctcctgagaaggtgtaaagagacaagcattcctctgtaagccatcaagaaataaactgctggcttttcct

SEQ ID NO: 2003 - DNA, 2266 bp, Homo sapiens
gaggcagggtctggtcctggaagagccactgggacagagcccctgtgggtggggtggagggtgaaattcttggtccaagtctgtgccctaagcttggtccccacaggaggaggtcactgatggttgctgtgggacccactggacacatggggtccttcatctaggagtggggtggggagccctctgccctcaggcagttgtggaaaatgaaggagccctggagggctgcctggagggtgacaatcgtctctcctggtcaaagaggcttggggactggaaccctcctgcagcgtcccattctctctgtctggtcctctagaggccttgccttccgtttgccccgagtattcctgggggggacggttcccccaggtgttctctaggactaaggccccagcgttctcttgttctttcttggtgacccaggaaaacaaagtcccctcctgtattgacagctgggaattgtggtgtccaccgtcctcgacctgcgacggggtctccatgagcacagaggctgctctggagtcaacagatcatcttttccccaaaccaaactgcttggctggcgttgttcctgaaggggcttcactggccagaagacatccagtccctgactccacctgcctccaggtgcccagaacagcccatcgtggggacttcaccctcagcaagtggacgccgtttgtcctgccagggcaggatggagatggatgaggacccggataacctgcctgcccaggggcaaggcaatatcatcattactaagtatgagcagggacaccgagctggggcagcagtggacttggggcatgagcaggttgatgtcagaaaatacaccaataacctcgggattgtgcatgagatggagctgccccgcgtcagtgccctggaggtgaagcaaagacgcaaggaaagtaaacgtaccaacaagtggcaaaagatgcttgcagactggacaaaatataggagcaccaagaagctgtctcaaagagtatgcaaagtcattcccctggcggtgcggggccgggcgttgtcacttttgctagatattgacaaaatcaagtcccagaacccaggcaaatataaggtcatgaaggagaagggcaagaggtcctccagaatcatccactgcatccagctagatgtcagccacaccctgcagaaacacatgatgttcatacaaagattcggagtcaagcagcaggaattatgtgacatcctcgtggcctattctgcatataaccctgtgagtattcccgggcagcgatattcctggtacctgtgcccatattcacaggcatgggtgtctctcgggggtgttgcaacttcttgaaaattcagcgtttgtccaccaggacgtagtaggcaggacttcagctcgctgctggcagaaaagggttgaagcccagactcctggtctcacatggacccaatcaccacatctcagatgaagaaatgaccttcccctcctggtgttgccccaaagcctaggagcttggcagggtcccacacaggatggtccttgtaggagacaggtttgacaagttgctgaggtgcctgatgggccaggcacttgtcatgaaatgagtttgcatcctgggggagcctcttcttcactggaaacctggcaaggatccaatttcccctttgcctgatccccacaggagcatagcagatagggaggggggtcacccaggtggctcttcctgcttggcccccactttccagaccattccaggcagggagagctgctgagctgactgcatgagctgcccacatggaggacccagccaccccttatgtccggcaggcagcccttgggctgttgcaggaccgtggccagttcttggtattgctcaagtcccctgggccttcagactggcgggtgacttcaagggagcaaccatcctgggcctctcctgggacaaacacttgccttcacccactatcgatgtcttgctcagccctcagaggagcgtggttggcgtggattacttcatgccttgattctgccttcccggaaaccacggtggcagcaggcttggatgtcaccaagtcaccgtgtttcatgctatttctggaggttctcgcctttgtggcctcggaaaggaaggcgatctggtgctttggggaaagccctcgggatgctcctccagatggtcttcttcaggccttttgctcagcattggtctgatcagttctgccagctctgggccatgatctcttggcactggcgcggctttccttcaataattccataaactcc

SEQ ID NO: 2004 - DNA, 1198 bp, Homo sapiens
gagactctgatgatgaattctgaccagaaggcagtgaaattcctggcaaatttttacatcaatggaggcaaacactggacccatggtcacctgaggcagacacaaccagagcccacccagcccaaggcatctgtgctgttgttgggcccggagccggggatggcctgggatgagacacagcccccaaagatgaaggagatcccagttggcctcaggttacagacgggcaccccccaggagtccctgcccacctacacccagaccctgagggaactattgctggagcaacgccccctgatcacggctgacctggaagtccccagccccaccaggtaccaggtgccaagcccgtccgtacgagagtcctccccacacccccactacagcatcggctgcaagcaccagggccgagagggcggtggccgcagggcatggcagactttgtggttccagagcgaaagccccttcacgcagaaagctgacttcgaccaagagcaaaagtggccctcgccagcccactaccagctgctcagccggccggccttccccgccttcagcttcagaggctgccactccgcttccaagacacctgaaggccacacccacctagggctgcctggggctagggggctgggcctcagggtgcagccccagtccctgcttcaggcctctttgcaggcacctggcaagagatgccctggccccaacacctacaatatccttcctgggagccgcctgcagagcccccgctcgccggccttctcgatgagccgctcccctgcgttcacctcctggctcagcacctggctcccagccttctctttcggcagcccgaacccctggcccagccgcctaccacgtggaggactgcaactcacgcttcccttcggcgcctggcgtggtcatccagggtgtacgcagacccaagcgccacgacacaggccccttctgcacgctctagagccagctgggcacaacctgcttggcccggccaccgagtggaaccatggcctcccccggggctttcccaggcctcccctgggacttggggccccagcctggccttctgaccctctgggcaccccgatgcacccttctggctggccaacccttctatgggctgtggacaaggctggcccagcctggatcccccatctgcccatctccccgctacactgagatgctgttggttttcccg

SEQ ID NO: 2005 - DNA, 2487 bp, Homo sapiens
atcttatggaggaggatgccgctacgaggagtaccagggcaactcgcccgatgcctgcagtgaaggccgctcgtccgaggccttgccagtcgtcttgccagacgcctacagcagggaccactcgcccaaagcctatagtgggggccgcagcagttccagtaacggttacagccggagtgaccgctacggagaagaaggctgctacgaggagtacagaggccgctcgcccaacgcccacagcggaggccgctcgcccgacgcccacagcgggggccgcaacagttccagcaacagttacagccagagccaccactatggaggagaaggccgctatgaggagtaccgaggccgctcacacgaggcccgcagcgggggccgctccactgatgcccacagcaggggccggtccgacgacgcctacagtgggggccatgacagttccagctggagcgactgctgcggaggaggaggccgttatgaggagtaccaaggccgctcgctggatgccaacagtggaggctgctcgcccgaggcctacagtgggggccacgacaattccagctggagcgaccgctacggagtaggaggccactatgaggagaaccgaggccactctctggatgccaacagcggaggccgttcacccgacacccacagtgggggccacagcagttccagcaacagttacggccagagccaccgctatggaggagaaggccgctatgagtaccgaggccgctcgcatgacgcccacagtgggggctgctctgccgacgcctacagtgggggccacgacagttccagccagagcaaccgctacggaggaggaggctgctacgaggagtaccgaggccgctccctcgatgccaacagtggaggccgctcgcccaatgcctacagcgggggccacgacagttccagctggagccaccgctacggaggaggaggccgctacgaggagtaccgaggccgctcccttgatgacaacagtggaggccgctcgcctgatgcctacagtgggggccacgacagttctggccagagcaactgctacggaggaggaggccgctacgaggagtaccgaggccgcttgctcgatgccaacagtggaggccgctcgcctgatgcctacagtgggggccacgacagttccagccagagcaaccgctatggaggaggcggccgctacgaggagtaccgaggccactcgcttgatgccaacagcggaggctgctcgcctgacacctacagccggggccacgacagttccagccagagcgaccactatggaggaggaggtcgctcactcgatgccaacagcagtggccgcttgcctgacgcctacagtgggggccatgacagttccagccggagccaccgctacggaggaggaggccgctacgaggagtaccgaggccgctcgctcgatgccaacagcggaggccactcacccaatgcctacagcgggggccacaacagttccagccggaacgacccctgcagaggaggaggccgctacgaggagaaccgaggtcactctctcgatgccaacagcggaggccactcacccaacgcctacagtgggggccgtgacagttccagcaacagttacgaccggagccaccgctatggaggaggaggccactacgaagagtaccgaggccgctcgcacgacacccacagcaggggccgatcgcccgatgcccacagcggggaccactacaccgaagcctacagcaggggccgcgacagtttcagcaacagctatggccggagtgaccattacggaagaggaggctgctacgaggaataccaaggccgctcgcccaatgcctacggcgggggccgcggcctcaacagttccaacaacagtcatggccggagccaccgctacggaggaggaggccgctacgaggagtaccgaggcccctcgcctgacgcccacagtgggggccgcgacagttccatcaagagttacggcctgagcgaccgctacggaggaggaggccactacgaggagtaccagggcagcttgcctgacgcctacagcggcgaccacgacagatccagcaacagttacggccggagcgaccgctactcgaggggtcgagaccgggtaggcagaccggatcgtgggctccctctgcccatggaaacgggcagccctcccctgcatgattcttacagccggtcaggctgcagggtgcccaggggcggaggccgtcaaggaggccgcttcgagaggggggaaggccggagcagatactaagcaggaacagacttgggcccaaaaattccttttcaaagaaacaaaaagaagaacctgttctatgttaactacccaaggactagtataagtaggagttgtttttaccttttaagaatttcctgttaagatctccatttttatgcttttgtgaggaaaaacttaaaattagtttgaaattgttaatgtttctttcaacaagttcttgttaaaagtataag

SEQ ID NO: 2006 - DNA, 1872 bp, Homo sapiens
cttggagccaggcgtggccacaggaaaatgtttaggtcaatgacaggtgagcaaaagtgtgaatacaacctccaggagttttcttaaaggaagggacaggcccttcccctcctcatgtctccttctggctgcctggaaggcacatgtgagggctggagcctgagcagccaccttgggccatcaggaggaagcctgtgctgcaatggtaactcagtgacttggcgagactcacagagcctgcattcccgacacctggtgccctataccagccccgggcatattcttagtgtgggagaaaaatcagctttggtctagcttaagactctgggtggggcacggaatgggatagaatggggagtccggttcccccagctgagccaggtgaccattcctcaggaaactttgttgacagcggtgtctggatggaccagcagagggcactctcacccacggggaaaatcgtgcgcccggcctcgtccaccgccagaagacgccgctacacagtgagtcattccacaaatccctgctctcacgggatctctggagataaaggcagttgagaatcgacaaataggactgtttctccgtttatgaaatttgagctgcccttagacttcacggcagagaatatagagacagtaaaccctggggttgaagatgggaccacgaacctggggccaccttctagggacgggtgcttcgtgtggggcatcccggggagggggtgccctggagcctgagtcagtgccaggcaccttgagtctaacgctctcagtgcagttgcctcctttgaaaaataaaaggcttggacaaaataagctccaaagtctcgttccggtttgaaatttttaacaagcagaacgagttccagtgtcaccgaggaccttttggaaatgactttcagcctctgcctcagtctcggcatcagtctgctggggagggactgggggtgcttcagggagagggcagccccccagcagagggaggggaagcagcccagggacaccccttggaggggcctgaggtgggagatggcaccagcagtgccccagtgcccacggtaccccaggggcggctcagccccacctgcgtccacgtgtgtccctgggcacgggtgggacgaggcccctcgggctgggtggggcgctcccctcctgacagtctgaattgcatcctcaagtactcagacccagcgatttctccccgctggggacatggggcagcaacacaggcatcgcgctgggttttatacaagacactgactgcattctggtcgccacccgcctcacggtggaagatgatgtggatatgctttcccagaggtgcctgcggccagggcctgtggagcctccctaccctctgtccacaccaagtccactgagcagcgatcagctggcctggtccttggtcaggccagatgcaggccccttcaccatggtgggcactctctgcccaccaggcacaggagctcccagggtctctgcagtgcggaccctgacgaccatccaccccacacggccgtttctttctttcttttatttttttgagatggagtctcgctctgtcgaccaggctggagtgcaatggtgcgatctcggctcactgcaatctctgcctcccggtgagaggtgaagccagctggacttcctgggtctagtggggacttggagaacttttctgtctagctaaagatttgtaaatgcaccaatcagtgctgtgtctagctaaagtttgtaaacgtaccaatcagcactctgtaaaaatgggccaatcagcactctgtaaaatggaccaatcagcactctgtaaaatggaccagtcagcaggatgtgggcggggtcaaataaaggaataaaaagctggtagccgagc

SEQ ID NO: 2007 - DNA, 2328 bp, Homo sapiens
tctttgctcagagctcagccctacatagatcggcttctgccatggcctccaaacaaaccaaaaagaaagaggtgcatcgtatcaactcggcgcacggatcggataaatcgaaagatttctatccttttggcagtaatgtacaatctggttctactgaacaaaagaaggggaaattcccactctggccagagtggagtgaagctgacataaattcagaaaagtgggatgcaggcaaaggtgcaaaagaaaaggacaaaacaggaaaaagccctgtatttcatttttttgaggaccctgaaggaaagattgagttaccaccatccttgaaaatttattcctggaaacgtccacaagatattttatttagtcagactccagtagttgtgaaaaatgaaatcacgtttgacttattttcagcaaatgaacatttactctgcagcgagctgatgagatggattatcagtgaaatctatgcagtgtggaagatcttcaatggaggaattttgagcaattattttaaggggacttcaggggaacctcctcttctcccctggaagccctgggaacacatatactctctgtgcaaggctgtgaagggtcatatgcctttgttcaatagctatggaaagtatgttgtgaaactttactggatgggttgctggagaaagataacaattgatgactttttgccttttgatgaagataacaatctattgcttccagctacaacttatgaatttgaactgtggccaatgcttttgtctaaagctattatcaagctggcaaatattgacatccatgtagcagacaggagagagctgggggagttcacggttattcatgcgctcacaggatggttaccagaagtcatttctcttcacccgggatatatggacaaagtttgggagctcctgaaagaaatattgcctgagtttaagctgtcagatgaggccagctctgaaagcaaaacagcagtgttagattctaaattaaaagaaccagggaaagaagggaaggagggaaaagaaataaaggatggaaaggaagtaaaagacgtgaaggaattcaaacctgaaagttctttgacaacactaaaggctcctgagaaaagcgacaaagttccaaaggagaaagcagatgcaagagacattggaaagaagagaagcaaagatggagaaaaagaaaaattcaaattctcacttcatggttcaagaccctcatcagaagtgcagtactctgtgcagtccctatcagattgttcttctgcaatacagacctctcatatggtcgtatatgcgacatttacacctctttatttgtttgaaaacaagatcttttcattagagaagatggcagattctgctgagaaacttagagaatatgggctttcccacatctgtagccatcctgtgctggtgactagaagtaggtcttgtcctctggtagcaccaccaaaaccacctcctctacctccctggaaactcattcgtcaaaaaaaggaaactgttataacagatgaagctcaagagttaatagtaaagaagcctgaacggttccttgagatttcaagtccatttttgaattatagaatgactccatttacaattccaacagaaatgcattttgtgcgctccttaattaagaaaggaatacctccaggatctgatttaccttccgtcagtgaaactgatgaaactgcaacacatagccagacagacttgagtcaaataacaaaagctacatctcagggaaatactgcttcacaagttatacttggaaaaggcacagatgaacaaacagactttggattgggtgatgctcatcagagtgatggattaaacttggaaagagagatagtcagccagaccacagcaacacaggaaaagtcacaggaagaacttccaacaacaaataatagtgtttctaaagaaatatggttagattttgaagatttctgtgtatgctttcaaaatatatatattttccacaagccaagttcatattgccttaactttcaaaaatcagaatttaagttctcagaagaacgagtgtcctactatctatttgtagatagtctaaaacctattgaactactggtttgcttttctgcattggtacgctggggggagtatggagccttaacaaaagacagtcctcccatagagcctggacttctcacagctgaaacgttttcttggaaatccctgaaaccaggcagtcttgttctgaagattcacacatatgctaccaaggctacagtggttcgtctgcctgttgggtatgaagtggcttcatttttcccataataaaaattgtttgaaggcttgc

SEQ ID NO: 2008 - DNA, 1686 bp, Homo sapiens
acactcttctctcagcgggcgctccacggccctgctctgggctcgcctgagtgctgggctctgcagacgcagggatgggccaggcgagcccctcaccacggaggtagcaggtccagaggaagcagcagaggcttcctggaggaggatttgtacccctaggaggactatgtcttcctcatctttgtcttcagaggataaatacaaggcctgacacataacaagcatgagattaatttacccgaggtcaaccacggtccaaagatattaaatggaaaattccagaaataaacaatgtgtaagttttcagttgcatgctattctgagtagcaggatgaaatctcgtgctgtccggcttcgtcccacctgggatgtgaatcatccctttgtccagtggatccgcgctatagacactactctcccatcagtcactcagcagctgcttcagttcccagatcaactgtcgcaggatcgcagtgcttctgttcaagtaatccttattttacttcattatgggctccaaagcacaagaggagtgttgctggtgattccgatatgccaaaggaaagctgtaaagtacttcctttaagtagaaaggtgaaagtacttgacttaataagaaaatttaaaaaacaaaattgtatgctgtggttgctaagatctacagtaagaatgattctattcatgaaatcgtgaagaaggaaagaaatttgtgctagttttgctgttgcaactcaagctgcaaaagttacaacacctgtgtgtgatgagtgcttagtaatgatggaaaagccattaaatttgtgggtgcaagacacggacagaaacgttctgattgacggcaatcaggtttcattgggggtattggaacacatccctgaggataatgggggactactgtattctaccaacttattcctcttgaagaattccctttcggatttctgactgctgagtcctggactggttgatggcaaggccagctgccctggttgtcacctggagactgtgctgcacttttctcctgggtcgaacccctcaattcctagatcccacgtcttccccttctgggttcactaccttatttgggggaacatatacccatagctttctttttgttttattttttgtttacctatttatttatcttattttattttttgagacggagtctccctctgttgcccagtctggagtgcagtggtgtgacctcgtctcactgcagcctccaccccccaggttcaagcaattctcctgcttcagcctcccaagtagctgggactacatacaacaggatttgacacttgtaaggctccaaaacaaagaaaattaaatgatgttgtttaggttttcatacataggtgataaaagtgtgtttctttgtttttaatgagaaaattagtcacagaatttaagatcttagttacttctatagggaaggcaggggaatgggacaaggaggaagcccacagcattggtcatgctctcatgttgaagttgggttcaaaggtgttcattattaaaatgcttcataatgatgaccatacatttggtatttctaggacaatcttggtttacatctattgtctcaacataattattcagtgcaagcctttcctttctcagaaaggtcctaatgtagataataaattattttggccaacttatttcttataaaatgcaacatgc

SEQ ID NO: 2009 - DNA, 1802 bp, Homo sapiens
agctctgggagaggagcccagcactagaagtcggcggtgtttccactcggtgatcagcagtgaacatagaggactcaccatggagtttgggctgagctgggttttcctcgttgctcttttaagaggtgtccaatgtcaggtgcgggtggtggagtccggaggaggcgtggtccagcctggggggtccctgagactctcctgtaaagtgtcccaagtcagattctttgaccatggcatgcactgggtccgccaggctccaggcaaggggctggagtgggtggctgttatatggaacgatggaactcaggaatattacgcaaaatccgtgaagggccgtttcaccgcctccagagacaattataagagcatggtttacctgcaaatggactacctgagggccgacgacacggctctatattactgcgcgagagaaagcggctacggtggtacctccttcgaccactggggccagggaatcccggtcaccgtcgccgcagcttccaccaagggcccatcggtcttccccctggcgccctgctccaggagcacctctgggggcacagcggccctgggctgcctggtcaaggactacttccccgaaccggtgacggtgtcgtggaactcaggcgccctgaccagcggcgtgcacaccttcccggctgtcctacagtcctcaggactctactccctcagcagcgtggtgaccgtgccctccagcagcttgggcacccagacctacacctgcaacgtgaatcacaagcccagcaacaccaaggtggacaagagagttgagctcaaaaccccacttggtgacacaactcacacatgcccacggtgcccagagcccaaatcttgtgacacacctcccccgtgcccacggtgcccagagcccaaatcttgtgacacacctcccccatgcccacggtgcccagagcccaaatcttgtgacacacctcccccatgcccacggtgcccagcacctgaactcctgggaggaccgtcagtcttcctcttccccccaaaacccaaggatacccttatgatttcccggacccctgaggtcacgtgcgtggtggtggacgtgagccacgaagaccccgaggtccagttcaagtggtacgtggacggcgtggaggtgcataatgccaagacaaagccgcgggaggagcagttcaacagcacgttccgtgtggtcagcgtcctcaccgtcctgcaccaggactggctgaacggcaaggagtacaagtgcaaggtctccaacaaagccctcccagcccccatcgagaaaaccatctccaaaaccaaaggacagccccgagaaccacaggtgtacaccctgcccccatcccgggaggagatgaccaagaaccaggtcagcctgacctgcctggtcaaaggcttctaccccagcgacatcgccgtggagtgggagagcagcgggcagccggagaacaactacaacaccacgcctcccatgctggactccgacggctccttcttcctctacagcaagctcaccgtggacaagagcaggtggcagcaggggaacatcttctcatgctccgtgatgcatgaggctctgcacaaccgcttcacgcagaagagcctctccctgtctccgggtaaatgagtgcgacggccggcaagcccccgctccccgggctctcggggtcgcgcgaggatgcttggcacgtaccccgtgtacatacttcccgggcacccagcatggaaataaagcacccagcgctgccctgggcccctgcaaaaaaaaaaaaaaaaaaaaaaaaaaaaaaaaaaaaaag

SEQ ID NO: 2010 - DNA, 1925 bp, Homo sapiens
aaaaaccccacagctcctgagaattctctcgcctgccttcggcccttaggctctggtagattgcaaataacatgctttctttctgttcccgggtggcttcggacccctgtcggatcggaaatcccaagtaaggtacctgccctgggcagatttgagctttcttcttggacacctaatacccacagtcctccaggctgaggtagattgcaaatgacctgctttctttctgttcctgggtgccttcggacccctgtcggatagtaaatcccaagtaaggtacctgccgtcagcagatttgagctttcttcttggacacctaatacccacagtcctccaggtgggtcctaaagttcataggatccgcgatgggggtcccaagccagggagggacgaggggctggctctcagtccccgcctcgcgggggggtgcctcccccccccctgcgatgggggtcctaagagccaggggggaagaggggatggctgtcagtccctccctcgtgggtggtacctccgccttctgcgatggtggtcctaagagccagggggagacgaggggctggctctcagtccccgcttcgcgaggggtgcctcccccccccgcgatgggggtcctaagagtctggggggaaagaggggctggctctcaatccccgcctcgcgggggtgcctcccccaggtgctatgtgggtcctaagagccaggggtgaagaggggctagctctctgtcccctcgtcacgggggttgcatcacccaccctgcgatggaggttccaagagccaagggggtaagaggggctggctctcagtccctgcctcgcgggggttcctccccccctgcgatgggggtcccaagagccagggggggaagaggggctggctctcagtccccgcctcgcggagggtgcctcccccaccactgcgatgggggtcccaagagccagggggggaagagggtctggctctccaccaccacaaaatggggggcctttatgttcaggttttgcccaagagtcagcttatttgcttcttgtactagcagggcagttgctgccaaggccctcaaacagggtgccatcctttagaaaccctgtctagttgttcagagacgtaggccaccggcctcatccagggccccacagtttgggttaaaagtccacctgccatcttttctctctctgacgcatacaatggaaaaggctttgtcagatcggatagccccagggctgaagctgccagaagtttttcctttaactcatgaaagacttgctgttgttgggatcccccttccaaaggttcccagtccccgccccctttgtgacatcatacaaagtcttggcttatactgcaaagtttgggatccacagtctacaaaaccccacagctcctgagaattctcttgcctgccttcggctcttaggctatagtagattccaaataacctgctttctttctgttcccgggtggcttcggacccctgtcggatcggaaatcccaagtaaggtacctgccgtcggcagatttgagctttctccttggacacctaatacccacagtcctccaggctccagtagattgcaaatgacctgcttactttctgttcccgggctgcgttctgacacctgtcggatagtaaatcccaagtaaggtaccagccgtcggcagatttgagctttcttcttggacacctatacccacagtcctccagtgttttagacgcccagctgcacaacttgattgccttacaaatgacctgcttccaggatgcggaaattcctaatttcttctgtgacccttctcaactcccccatcttgcatgttgtgacaccttcaccaataacataatcatgtatttccctgctgtcatatttggttttcttcccatctctgggacccttttctcttactataaaattgtttcctcc

SEQ ID NO: 2011 - DNA, 2168 bp, Homo sapiens
aaaaagcaacaagaaggaagagcaatggcgacactggatcgcaaagtgcccagtccggaggcgtttctgggcaaaccctggtcctcctggatcgacgccgccaaattacactgctccgacaatgtagatttagaagaggctggaaaagagggtggaaaaagcagggaggttatgaggcttaataaagaagatatgcacttatttggccattacccagcacatgacgacttctatctcgtagtgtgcagtgcctgtaaccaggtcgtcaagccacaggttttccagtcgcactgcgagagaagacacggttcaatgtgtagaccttctccctctccagtgtctccagcctccaagtcagtgccaccttcaccagagaagatcttaaatggcaaaggaattctgccaaccaccatagacaagaaacaccaaaatggcaccaaaaacagcaacaagccttacaggagactttcagagagagaatttgacccaaataaacactgtggagtattggatcccgagacaaagaaaccttgcacaagatccctcacctgcaagacacattcgctaagccatcggagggcagtcccaggccggaaaaagcaatttgacctcctcctggcagaacacaaagcaaagtcccgggaaaaagaagttaaagataaagagcatctcccgactgtccagtgatgaaggggagatggacggagccgacgaatccgagaagctagactgtcagttctccacgcaccaccccagacctctggcgttttgctcatttgggagtcgcctcatgggacgagggtactatgtgtttgatagaagatgggatcgttttcgattcgcactaaactccatggtagaaaaacacctgaattcacagatgtggaagaagatccctcctgcggcagatagccccctgccctcgccagcagcccacatcaccacccccgttccagcatccgttttgcagcctttcagcaaccccagtgctgtgtatcttccttcagctcccatcagctcgaggctcacctcttcttacataatgacatcagccatgctctcaaacgcagctttcgtgacatcgccggacccgagcgccctcatgtcccacaccacagctttccctcatgtggccgcaaccctcagcatcatggactcaaccttcaaggccccatccgccgtgtccccgataccagccgtcatcccttccccatcccacaagccatccaaaaccaaaaccagcaaatcctcaaaagtcaaagacctgtccacccgtagcgacgagtctccaagtaacaaaaaaaggaagccacagtcttcgacttcctcctcctcctcctcctcctcctcttccttgcagacatccctctcgtctccactgtcagggcctcacaaaaagaactgtgttttgaatgccagttctgctttgaactcctatcaggcggcccctccctataacagcctgtctgtgcacaactcaaacaatggggtgagcccactcagtgccaaactggagccctcaggacggacctcgctgcccggcggccccgcggacatagtgagacaggtgggcgcggtgggaggcagcagtgactcctgtcccctctctgtgccctcccttgcgctccacgcaggggacctctctctggcctcacacaacgctgtgtcttctctgcccctctcttttgacaaatcagaaggaaaaaagcgtaagaactcgagttctagtagcaaagcctgtaaaatcactaaaatgcctggtatgaatagcgttcacaaaaagaacccgcccagccttctcgcaccggtgcccgatcccgttaacagcacctcctctcggcaggttgggaaaaatagcagcctagctttgtcacaatccagtccttcaagtatatccagcccaggacacagccgacagaagaacacaaacagaacgggcaggataaggactcttccataacaagactatgaagccacttccacatcaattccaggccacctaatcccatccgaggaggccatggggaggaggagggaggggagtgggctggggggagagtctgttttctgtgcactccctgtgactctggcctttcttcttctttttttaattgaccaatttttagttaaaaaggcaaaagaaggtgaatttgagatttacagaaaac

SEQ ID NO: 2012 - DNA, 1694 bp, Homo sapiens
agtctgtctgcagcccgactccaagttctttacaccacaccgcctccctcaggtgtctggaccatactggcttctcttgcatggaggtcactgcagtgggagaggaggcaaaccaaggagaccttctcggcttcgggcagcggtgctgttccttaggaagctccaacccttggctctaccggactgcgggcatctttcccgagcactgcacggaagaaaagaaaattggcacttatttcagggtggcccctcaggcatccaagagccagaggagcaggtgtcacgggatggcagcgagcgaggccaggccaggagaagcaaccgcagcctcctatggtcgccccttcccgacccaccccaggcgtcaggagttccgcgcccgggtcgtccgggggcccaccatgctggtgactgcctaccttgcttttgtaggcctcctggcctcctgcctggggctagaactgtcaagatgccgggctaaaccccctggaagggcctgcagcaatccctccttccttcggtttcaactggacttctatcaggtctacttcctggccctggcagctgattggcttcaggccccctacctctataaactctaccagcattactacttcctggaaggtcaaattgccatcctctatgtctgtggccttgcctctacagtcctctttggcctagtggcctcctcccttgtggattggctgggtcgcaagaattcttgtgtcctcttctccctgacttactcactatgctgcttaaccaaactctctcaagactactttgtgctgctagtggggcgagcacttggtgggctgtccacagccctgctcttctcagccttcgaggcctggtatatccatgagcacgtggaacggcatgacttccctgctgagtggatcccagctacctttgctcgagctgccttctggaaccatgtgctggctgtagtggcaggtgtggcagctgaggctgtagccagctggatagggctggggcctgtagcgccctttgtggctgccatccctctcctggctctggcaggggccttggcccttcgaaactggggggagaactatgaccggcagcgtgccttctcaaggacctgtgctggaggcctgcgctgcctcctgtcggaccgccgcgtgctgctgttgggcaccatacaagctctatttgagagtgtcatcttcatctttgtcttcctctggacacctgtgctggacccacacggggcccctctgggcattatcttctccagcttcatggcagccagcctgcttggctcttccctgtaccgtatcgccacctccatgacagtgatcgaaaaacaggcactcggaatatgttcagcatttgctctgctgtcatggtgatggctctgctggcagtggtgggactcttcaccgtggtaaggcatgatgctgagctgcgggtaccttcacctactgaggagccctatgcccctgagctgtaaccccactccaggacaagatagctgggacagactcttgaattccagctatccgggattgtacagatctctctgtgactgactttgtgactgtcctgtggtttctcctgccattgctttgtgtttgggaggacatgatgggggtgatggactggaaagaaggtgccaaaagttccctctgtgttactcccatttagaaaataaacacttttaaatgatc

SEQ ID NO: 2013 - DNA, 2389 bp, Homo sapiens
taaccaggacatgccctgaactgtgtcgtctcggggtgtgctccagagatacagaaacagatcactaactcgcgttttttattaaaaccaattaattgtgaaatgcatatcgatcgttaagagtttgtataatttagaaaagtatagtcaagacgataaaaagcacccataattctcccatccggaaatgatcagtgttaacattttttttccttgcagagccacccaagaatgcactggtattaatattgaatactctttccaatctgttttttttcgtctctctctctcagattgtgaacaactttctatgtacttttattccctgttcttttcaactcattatgacattgtgggcattcacccatattgtggaatatttttcagaaagccttaatggctgcataatattccaccagatgtgtgtattgtaatttgttaacaaatcccccattttgggacatgtaggtgattttgtaaatttttactatcaaataaggctgcagtggatattctcttaaatttatctttagctgcactttccatgatgagaatatcttagaaatgagatttccaggccaagataatgccaaatggctttacaggaaagtggcaaagtgtaccacttcaccaccagcgcacccttcttccagcatctgcggtgctcgttgagccctgtcttatgcttataggcttttccagccggcttgcctacccacccctcaaatcccacccttgcactaatgttgcaatccgcatacctgagagggttcctccttatctctgaattatgccatttctctctctccccctctcttttttttttggttttgctcagtgctgtggccttgctggtgggagagaaggtacaagaggagaccactctagtggtaagttatggggtcttccctgagtagttatggcagccctccctgcagtgctcttcagtgagggagcgtgcttcacaaaaaaaaaattccactaccatgtatttagatgcttcctcttaactgtgtttgctttctgcaggatgatccctttcagatgaagataggtggtatggtggatatgaagaaactgaaggaaaggggcaaagataagatcagtgaggaggaggacctgcacctggggacatcgttttctgcagaaaccaaccgaagggatgaggatgcagacatgatgaagtacattgagacagagctaaagaagaggaaagggatcgtggaacatgaggaacagaaagttaagccaaagaatgcagaggactgtctttatgaacttccagaaaacatccgtgtttcctcagcaaagaagaccgaggagatgctttccaaccagatgctgagtggcattcctgaggtggacctgggcatcgatgctaaaataaaaaatatcatttccacggaggatgccaaggcccgtctgctggcagagcagcagaacaagaagaaagacagcgagacctccttcgtgcctaccaacatggctgtgaattatgtgcagcacaacagattttatcatgaggagctcaacgcgcccatacggagaaacaaagaagagcccaaggcccggcccttgagagtaggtgacacggagaagccagagcctgagcgtgagtgcaacaaaggcctcggggctgcctggagtgctcagcaatgtgggaacccatggaggcaggatgcagcgggggacagggtggagcctggcattggagccggggcatatgggttccagtccatgctctggaccatgactatgtgccttcccctttctaagcctcagtttcctcattggaatcctaatagaacctacctgttaggattactctgagaattcatactctctcatattctcacgcacagtagagactcaagaagttagaaaatttcagtaaggacaaataaaagctactcataaggttagctgggtgcagtgcctcacacttgtagtctcagctgctggggaagctgggacaggaggattgcttgagactaagagttcaaggctgcagtgagctatgattggaccactgcactctagcctgcgtgacagagtgagaccacatcttttttttaaagaaaagaaaaaggtattggccatgctcggtggcccatgcctgtaatcccagcactttgggaggcagaggcaggcagatcacctaaggtcaggagttcaagacgagcctggccaacatggtgaaccccgtctctactaaaaatacaaaaattagccaggtgaggtggcaggtgcctgtaatcccagctactcaggaggctgaggcaggagaatcacttgaactcgggagttggaggttgcagtgagctgagatcatgccattacactctagcctgggcaacagggtgagactccatctcaaaaaaaagaaaag

SEQ ID NO: 2014 - DNA, 2004 bp, Homo sapiens
tttcccatccccaccttccttcctttgtccttgcattccgcagagccgcagcgagggtgatgtgtggggcaggtactgttgttgcagggcagcgatgtggctgatggcgtgtccttcatctttgtggtctcctttgcagcccctcccacctttacagaaacacccccccagtacatcgaggccaaggagggtggtagtatcaccatgacctgcacagcttttgggaaccccaagcccattgtcacctggctcaaggaggggacgctcctcggtgctagtgggaaataccaggtgagtgacggcagcctgacagtgacatcggtcagtcgggaggacagaggtgcctacacctgccgagcgtacagcattcagggggaggctgtccacacgactcacctgcttgtccaagggccccctttcatcgtctcccctcctgagaacatcaccgtcaacatctcccaggatgctctgctcacctgccgggcagaggcgtatccgggcaacctcacctacacctggtactggcaggacgagaacgtctactttcagaacgacctgaagctgagggtgcgcatcctaatcgatgggaccctgatcatcttccgggtgaagccggaggactcagggaagtacacctgtgtgcccagcaacagcctggggcgctccccctccgcctcggcgtacctgaccgtgcagtacccagcgcgtgtcctcaacatgccccctgtgatttacgtgcccgtggggatccatggctacatccgctgccctgtggacgcagaaccaccggccaccgtggtcaagtggaacaaggacggccgtcccctgcaggttgagaagaacctcggttggaccctgatggaggatggctccattcgaattgaggaggccacagaggaggctcttggcacttatacctgtgtgccttacaacactctggggaccatgggccagtctgcccctgcgaggcttgtcctgaaggaccccccctatttcacggtgctaccaggctgggagtacaggcaggaggccggccgggagctacttatcccctgtgctgccgcaggggacccctttcctgtcatcacttggagaaaggtagggaagcccagcagaagcaagcacagtgccctgcccagtgggagcctgcagttccgtgccctgagtaaggaggaccacggggagtgggaatgtgtcgccaccaacgtggtcacgagcatcactgccagcacccacctcaccgtcatcggcaccagcccccatgccccgggcagtgtccgggtccaggtctccatgacaactgccaacgtgtcctgggaaccaggctatgatggaggctacgagcagacattctcagtttggatgaagcgggcacagtttgggccccatgactggctgtccttgccagtgccgccaggacccagctggctgctggtggacaccctggagcctgagacagcgtaccagttcagcgtcctggcccagaacaagctgggaaccagcgtcttcagtgaggtggtcactgtgaacactttagcattccctattacaactccagaacccctggtgctggtcaccccaccgaggtgcctcatagccaatcggactcagcagggtgtgctcctgtcctggcttccgcctgccaaccacagctttcccatcgaccgctacatcatggagttccgtgtcgcagagcgctgggagttgctcgacgatggcatccccggcaccgaaggagagttctttgccaaggatctgtcacaggacacgtggtatgagttccgggctctggccgtcatgcaggatctgatcagcgagcccagcaacatcgccggcgtctccagcacagacatcttcccgcagccggacctgaccgaggatgggctggcgcggcctgtgctggcgggaatcgtagctaccatctgcttcttggcagctgccatcctgttcagcaccctggctgcctgctttgtcaacaagcagcgcaagcgtaagctcaagcgc

SEQ ID NO: 2015 - DNA, 2856 bp, Homo sapiens
ggaaatgtggacacgggacgccggaaacagggacacgcaccagacgctgggtgtttagaggctgccgtgagaggctcagctgtaggaacactgttgggatcactcgcatcagttgggcgatggatgatgtgaaggctactggccgcgagcttttccagcaagtgtgcaacgtggcgagcatcagagacgcgcagttctttggcctctgtgtggtcagaaacaatgagtatatatttatggatttggagcaaaagctcagcaagtacttctcaaaagattggaagaaagaaagaaatgaaggaaatgagaaacccagagcccccttcgtggccttcctccgagtgcagcactacgtggaaaacggaagggtcataagcgaccacagggcacggcacctgtactactgccacttgaaggagcgcgtgctgaggtcacagtgcgctcaccgggaggaagcctacttcctgctggctgcctgcgcgctgcaggctgacctgggcgagcaccgggagtcggcccatgccgggaggtacttcgagccacactcctacttcccacagtggatcatcaccaagagggggattgactacatcctccggcacatgcctaccctgcaccgtgagcgccagggcctgagccccaaggaggccatgctgtgcttcatccaggaggcctgccggctggaggacgtgcccgtgcacttcttcaggctgcacaaggataagaaggaaggtcgtcccaccgtgatcctgggactggccctcaggggagtgcacatctaccagggaaagaagctggagatccagctggatgggctgcccgcagcacagaagctggtttactacacggggtgcacctggcggtccaggcacctgctgcacctgctgcgcgccagccaccagctccacctccgcgtgcggcccactctgcaacagctgcggcagcgggaggaggcagaagagaagcagcactaccgggagtcctatatcagcgatgagctggagctggacctggccagcaggagcttcccgggcagtggggtcagcagccagcactgcccccactgcctctcacgccactccgccgacagccacggcagttcctacacgtcaggcatcaaggccaactcctggctcagggaatccagagagatgtctgtggacgtgcccttggaggtccacgggctccatgagaaggagccgtcctccagccccaggaccagccgcagccaccccagcacacgtggtgacagccaagccactcgtcaggagccctgcacccaggtcaggaccagaggccagagcgccgaggccgtgcaccagatccaggaaatgacagccggggtcagtgaggagcagcacagccatggcctggacgacatgcagctgcaccagctggccctgcacccagcgcccacctcactcagccataccttccaccgcgccctggactgcaggctggcaggcccctgcgagaccagggccactctccccagcaagaggtccagcaactgtctcgccctggacctgttcggagaggctccaccacaggagtttgtggtgtaggcaccacccacccagcagtaccgtccgcaccgccaggctcagcccctgcccaccccacttccacatggccctcgtcccttcctgcccgccagatgctgcctgcacttccgcagccagcacgctccacaggttcacctgtaagaggtgtggagctggctctgacatcaacctgggaggtaacaaacaggtcccgcacctcatgcctgtctgccatacacccgggagctctttccctcagggtctcagggagccagttcaaggtctggctgtcaagtgtccagagagccatggtgttggcccctgaggcagcctgtcacccatcctaatctgggagagaggtgacacagctgggcccagaccctggagagacagctctgcagtttcccacactgtcagctccccaagagacagtcctgatgggcacaggctgccagagctcccaagccggagttcacagtcatcactgtgcaggacccaggttcctcccagacctgaacccctctctgcaactcctgtttgcaagcgctgggcctgccagacagaggcccctcttgtggtgcaagcccagctctgtcacctgagatccagccagagaccctcctccaccatccacagtcaatggctgtgctttcccttccaagccagggcttccaaagaccccactgccccggagctgaagccgactctgctcccatctcagccatgaggcctcaggacccactctgctcacaggtggcttccttaagccattgccctggctggggttgggctggtgcagcccagctggcggaggggcgaagctttggtgacagacggagagtgggggactagctgtgcatggcacctgctctgatccggtgggctccacgggtagtgcgacctcggttctgtgggctctggaaggccaccagggtagggtctccccagggctcctccccctgcacaacactcctgcacacgtgcaaacctgctgtcctctgcatttagaggaatggcccgtgcatccctgctagtctcaggcccatcccagagcactgagaggccacaatcgttcagccctgtgccctgaacaccactgcccccttcactgtctgtgtgtggtgaagaccacgccacaccaccctccagctcactggagacaagcatgagcttgagccccatggcctggtgcagggctgcgtgcattgaggccgcctctttgacgggtccatccagggggaccctctcctttctgtgaaagggaatcgtgtgtgtgccccaggcacgtgtaataaagaacccgagcagatgc

SEQ ID NO: 2016 - DNA, 2048 bp, Homo sapiens
actggccgctcggccgcgcgcgggtcggccggctctatggggaaagcggcggctccgagccgaggcggcggctgtggcggccgctcccgcgggctctcgtcgctgttcacggttgtcccctgcctgtcgtgccacacggcggcgccgggcatgagcgcttccacgtccggctccgggccggagcccaagccccagccccagcccgtgcccgaaccggagcggggaccgctgtcagaacaggtgtcggaggcagtttcggaggcagtgccaagatcggaacctgtgtccgagacgacgtctgagccggagccaggggctgggcagccatcggaactgctgcaggggtcgcggccggggtcagagtcaagctcaggtgtaggggctgggccctccactaaggccgcatcggagccgctctcccgggcggtggggagcgcgacctttctcagacccgagtcaggatcgctgccagcgttaaagcccctgcctcttctgcgaccaggacaggcgaagactcctcttggggttccaatgtcggggactggcacgacctccagtgccccactggccttactgcctctggacagcttcgagggctggcttctcaagtggaccaactatctgaagggctaccagcgccgctggttcgtgctgggcaatggtttgctctcttactacagaaatcagggtgaaatggcccacacgtgccgtggaaccatcaacctgtccaccgcgcacattgacacggaggactcttgtggtatcttgctgaccagtggggccaggagctaccacctcaaggccagctcagaggtggaccggcagcagtggatcaccgccctggagctggccaaggccaaggctgtccgcgtgatgaacactcattcagatgactctggggacgacgacgaggctaccaccccagccgacaagagcgagctgcaccacaccctgaagaatctttccctgaagttagatgacctcagcacgtgcaatgacctcatcgccaagcacggcgccgcactccagcgctccctgacagagctggacggcctcaagatcccatctgagagtggggagaagctgaaggtggtgaatgagcgggccaccctcttccgcatcacatccaatgctatgatcaacaagccactgccggaggcttcccaggcactgcctccctacccgagaccaaaactgctttgtcttgaataagcagttttggcttttccgagataatgagcgtctcagctggctgccgtcttgcacagtcttttatcagacatcagaggctcatctgtgtttacgaagccatcagagcagctccaagtttaagtgcctaatgaattgttttatgagaagcacaaccccctggggttggtcacgattcctttctgcagctccagcctcctgggaagccagggacttggatatggaagccacgcaccgcagtccccagaaggtagaaatcatcacccccaatctcttccgatctcacagtgagagggagctgcttctcccactgtgggggccccactgcaactccatcccactccccagccccatcctgactgtgatgtgtgcggggatgctcctagcatcccctagcgcccgtgcctgcattagggaaatctctactgccactggctcctcggacagggcagaccctcttcctcgtgaaatgctgtgtgttttccactttgtgggctctgattgagccggatcgtagaagtggagcctaaaatgagggatggctggccagacaaagcccacatggagggtgtccttcacagcgcgctggggcaggcagctctcttcctacagggacaggctggctgctccatcttcacttttccccaagaccacaaagaatctggggttgttccggcttcaggagaaaagtcagggtggttgggtgtggtggctcacacctgtaatcccaacactctgggaggctgaggtgggtggatcacttgaggccaggagttcaagaccagcatggccaacatggtgaaaccctgtctctactaaaaatacaaaaattagctggg

SEQ ID NO: 2017 - DNA, 1682 bp, Homo sapiens
gaaacggaggggcggggggcgcgggggcagaggtgacctggggctctggacttagacccaagggctagacaccccgggtctgactggtgggagagaagacgtaatgtgaagggggttggcaaccaagacgcgggaccccacttgcagtaccccccgtctgcggccggcgtcgcccacccgcagccgccggccgggcaatggcaccacctagcggacggcaccagtgcggggaccccagcctcgaggaggcgctcgtgccgggcggaggtggcgcttcagcaccgtcgtgggccggacagcgcctcccgcccccggccctcgaaacctggcttcggagcccagccgtagggaccggacggaagacaccgaaggaatggcgaacctccccggaccgctcctgacagttcccgggtggccttcggcctgcaaagtcggaatttgcacaccctccgctcgtccttccctgagcccttctgccctccttgcccagcccgggcggtggggactaagcagcgcgaggctgcagaggggcggtcacaagtgtgaccattcgcactgcactccagacgccggctcctcaggctttactggagagaagccccgaggagggctaggggcaaaagaggggccttctgcatctccagcaacctgcgggctgagctcccggacccggcgtcgggcgcccgggagctctccgccgcccgctcgcggtcgcagaagctgccccagcgctcgcatggccccaaggactttctgcccgacggctcggcagctcaggccgagcggctgcgccggtgccgggaagagctctggcagctgctggcagagcagcgcgtggagcgcctgggcagcttggtggctgccgagtggaggccagaagagggcttcgtggagttgaagtctcccgcgggcaaattctggcagaccatgggcttctcagagcagggccggcagcgccttcacccggaagaggccttgtatcttctggagtgtggctccatccacctcttccaccaagacctgccactgtctatccaggaagcttaccagctgctgctgaccgaccacactgtgaccttcctgcagtaccaggtcttcagccacctgaagaggttgggttatgtggttcgacgattccaaccaagctctgtcctgtccccgtatgagaggcagcttaacctggatgccagcgtgcagcacttggaggatggagatggcaagagaaagaggagcagctccagccctcggtccattaataagaaggccaaggccctggacaactccctgcaacccaagagtctggcagcctccagcccagcttcagggacttcacgttgccccaggatgtggggcactgacctcacagctctgcagaggatggagcttgctccgggggaccgggactgtctgttctcagggaccatctcggctgcctcctgtacccagactctaacctgtagcttcagaggccagtctgggccttggccctgggtgtctgatactcacagagtgaaactgtgaccctctcccttccctgctgccttgcagtgacccctctggaactcaggactcgattttaaggacccaggaggtggggcagaagagaggactgtgtgcctttaacgagagggtgcctgcttcgtgctataaagccaaagccattaaaaatagatttcttttct

SEQ ID NO: 2018 - DNA, 1714 bp, Homo sapiens
cagacccacgggggctcacgagctcccagcaatgaaccctcaacagacccacgggggctcacgagctcccagcaacgcaccctcaacagactcatcgggggctcacgagctcccagcaacgcaccctcagcagacccacgggggctcacgagctcccagcaatgaaccctcaacagacccacgggggctcacgagctcccagctatgcaccctcaacagacccacgggggctcacgagctcccagcaatgcaccctcaacagactcactggggggtcacgagctcccagcaatgaaccctcaacagacccacgggggctcacgagctcccagcaatgcaccctcaacagactcactggggggtcacgagctcccagcaatgcaccctcaacagactcactggggggtcacgagctcccagcaatgcaccctcaacagactcatcgggaggtcacgagctcccagcaatgcaccctcaacagacccacgggggctcacgagctcccagcaatgaaccctcaacagacccacgggggctcacgagctcccagctatgcaccctcaacagacccacgggggctcacgagctcccagcaatgcaccctcaacagactcattgggggctcacgagctcccggtccgaggcctcctttggcagcagggactcaggagggagaagagtgagcccttggccacatggttggtcaaatcaactcctagaggttatgacccttctctgctgtggccttcaccaaaccacgcatgttgggtggaggggaagtggcctctgtggctgccccagctggcagagtgtggtctgtcctgctctaaactgggtccccagaaggcactgctctccagatgggctggtgagactccttggtgtccagctgcttatgaccagcacagttaggggctgtcgtcagcaccgccactggtacctgcagagccgagtccactcctggggccggctggatcagggtgcagccagggtgtggggcaccagggagctctccgggacccccaaagccagatgcggccctgtccactcgtgctctgtggacggagaaggcagagtcccaggacactgtgctcaggaaagcgagctccagaggaggctgaggagatttgggagtgcccaggacagcctggccctgtgcaggtccatgggaaaaccttccactctcccctttcagggaggtctgggggcttggctgcctctcagcgggccagggcgacttctcatcatttccgcaatggatgcagctctggcctgggggggtggggaggagcctccagccctggcccctccgccccagccctcgctagcggcatgactgtgggtgaacggcggcacctgaaagcctcagtttccctgtctgtgaagggatgcacagtgtcagtttgacccccggaggctgcagtgaggacggggcccaggaggtcaggagagcagcccgtttctggccagggcaccgtggtgtttgtggaacacagccccactgacttcagctgctggggcagaaagagccgtgagaagagtcgatcccccaggggcttcatgtgtctttttgctgcattttactcacacacgaccctcctagtccatgtaagagaagataagtttatggaacaaacccagtatttacttaacttttaaaatataagcttcacagaccagcgttacataaaaaaaaaaaaaaaaaaaaaaaaag

SEQ ID NO: 2019 - DNA, 2474 bp, Homo sapiens
aacagcaggaggaggaggaggcctgcttggaggaagaggaagaggaggaggacagtgacgaggaagaccagaggtcaggcaaggactcggaggcctgggttcccgactcggaggagaggctgatcctgcgagaggagttcaccagccgcatgcaccagcgcttcctagatggcaaggacggggactttgactacagcacagtagacgacaaccccgacttcgacaacctcgacatcgtggcacgggatgaggaggagaggtactttgatgaggaagaacctgaggatgcgcccagcccagagctggatggggactgatggccgccacccttcccaccgcctgccccatccccatccccaacaaggcagctgattccaggcctgctcagtgaccctttctctagggggacatcagggcagtgccccacaacccacacacaccaccatctcactgggtctagtctcatctcagacaacccccacccccactgtttctggggttccctttctcatctctcccaccctgtctcctgcctctgtctttcttggtgtctgtctgggcttctttctgtctctttctgtctttctgtctctctccctacccccgctccctctttccagtgctctggctggctgtctctccctttctccccctctctctctgccttaggctctgtctccaccgcagggcccaaggtgaaagtcctccccttgccggaggccagctggcagggcctttcgtggctggaagtggccagtttggttccggtgctgacccctaggccccagcgcagctgcctcccgtgctgtctgtctccccctctctgtttatgtctgcgctgtgtctcacactcagagcctccttgcttctgttaggttcccatctctccttctgcctcactctgggcctcttctttctacttgtacatttccacctctctaggcctctgctctcactgtccctctctgtctgtctctcagcctttatctctgggttttgatccccgactccaggctctgggccccttcttcccccttccctcaaacctggctgctataggcagcagaaccctgaccactgagtaatacagccccaggggagggaggagaccccaggcagggaggatgggggcagctctcttctctccccaggacccaggctgtggatcacggggcctgccagcttgagtgtagagggaggggggactctacccttctcagccccaccagcccccctctgcccaaccacaattttcccttcctccgccttcctctcccactcctgtttacactccccaaatgcacacaggctgttatcatgggtcctgagtcatcccacacacagcctgccccagcgtccctgcccccagctggccgcagggcccgccccatggagccccctgccgccctgggctaatgggagccagatggccgcctggtgactcagccaccgggcctgtgggaacccaggcgtcccgccttcccatgcccccacacccggctcctgctcccccagcagacacacacaggagggcctggccactgttgagggggcacacagggcaagggtcaccaagtcggggcctagggactcctcatgcctctgagatggaatggtggtatcctgccgtggccaagcctgaaggaccctcaaaactgcctcctggagtccacggttcttgacctccgagcctcagctatgccctctgggtcaaccagaattagagccagacagggaaagtgagagctggatggaggcagacaagatgctcagagcgactattaaagaacgaaagcctctgctacggagcgcttctgtcctctgtcaggcccgagcgaagtgcctgacaccgggttggatcctcagatggccccatgaactagtgaagtgggtcaaaggaggcctggaaagatgttgcttcctcaaggccactcggccatcagaggcagaaatgaaacaggaacccaggcctagaatcacaaaggtcctagaaaccacttggctgtctggcctctcaggtgtcagggccatccagagtgagacagcattggagggacaagtgtgcatgcagatgtcctcagacgggaaggtttgagaagggtcagatggtaggcgggcctaacaagggctccgtgctagccactgtcccgcacacagacaggatcaggtcatcttgatatggagatcagtccccaaatcactgaattgtcccagcagtgctatgccctaggtactaccaatatcactcctctatttcccagaggaggaagcagcagctagactccaggaccttggggtcatacctctcagaaagccaagagtgcaggatgagagctgtctgtctcttacctgcctgtatttgtgccccatttttaaagagcagagggcctgggccacaggaaaggtatcagcccttggtgataggcacattttttaccagtctatcatttggtcattaaatttgtttacaatat

SEQ ID NO: 2020 - DNA, 1531 bp, Homo sapiens
aaagtgggcaccggatagcgccagccccgcccagagagcgaaatcatggagccttccaagaccttcatgagaaacctgccaatcacaccaggctatagcggctttgtgccattcctcagctgccaaggaatgtccaaggaggatgacatgaaccactgtgtgaaaaccttccaggagaaaacacagcgctataaagaacagctgcgggaattgtgctgcgcagtggccactgccccgaaactgaaacctgtcaactccgaggagacggtcctgcaggccctgcaccagtacaatctgcagtaccaccccctgatcctgggtagcagcgccctgaaaccatttcccctcacccctggtcacccctgcagattctcataggccagctgagctgccccatagcacccagaatcccgcaccgttccaaatcccaggggtcagcaccaaatgcaaaggctccatttcttaaaatgagaaagacacatttctttttctttctttctttttcttttttttttttttttttgagacggagtctcactctgttgcctaggctggagtgcagtggtgtgatctcggctcactgcaacctctgcctcctgggttcaagcgattctcctgcctcagcctcagcctcagccaagtagctgagactacaggtgcatgccaccatgcctggctaatttttgtatttttagtagagacggggtttcaccatgttgccgagggtggtctcaaattcctgacctcaggtgatctgcctgcctcagcctcccaaagtgctgggattacaggcatgagccacagaggctggccagaaagaaacatttctaggggagggggcacagtcctggttagggaagagggtgctggtctgagaactaggagaccctaggcaagtcacaagttttcaggcctcagcttctgggtcagtggaaaacattttttagttgctttctctgtgccatggtgtctttttacagaatgcaaatatgtaaagaaacctctccaggagcccccgatccctggctgggcaggctacctgccgagagccaaggtcactgaatttggctgtggcacgagatacactgtcatggccaaaaactgctacaaggacttcctggagatcacggagagggccaagaaggcacatctgaaaccatatgaagaaatatatggagttagctccacaaaaacttctgctccgtctccaaaagttttgcagcatgaagagctgctgccaaaatatcccgatttttctattccagatggaagctgccctgcccttggaaggcccctgagagaggaccccaaaactccgctgacatgtggctgtgctcagaggccaagtataccatgcagtgggaagatgtatctagagccactgtcctccgcaaagtatgcagaaggctagaagcgcagagtctcccaaggaggtgaactttaagtggggcttccaaaacctgccattctcatgttggaatcacgcccagtgagcaataaagaaatttagtaacaagaattttttaactgc

SEQ ID NO: 2021 - DNA, 2156 bp, Homo sapiens
tgacgttcatgccatccagggttgaggcctctcttctgcccacctgtggtcccaggcctagttaaacaccaaagctgtctctcacactggtggttccaggataaagcctcggcctggggcctggtctgcacgttaggcgccggccgcagctcgcaggaggacccgagccagcccgccccttcccgcacagcctgctgggagttgtagttcagtcgtcggagaaccacgccaagccccgccccagatgagtgcgcagtatgaggaccgctggccgggacccagtgagcgcgggactacaattcccaaaggacggtagcactcagcgccccgccaacagggcccggttcgttcccgcccgcacccgtccctctcctctgcacccctgctgcttctgctttgaaggcggaggctccatgttgtcccctcagcgagtggcagcagctgcctcaagaggagcagatgatgccatggagagcagcatcctcttgcaggaccacatccgagatcttgatgtggtggtggtttcagtggctggtgccttccgaaagggcaagtccttcattctggattttatgctacgatacttatattctcagaaggaaagtggccattcaaattggttgggtgacccagaagaaccgttaacaggattttcctggagagggggatctgatccagaaaccactgggattcaaatctggagtgaagttttcactgtggagaagccaggtgggaagaaggttgcagttgttctgatggatacccagggggcatttgacagccagtcaactgtgaaagactgtgctaccatctttgctctaagcactatgactagttctgttcagatttatagtttatctcagaacattcaagaagatgatcttcaacagctgcagctcttcacagaatacggtcgtctggcaatggatgaaattttccaaaagcctttccagacactgatgtttttggttagagattggagtttcccttatgaatatagctatggactccaaggaggaatggcatttttggataagcgtttacaggtgaaggaacatcaacatgaagaaattcagaatgttcgaaatcacattcactcatgtttctccgatgtcacctgctttctcttaccacatccaggactccaggtggccacaagccctgactttgatgggaaattaaaagatattgctggtgaattcaaagagcagttacaggcactgataccgtatgtattaaacccatctaagttaatggaaaaggagatcaatggctcaaaggtcacctgtcggggactactggagtattttaaggcatatattaaaatttatcaaggagaagatctgcctcaccccaagtccatgcttcaggccactgctgaagccaacaacttagcagctgcagcctctgccaaggacatttattataacaacatggaagaggtttgtgggggagagaaaccttatttgtctccagacattctagaggagaagcactgtgaattcaaacaacttgctctggaccattttaagaagaccaagaagatgggtgggaaggatttcagctttcgttaccagcaggagctggaggaggaaatcaaggaattatatgagaacttctgcaagcacaatggtagcaagaacgtcttcagcaccttccgaacccctgcagtgctgttcacgggcattgtagctttgtacatagcctcaggcctcactggcttcataggtcttgaggttgtagcccagttgttcaactgtatggttggactactgttaatagcactcctcacctggggctacatcaggtattctggtcaatatcgtgagctgggcggagctattgattttggtgccgcatatgtgttggagcaggcttcttctcatatcggtaattccactcaggccactgtgagggatgcagttgttggaagaccatccatggataaaaaagctcaatagcatcttaacgtgaagatcaaacaagaacacaacaagcccctactgatttctgggtttctgccacggccacaggttcatatccagaggaatggcagatctgagacgatccaggaagagctaaaacatggccctgtaataaatgagcagacctctcctgtggtttcaaattattaaacacacttccatttctcttgg

SEQ ID NO: 2022 - DNA, 2210 bp, Homo sapiens
agcagcagcacggccaccggcgggagcggcagcagcaccggcagccccggcggcgcggcctcggccccggccccggccccggccggcatgtatcgctccggggagcgcctgctgggcagccacgcgctgcccgcggagcagcgggacttcctgcccctagagacgaccaacaacaacaacaaccaccaccagcccggggcctgggcccgccgggcgggctcctcggcgtcctcgcctccctcggcgtcctcgtccccgcacccttcggccgccgtccccgccgccgatccagccgattcggcctcgggcagcagcaacaagaggaagcgcgacaacaaggccagcggagggcgggccgcggggggcggccgagcagacggcggcggggtcgtgtacagcgggaccccgtggaaacggaggaactacaaccagggagtcgtgggtctgcatgaagaaatcagtgatttttatgaatacatgtctccaagacctgaggaggagaagatgcggatggaggtggtgaacaggatcgagagtgtaattaaggagctctggcccagcgctgacgtccagatatttggaagttttaaaactggactttatttacctactagtgacatcgacctagtggtgtttgggaagtgggagaacctacccctctggactctggaagaagctcttcggaaacacaaagtcgcagataagggttcggtgaaagttttagacaaagcaactgtacctattattaaattaacagattcttttactgaagtgaaagttgatatcagctttaatgtacagaatggcgtgagagcagctgacctcatcaaagattttaccaagaaatatcctgtattgccatacttggttttagtattgaaacaattcctattgcagagggaccttaatgaagtatttacaggtggaattggttcttatagtctctttttaatggcagtcagtttccttcagttacatcccagggaagatgcttgcatccccaatacaaactatggtgttctcttaatagaattttttgaattatatggacgacacttcaattatttaaagactggcatccggataaaggatggtggttcatatgtggccaaagatgaagtacagaaaaatatgctagatggctacaggccatcaatgctttatatcgaagatcctttacaaccaggtattgaaattaggtaacgatgttggaaggagttcatatggggccatgcaagtgaagcaggcctttgattatgcctacgttgttttgagtcatgctgtatcaccaatagcaaagtactatcccaacaatgaaacagaaagcatactaggtagaataattagagtaacagatgaagttgccacatatagagattggatatcaaagcagtggggcttgaagaatagacctgagccttcatgcaatggaaatggtgttaccttgatagtagatactcagcagttagataaatgtaataataatctatctgaagaaaatgaagcccttggaaaatgtagaagtaaaacctcggaatctcttagtaaacactcttcaaactcttcatcaggtccagtgtcgtcctcttctgccacacagtccagctctagtgatgtagattccgatgcaacaccatgcaaaaccccgaaacagctgctttgccgtccgtccactgggaaccgagtagggtcgcaagatgtatccttggagtcctctcaggcagttgggaaaatgcaaagcacccaaaccactaacacatccaacagcaccaacaaatctcagcatggatcagcaaggctctttcgttcttccagcaaaggcttccaagcattgtcttcagtgttaagaaatgtggactcctgtgaggtgctggaggtttgaatcatcttgaaaactttccaatcttgtctagttaccactgcagagacactaaggaatttaccagaaaaagatatttgatacaagtgatttaagaaatctcaacatttcctgaggccgtatcactgggcaaccagtgatgaaaactatgaatgaattgcacacctggaagattttttaagctaatgacagtttcttcaaagatgtcaattatttgccttggaaattttataaattgcatttctatgcacatcggcctctagtgcttaccactcggtttattattcataatctgcaattcaataaaggctttgtgttttcatttatcttc

SEQ ID NO: 2023 - DNA, 2255 bp, Homo sapiens
aaaagcctgggccgggacaaagcctgggccgggcctgcgcttccgttcgcttgactggctgcgcttgttttcagggttttggtctgaaaacggatcttacctgcgcagagcaaaatcggttgtagattatatccacgaaaattccttctattaaaatgaatttcaagtcccacctaccctggaagcagaaagagagagaagagagagagtaaagagaaagagaaaagaaagagaagttgaaaaagagaaagaaaaccaagaaagaaagagaaaaaaaccgaaaataaatggacaagaaagaaaaagatgtagtctggttttgttgcccaggctggtctccagcttctagcctcaagcagtcttcccatctgctcctaccaaagtgctcggattataggcatgaatcaccttgcatgggagataaggacccccacatcaagccctcaggtcactgggatcctggactacggcactgctccaggcaggcctggttatcctgcttgaggcagcaatcctcttgagcctagtgaaatgcaactggctgtacctcaatgatgttgccctgagattctgccagtcgaggtattacttcaatctcctgagaccagcctctacctccagatccagggaggccaacgtgccatgcatccctggagcatgaaacccccgatcaaggaggaaaaaggcaggagaaagtcaggagaggggcagggtctgcaggatcccaggaccaggaagagttcacggcctccctgggactggggctgcgtcgctgcgctccaggagctgacgagggagcggagtggatgggaagctcccagggcgggaatcaaccttgcggtgaggactttaaaaaaggtgcgggccagtgcaggggacactgaaggatttgaggcaggaaaactccgcgataagagctgtctatatggccctgtggcagaagcacgggggacacgaccccatggaactgtgtccattaaacctctttgtcttcataaattacccagtctcgggtatttctttattagcagcgtgagaacagactaatacagtaaattggtaatggtatagagtggggtgctgctataaggatacctcaaaatgtggaagcaaattttgaactgggtaacaggcaaaggctggaacagtttggagggctcaaaagaagacaggaagacgtgggaaagtttggagcttcctagaaaatggttgttgaatggttctgaccaaaaagtccaggctgaaggtggtctcagatggagatgaggaactttattggaactggagcagaggtgagctgcaggggcggagccctcatggagaacctctgctagagcagtgcagaagtaaaatgtggggttggagcccccacacagactactcactactcgcctagtgcagccgtgagaaaagggccaccctcctatagaccccagaatggtagattcaccgacagcttgcaccatgtgcctggaaaagtagcagacacaacaccagcctgtgaaagcagccaggagaggagctgtaccctgcaaagtcacaggggcagacatgggttccctgcaagaccactggaaccaacctcttgcataagtgtgacctggatgtgagacacggagtcaaaagagatcattttggagctttaagatttgactgccctgctggatttcagactggcatggggcctgtgacctgttttggccaatttctcccatttgcaacgggcgttatttatccaatacctgtgcctccattgtacctaggaaataactaacttgctttttattttacaggctcataaacagaagagacttgcttgtctcagatgaaactttggactgtggacttttgagttaatgctgaaataagactttgggggactgttggggaggcatgattggttttgaaatgtgaggacatgagatttgggagggaccaggggcaaaatgatatggtttggctgtgtccccaccaaatctcatcttgaattgcagctcccatgatccccacatgtgggagggacccggggggaggtaactgaatcatgggggtgggattttcccatgctgttctcatgatagtgaataaatctcatgagatcttatggttttataaagggcagtttccctgcacgggctctctcttgcccgccaccacgtaagacatgtgtttgctcctccttcaccttctgccatgattgtgaggtctctctagccgtgtgaaactgtgagtccattaaacttctttttctttat

SEQ ID NO: 2024 - DNA, 2188 bp, Homo sapiens
agttgctgtggcaaatgtttaacaaaaactcgttcatgaagcccgaatttgccaaagagatggaagagggtgagacaggtattcctcacagagtccttactgagaccatcagaaggcagtgttcctctgtctacctttctcccacataaattatgtgccagcgcctgctggaccccaaaggtgaaaaacaggataacactgatgtcccaaagtagcactggaaaaaagacagaatttatcacctttgatctaacaaccaagaagactggaggccaaacagtcatccaagcatatgagatcgcaagtttccaggtggcagctcatctgaagtgccctatctggatgggagccagtgatggatatatgattgtctttaccagtggaccatacttgttactcttcagcatcactggcttcctgctgcaacgatttgaggaccatcaggcagccatcaacaacttctgggtggtatgtatgattctcctccactgctttttgatctgactttgactccttggccactcactctggctatccttggaaggatccttgctatgtgctcaccacatccgagaactctgtgcacgtgtacatgtgggaagaaggaggccgccatccatacctcaggagctgctgtcacctggaaaacacgtggcatgatcacacaacagacagctgcatctccagtgtgatgtgtgataatgcaagcatagtacttagggtgaggaaaaaacatggtggaaatgcatagcacctcagcattgttcaaaactgcaaacacaaagcaaaactaaaaaaatccatggttagatggctggaatagaatagaaacttccaaaattggagaatgaagaaaatccagaaaattcaacaaatgctgaagttaatgtcttatttcatagaattccaaaggctacatgatgaaatacaggcctccaccaaattggtggtgagatcagaaatctacaagatccgggaccctcagaaaagtaatactccttgtaggtaaactgagggaaaatctattcgttagagaaggatgaacagctacctccctcagcttcagagatgggtgaaatcaagacagagaaacaattatcttcagagaattcctaaccataaccaaagtcacatttggggtttatatcagtcaaggtcccaggatgataaagatgacacatacaaattaagggtctcgctctgtcacccaagctggagtgcagtggtgcaaacacatctcattgtagcttcaacctcctgagctcaagcaatcctcctgcctcagcctcccaaagtgctgggattacaggcgtgtgccaccaccctgccctcaataatttctttttcttcgagacagggtctcactctgtcacccaagctggagtgcagtggtgcaatcttgactcactgcagcctcaacctcccaggctcatgtgatcctcccacctcagcctcctgagtaactgggattacagagcccaggactggtaacagctgtgcttcaccatcccttattggcttcccagagcctgcagctctgtgccagcttgggatccaaccccatgacacagagtggctcctgccacatgccagaatgtccctgcccttctctccagaggcccagtcagtgagaggaggaggaactagaatccaggtctcctgcctcccagagcaaggctcctgtcactccactccctggggcttcttgggcctgagatcttgagagacagggtctcactgtcacccagtctggagtggagtggcataatctttcactgcagcctcaaactcctggagtccagcaatcctcccacctcaacctcttaaatagctgagactacagatgtgtgctaccatgcccagctaatttttaaacagttttcgtaaagatggggtctggctatcttgcccaggcttgcaatttatagagctccagacaccctcattggtagctgcttctgataaattccacactatggccagaagatggcagcaaaccaccagcttcagccacttacctgtggcccaggacaccggaccaggtttccaaaatctgagcttcacattcctagacctccagaggttctcttcatggccacctggacaactggcaaaccattctgtttccttacacgtgcacatatcatccagataactgaaactcttatcaataaaaccccaacatcac

SEQ ID NO: 2025 - DNA, 3365 bp, Homo sapiens
aaggctaagggaaatggaatggctgctggaggacctgcttggggctaagggggatatggggcttctctggggccaactgacccatgccctagcctgcagacactgcggcagcagctgcttccagagtccaggaaatctggtgacactattcttattcgtggtttggcagattcagagatggtggcagcttgggaggttgcgacagcttcatccctggtgctctgggaatatggtgcaaggcaaggaactaccacttctgcaccgtgtggccttccttgatcacctgtgtaagcagaaatcagaagtggaggaggaaggggaagaagaggaagagggggaagacgaggcatctctggatccactgaagccatgttctcctaccaaagaagctcccactggagagcaagccactccagccccaccccagccatcctgtggttctgagggcctcctcaaggctatagggataccagagcaaacagtcatgcagcccgtgagcccttccagatccttccccatcttccagattctgaccagctttcctgtgaggcacaagatagcatcagggaaccgccagcagcagagaaaaagccagctcttctggggtctcccctctctgcacagcgagtccttggaggccatcttcctgagctcaggtggcccctctcctctgaagttgtctgtttgttcttctgtcttcttcaacaagcttgccttcctacctaggtccaacctgttgcttccccagtatcactcctcagcccagttttctacccatggggcccatactatggaagatctagaagggatggcccccgatcctcagctgcttccacctccatcttctccttctgtctcatcactactcctccatctgaggcccttccctgtggaccacaagggagttttatctggcgctgaggcacccacacagtcccctggaactagccccctggaagttctccctggatatgagactcatttggaaaccacaggacacaaaaagatgccccaagcttttgagcctccgatgccacccccctgccaatccccagcttctctgtcagaacccagaaaagttagccctgaaggaggacttgctatatctaaggacttctggggaaccgtgggatacagagagaaacctcaggcctctgagtcttcaatgccagtcccttgccctcccctagactccctgccagaactccagagagagagttccctggaagatccatccagatataagccccagtaggaatgcagagaaaactcaggaaacctctgggcttttgagtctccagtcttggacctcaacccagagctctctggaaccagccctgaatgtgtcccaccagcatctgagacaccatggaagggcatgcaaagtagagaaaatatttgggtccctgcagacccagtttcacctcccagccttccctcagtccctctcctggagtctctagtaatgggcccccagggagtcctgtctgaatccaaagctttgtgggagaccatggggcagaaagagaacctctgggcatctgattccccagaccctgttcatagcacacctccaaccacccttatggaaccacacagaatcaatcctggggaatgcctcgctacatcagaagctacatggaaggatactgagcattccaggaattcctcggcttctaggtctccatctctggccctcagcccacccccagctcttgcaccggagctgctcagagttagatccatgggggtcctgtctgattctgaagctagatgtggggacatacaaaagacaaaaaactcctgggcctctaagcacccagcttgtaacttaccccaagacctgcatggagccagccctctgggagtcttgtctgattctcagtctattgtaggggaaatggagcaaaaagaaaactgtgttcctgtgttcccaggtaggggctccagcccatcctcaaactctgtttcaaagtcccacgtaagtgagcctatcgcagaccaaagcaactatgagcctgacggggaggcagtggagcaaagaaagaaccactgggccactgagctcccagcccccagctcactctctactcctctaccagagccacacattgaccttgaacttgtgtggagaaatgtgcaacaaagagaagttccccaaggccccagccctctggcagtggatcccctacacccagtaccccagcctcccaccctagctgaagctgtgaagattgaacgcactcatcctggtctacccaagggagtaacgtgcccaggggttaaggcagaggccccactctcccagagatggactgtcccagagttgctcacccatcctgggatccatgcctggcagtggagtagagagctgaaactcaggctggagaaactgcggcagagccctgcctccagagcccctggcccaagtcaatcattttgcagctcccctattctgagctccacaattccagacttctggggactcccttcctgcccaccacagcagatttatccccccaatccatgcccccactcttcaagttgtcatcctcaagaagttcagcgcacagtacctcagcctgtccagtcctcccactgtcatcacttccaatcctcttcccagcttcagccacaggagtctggcagggcggaacaagggtctcagagaggggagaaaatgaaggggaagatggtgagccaggtcccatcccaagggccatgtgtacacatggaggctggtgtggactatctatctccaggcccaggagaaccctcaaactctaaggttctggtctcaggcaagagaaaggacaaggcttcagcctcatcctcagccaaaaagagagagcaccctaggaaacccaaagcaggagaccatagaagagggactgcaaggttggggttatccacagtcacagggaagaaccaccctgcccaggccagaagcctagtagaggcccctgtaagcacatttccccaaaggtctcaacacaggggccagagctctcaacacactgctcttccccagctgcttctccccaaagcttcgggtccccaggatcagccagaggcagggcgaagagcaagtgacatcctgacccctcgccactgtaagcactgtccttgggcccacatggagaagtatctctccttccctaccctcaaggcttcccttaccaggggtttgcaaaaggtgttagccaaatgcctggataaccatcgacccctacccaccaaatctagtcagtagagaaaaggctggtaatactagcacttggtatgccaagacctgaagccaaaccagggggaaggtggggatgtggagacaagaaatggaaattctaataaactagctgaattag

SEQ ID NO: 2026 - DNA, 1853 bp, Homo sapiens
attttttccgcgggcgctgagcactagagagagcgtcttgtggctgcggcctgcccctcagcctcctccgcgcggttacccctgtacccgccgccatccgtcctggcgctccggatgagtcaatgaggggcagggcccgaggagtgggaagagccggctggacgtcaggcccagccgctggtgcagtggtccgtcccctctgccggggtgggcccctcgggtttcgcgtgtcctcgggaaagagactggcgggcctcgtgggctgtgcggctatcctggagacaggtcccatggtgcagggtagagggattatgacaacaggctctggccaggaaccagggcagtcagggacctctctgaggacaggtcccatggggtctctgggacaggcagagcaagtcagctcgatgcccatggggtctctggagcatgaggggctggtaagcctgaggcctgtggggttgcaggaacaggaggggcccatgagcctggggcctgtggggtctgcaggcccagtggagacctctaaggggttgctggggcaggagggcctggtggaaattgccatggactcaccagagcaagaggggctggtgggtcccatggagatcaccatggggtctctggagaaggcagggcctgtgagcccaggatgtgtgaagctggcagggcaggagggcctggtggagatggcgccgcacactgcctgcagagctgcgtgctcgcctggagcggtgccatggtgtgagtgttgccctgcgtggtgactgcaccatcctccgtggcttcggggcccaccctgcccgtgctgcccgccacttggtggcacttctggctggcccctgggatcagagtttggcctttcccttggcagcttcaggccctaccttggcggggcagacgctgaaggggccctggaacaacctggagcgtctggcagagaacaccggggagttccaggaggtggtgcgggccttctacgacaccctggacgctgcccgcagcagcatccgcgtcgttcgtgtggagcgcgtgtcgcacccgctgctgcagcagcagtatgagctgtaccgggagcgcctgctgcagcgatgcgagcggcgcccggtggagcaggtgctgtaccacggcacgacggcaccggcagtgcctgacatctgcgcccacggcttcaaccgcagcttctgcggccgcaacgccacggtctacgggaagggcgtgtatttcgccaggcgcgcctccctgtcggtgcaggaccgctactcgccccccaacgccgatggccataaggcggtgttcgtggcacgggtgctgactggcgactacgggcagggccgccgcggtctgcgggcgccccctctgcggggtcctggccacgtgctcctgcgctacgacagcgccgtggactgcatctgccagcccagcatcttcgtcatcttccacgacacccaggcgctgcccacccacctcatcacctgcgagcacgtgccccgcgcttcccccgacgacccctctgggctcccgggccgctccccagacacttaaccgaaggggccaccctctggcctcctgcttcccaggctcccagctccgcacaggctgatgctccccgcccccaactgtggccgcctgagctgtccccggggacgcccctgcctccctctgcgggctccagaaggcggtgtgggggatggcggtcagcagcggccgaggggggccgggctaggtcccagcctgggccgaccccaccaccaggggtcagcagagcccaggaggcgacaccgcccgcccgccgctcccagacctcgcccgagtcggctctgttgtttgaataaacgtgaacgtgaacccag

SEQ ID NO: 2027 - DNA, 2323 bp, Homo sapiens
attaaactttaatgggtaactagtagacagtaacactctgggagggctcaaaccacataaccaaatgtgccaagataatcctgagctcactattgtcagtcctgaagattttcctcagataatctttcatctctttgttcctgagactatatattagaggattacagagtggtgttatcacagaatagaacaaggtcacttgatattcttggcttgatgaaaaaaaacaagattctaacgtgacagaacttgttcttctgggcctatcatcttcttgggagctgcagctatttctcttattactatttttgtttttttacattgctattgtcctgggaaacctcttgatagtggtaacagtgcaagcccatgctcatctgctccaatctcctatgtattattttttaggtcatctctctttcattgacctatgcctaagctgtgttactctgccaaagatgttaggggatttcctacagcagggcaagagcatctctttttcaggatgcctggcccagatctacttcctccactttctaggagccagtgagatgtttctgctgacagttatggcctatgacagtggatttttatctgagatctacaacttatgaagaatacaaatgatgtatattcttttctactcttcatgtatggactagaggggcttgcacagtagtaagaaaaaaatggctgagacccacaggaacaaagaaacaggacaggagttagatgcagagaagagatttcaacaaaagtttggaaaagatgctaacggtagcatatgagtcacagacagaacattggcacctttgtttaagaaactgaatgttaatgtcacatctgcctttggagattacaaatgaaatggctacctttctactggaaccctgaccagaagtctgccagttagtaagctggcttaagagatcaatctaaaatttacataaggcttttgaaaaaaagaaaaaagcagaagaaatgaagatagcaaacaacacagtagtgacagaatttatcctccttggtctgactcagtctcaagatattcagctcttggtctttgtgctgatcttaattttctaccttatcatcctccctggaaattttctcattattttcaccataaggtcagaccctgggctcacagcccccctctatttatttctgggcaacttggccttcctggatgcatcctactccttcattgtgcctcccaggatgttggtggacttcctctctgagaagaaggtaatctcctacagaggctgcatcactcagctctttttcttgcacttccttggaggaggggagggattactccttgttgtgatggcctttgaccgctacatcgccatctgccggcctctgcactgttcaactgtcatgaaccctagagcctgctgtgcaatgatgttggctctgtggcttgggggttttgtccactccattatccaggtggtcctcatcctccgcttgcctttttgtggcccaaaccagctggacaacttcttctgtgatgtccgacaggtcatcaagctggcttgcaccgacatgtttgtggtggagcttctaatggtcttcaacagtggcctgatgacactcctgtgctttctggggcttctggcttcctatgcagtcatcctctgccatgttcgtagggcagcttctgaagggaagaacaaggccatgtccacgtgcaccactcgtgtcattattatacttcttatgtttggacctgctatcttcatctacatgtgccctttcagggccttaccagctgacaagatggtttctctctttcacacagtgatctttccattgatgaatcctatgatttatacccttcgcaaccaggaagtgaaaacttccatgaagaggttattgagtcgacatgtagtctgtcaagtggattttataataagaaactgagaaggaggaattctggctggaattcatatcattcatttaacaagtcctgtttttcactggtacctcccatttgccaggtaccattgtaggcaatggaggagagttatgcataatgagagaataaacttattatatttaaagaatataaaggaaaccccagagtggttgaagtataatgagtaagtgtgagaaatttaagggttaagttttatgtgactgcaagggtctttcggtctgaggtaagaattttttcatattttaattgtggtaagaacccattttaatgttttaagcaaaggagcagttcatctacaatgctttcctctactggttagagcaacatcagcaagattttaggcagagattaataaactgtaaaatatcaaaaacc

SEQ ID NO: 2028 - DNA, 1406 bp, Homo sapiens
aggcttgtctcagcaggtcctgttgaccaacgtggtgacgggacaccagcagtcatttgggactagcagtgatgtcttggcccagcagtttgcaatcatgactcctttgctgtttaatggctgtcgctctggggagatctttggcattgatctgcgctgtggaaatcaaggcagcgggtggaaggccatttgcctgtcccatgattcagcagtgacttctctgcaaatcctccaagatggccaattcctggtgtcatcagacatgactggaactatcaagctgtgggacttgagggccactaaatgtgtaacacagtacgaaggtcatgtgaataactccgcctacctacccgtgcatgtgaacgaagaagaaggagtcgtggcggccgtgggccaggactgctacacgagaatctggagcctccgtcatggccacctgctcacaaccataccctccccataccccgcctcggagaacgacattcccagtgtggccttctcttctcgcctcgggggcttccgaggagcaccagggctgctcatggctgtccgggaggacctttattgtttctcctacggttaattcttcaggatgcagcccggaggaacgtggatttgacttaaagaagtaaagagcatcgtattaccgtttctatgagcgcattttaagagatgttcggtgtttgtagatcccatccatccggctgctaggggtaaggtgctgttttatgtgaagatagttctgtaaagttgtttcagttaaactgggctgagagagcttgaaagtccttttcataaaagataactatttccttttcttgttgaataccttagaatagttatcccccccttttttttttttttaacaaaaaaacacttttctaaggactgaagattggcaaaaactaaaataaattaaaactgcttacaccagaagccttttagagaagcatgagactgtttgactagtcctacctgggttccggaaatacatgcatcatctgtacttgaagaggccagtgggagaggagaggagggggaggtcatttatctgagtctctccagaagtttttaaggctacattttggaatcattaaacttggccttctcaaactcaatagcagatctctgagattctccttttattattttccataggcaatgggaggaaaggtggatctttttaaataatagaagttttaaacagtccttaacgtgcttttgttgaggcatcttccagaatgtaaggtacagcagctccggtttctattattgtgacttgaatgtcaggattcaagggctcagtgtcaaagataattggctttgactttttgtaatctaggagcagcagtttgtgagatgtttattcaaagtgttagcctgtttttctaccaacaataagctag

SEQ ID NO: 2029 - DNA, 2442 bp, Homo sapiens
cacgacacatcaggcagggcagagacccaagtattcacatagggccagtgatgactttttttgacacctgtggattctccgtggcaacctattccccaaaagtgctgcctcggtcagccaatcccagtgtctctctgcctaggcaacaatctcttgtgctctggtctgcccacagcctccatgcactcagctccttgggcctcttgctaaggggctggaagcagagctgtgtccttcaggctgtcaaggacctggtgagggatcctctgggtgtccagggaagcaggttcagaaagctcagttcagctggtgctgtattttgatctctgatcccagtgcagcggggaccagcctactcaactcagtgcagatagcaacaaaccagtcaccttgcccaagacctcctgctgcctgcctgcctgcctggtgaccaggactcctaaaggctgcagcagcagcagcagagttaaaactttaaaaccgggaggactggttctgtggctcagcttcctggcctggagaggctctagcctccattttctttctttcagcttatggaattgtgcaagaaagcacagagggtggagggagcgaggggaccagttatgccacagcctcctgcaccaccagagcacagtctcagatcagcaaagaggagctctgaggaggaaaaggctgccccaggaaagagctggccatctcagattgctgtagcacattcaagccaaagggagtccccggaggatgtttcgtccagcccccataattttagagcgggaaacagaggtccagagaaggaaagtgggtcctgaggccacacagctaactaatggcagagtcagtttccagcccagggatccccagctgcctgcccagcactcttgctacccaggctgaacccccacccccgtgctaccaaggggcccatgcaggagcaggcagcagccactgggtaacttgatggcttgggagaggcggcctggcctgacacattgggaggctgggcaggtccccgctttgctcctattgtgctatttgggcgcctcctgccatccccctgcattctgctagacctgaaaccacagcccagcccatgcttgtcagtcaagtgcttcccgaggataaactttgcacacagcacccaggccactcttggggaccaggccactctctgttgaagagatctaactaatttataaattgattgattgaagttctttttgtcccaggtaacttcatgtcttaggccaaagaagggagtcatgatgagtgccagagatgaaacggagattctggggcaaagggtaggggaggcacctgggaggccctgttcttcaggtgatcttctcattagtgtagacttttgaccccaggcagacatttacatgtccaatagccaccatcagaggtcagttcccagaagcaggaggcctgtcacttgccaccggtcaccaggcccaagctagacaagaagactttttctattccactagagtggatcttgctgatgatgtgtctgggatccagaaaggtggggagaagtagaggtctcagctcctggggagggttggagccagccccgggggaagaatgcaaggccgccagtgagcaggcattcagggctcctgtcgaggagagggtggtcaggacaggaggaggggctgcctcatggatgatgaggtccatcatcctagcagagactgttgtaccagccactgacgagggtgtggcagtggtgttaccagaaccctgctatgtcagcgttcaaatacatgtcccagcaggccaaccacccctgcagcagtcaaggggttctgtccggtgtgtgccagaatgctagggaagagaggaccctgagaaggatggcagcatggcacagacacgccatgtggcagttagacaggtcatgccttctgacccagggcacatgcagaggtccacagactctgaggccagctagttagtgttcccagggggctgcacagcccagagcctgtgagttttgtgcatctggagctaaggtgttctgcccaaagtgttggaggtgggcctcaggcaacaaataccctgcttcctcacatccccttttcttccttggatcttgggcctgggccctcacctagtcaggcacaggcctccactcccccacactcacctgtccttcctgaaagtcagccactgggctccacgcaggggtgtcacagtcagagccctgctccagcctcagacctggggcagtcactggaaactcagaagagagaagacaagacaatgaaagtttcccattcaaggaggcatccagctgttagttctgccagcaaaaatgccagccagagagctaaactgccagcaaaagatatttggatggaactttggaggccattaagagcaggcactgcaaagcaattgtagcgaaaagatattaaatgaatccatcacgtc

SEQ ID NO: 2030 - DNA, 2239 bp, Homo sapiens
atcctagcattatatctacagagcagaggcaggacctttggcaggagacacatcccttctcctgtgatgtgtcagttagtgtagagaagcaagctggcatggacttgagagccggggtgatgtctccagcggcagcgtgtcatcctggaggacattgtgtcagcagtgaagccctgcatccctgccagtcatcctgaaggacattgtgtcagtagtgaagccctgcgtccctgccagtccaggctttcttccttgtccttgccccgcctggtgaagctgacagacagagatgaaagcatggaaataaaaaagcaaattacagggatgagaagattgctgaacgacagcactgggcggatctatcagcgagttggcaaagaaggagagaaactaaaagaagagccccaggacctggatttagtctggcctccacgtttgaactcctctgctgaggccccgcaaagcctccacccgtcttcacgtggtgtgtggaatgagctaccgccccagagtggacagttctcagggcagtatggcacccgttctagaaccttccaaagccagccccaccctaccacgagctccaatggagaacttccagtggtgaattcatcagctggatcaaactgctgtacttgtaactgccagtcaacgttgcaggccattctacaagaactcaagaccatgaggaaattaatgcaaattcaagcagttggaactcaaaacagacaacaacctccaatttcccttatatgctcccagcgaactgctgtctcacgaaagagaaataaaaagaaaaaagtgcccccaaagactgtggaacctcttactgtgaaacagaagcccagtgggtcagagatggagaaaaagtcggtggtggcctctgagctatctgctctccaggcagccgagcacacctccccggaggagagccgcgttctaggattcggcattgttctggaatcaccttcctcagatccagaagtacaacttgctgaaggctttgacgtgtttatgcctaaatctcagctggactctatattgtcaaactacactcgctcaggaagccttctgtttagaaaactggtgtgtgcgttttttgatgacaagactttggctaactccttacccaatgggaagaggaaaagaggactcaatgacaaccggaaaggactagaccaaaatattgtgggtgcaataaaagtcttcacagaaaagtactgtacagctaaccatgtggataagcttcccggcccaagagattgggtgcagattctacaggatcaaattaaactggccagaagaaggttaaaaagaggctcagcagagatcgcggacagtgatgaaagactggacggcattgctctaccaccaacaggtgcttgtggtgggccctgcactgttctgccgggtgggagtgcagcggtgaccctagtcttgcagagctctcctcagacaatgtcacaagaaaagggacagatggcagaaccctgggaggagcagcatctcgtgctcctgaacaaccttaccagagacagagctgaaacaggagctttgtcccaaaccagccaagacttcaagcaccattcattcctcataactcaggtctcagctacacttcatcatcagagagggattcgcaactttcccgcgccaggctcagccaagtctcttacccttcacatctcttgcctctctctctgaaattatcttgcttatttatgtgtgtgtgtatcacccatctttccactggaatctgagccttgtgatgtcaggctgttaagatttcaggccctggtgaaaacatgttcaggatgccctctctcccctttgcccagcaagagtggactgattaaagttggacctgaggtttccatgaatatgcaaccgagtcattctgacgacagtgagtcctggcctcccagtgctgccagttaccagaagtgactccccttctcccatcagcccaaacccagagcctttatcacagaacccaagattgagaggagggtcaggctggttggacagtggccttatcatgggatggatggatcaggagccttttacagcgctctcctttccgctgcatcccattgtcttagatcacgtggacttgccttttcccctaataccgccccctcagtgctcttctataattggagaaattgtgtcaatagatcgaccaaagagatgcaggttgtactccatgagaatttaataaacgctagcgattcaaagc

SEQ ID NO: 2031 - DNA, 1675 bp, Homo sapiens
ggacgaggcgccctgctgcccgggaaggccgttgctgcctggaggccatgtcagtgtcggggcaccgcactcagactgctggcggcgaggacccaggggccctgcggggtcagcggcgatgtgcgagcagggtcctcggagccccagggcccacctttgacaagcgctggaggagaacctgtgctgggggtccctgtgctgggggcatccctgtgctggaggtctctgtgctggcgggatccctgtactgtgggggggtccctgtgcctgtgctggggggctctgtgctgcgggccctgtgccgggggcatccctgtgctggggggatccctgtgctggggggccctgtgctgggggcatccctgtgctggaggtctctctgctggggggatccctgtactggggggggggtccctgtgcctgtgctggggggctctgtgctgcgggccctgtgctgggggcatccctgtgctggggggatccctgtattggggggccctgtgctggggggatccctgtgctggaggtctctgtgcttggggggatccctgtactggggaggagtccctgtgctggatccctgtgctgcgggccctgtgctggggggatccctgtgctgggggccctgtgctggggggccctgtgctggggggatccctgggctgggggggtccctgtgctggggggccctgtgctgaggggccctgtgctggggggatccctgtgctgggggggtccctgtgcttggggatccctgtgccggggggccctgtgctggggggctactctgtgctgtgggtctctgttctgggggctctgtgctatggggggtatctgcgctgggggctctgtactgggggactctgtgctgggggtgtctgtgcaggggggctgtgtgcaggggagctctgtgttgggggctgtgtgctgggggactctgtgctgggggcgtctgtgctgggctcctctgtgccgaggctggaggcaaggatttaccattcatacttggggagcctcagccaaggtgcctgcagaggcctgggccagtgtgaagggtcacccttggcttgggtcttgggactgggtctaagaagagaaaaagcggctcatccccctggacttgggtagagacatgatgccctgggagtctcccttccaccccaggagtcagaaccctggctgcactctgccccacgtcctggcccccaggctgaggtgcacccagaggcccgacgtgtgcctcttcggcccctggggctcctgtacccgccccacagatgtgagagtgtggcaggccaggtctcactaacgcaggcctccataacaattatttcagtgcagagtggttagttcaatattaaaagcttaaaaagctgtccaggatcggtggtttacacctgtaatcccagcactttggaaggcccaggcaggtggatgacctaaggtcaggagttcgagaccagcccagccaatttagtgaaaccccatctctactaaaaatacaaaaaaaaaaaaaaaaaaaaaaattagccaggcatggtggcaggtgcctataatcccagctactccagaggctgaggcaggagaatcacttgaacctgggagacagaggttgcagtgagccaagatcgtgccactacactccagcctgggcaaaagagtgagactccgtctc

SEQ ID NO: 2032 - DNA, 1856 bp, Homo sapiens
aggatgccctgcgcggggcggcggagcgggtgcgtgcggcggcggttgcgagagagatgagccgcggcgatgagcccggaaaagcagcaccgggaagaggatgaagttgactccgttctcctttcagcgtccaagatcctaaattcttcggagggggtgaaggaaagtggctgcagtgacacagaatatggctgcatagcagaatcagaaaatcaaatccaaccacaatcagcattgaaagtccttcagcagcagttggaatcatttcaggctttgcgaatgcagactttgcagaatgtcagcatggtacagtcggaaatcagtgaaatattgaacaaaagtattattgaagtagaaaacccacaatttagctcagaaaaaaatctggtgtttggcacgcgcattgaaaaggatttgcctacagagaatcaagaagaaaacctttctatggagaaaagtcatcattttgaggattccaagacacttcattcagtggaagaaaaattaagtggtgatagtgtgaacagtctccctcaaagtgtaaatgttccatcccagatacattccgaggacacattaactctgagaacttcaacagacaatttatcttcaaacataattatacacccttcagaaaattctgacatcttgaagaattataataacttttatcgttttctacctactgcacctccaaatgtgatgtctcaagctgatacagtaattctggataaatccaaaattactgtgccttttctcaagcatggattttgtgaaaatttagatgacatttgccattctatcaaacaaatgaaagaagagcttcaaaagtcacatgatggggaagtggcacttacaaatgaacttcagactttacaaactgatccagatgttcacaggaatggtaaatatgacatgtcccctattcaccaggataaaatgaactttattaaggaagaaaacttggacggtaacttaaatgaagatataaaatcaaagagaatttcagaattagaggcattagtgaagaaattactccccttcagggaaactgtgtcaaaattccatgtgcatttttgtagaaaatgtaaaaagttatctaagagtgaaatgcacaggggaaagaaaaatgagaaaaacaataaagaaattcccatcactggcaaaaatattacagatttaaaattccattccagagttccaagatacacactgtccttcctcgaccaaacaaaacatgaaatgaaagacaaagaaagacaaccatttctagtaaaacaaggatcaataatatctgaaaatgagaaaacttccaaagttaattccgttactgagcagtgtgttgcaaaaattcagtacttacagaattacctaaaagaatctgtgcagatacagaaaaaagtaatggaactggagagtgaaaatctaaaccttaagtccaaaatgaaacctcttatctttaccacacaatctctcatacagaaagttgaaacatatgaaaagcaacttaagaatctggttgaagaaaagagtactattcagtctaagttaagtaaaacagaagaatacagcaaagagtgtcttaaagaatttaaaaaaataattagtaaatataatgttctgcaaggccaaaataaaactctagaggaaaaaaatatacaactttctttagagaagcaacaaatgatggaagcattagatcaactaaaaagtaaggaacacaaaactcaaagtgatatggccattgtaaataatgaaaataatcgaatgagtatagaaatggaagcaatgaaaaccaatattctgttgatacaagatgaaaaagaaatgttagagaaaaaaacacaccagcttct

SEQ ID NO: 2033 - DNA, 1998 bp, Homo sapiens
aaattgagggggattctacaaaatacacgacccgcactcttctaaggtgtcaaggtcatgaaaaacaagactggaaaaccaacacagactggaggagactaagaagacctgacaactaaatgccatgtgggaccctggaggggacccgggaacagtagtagaagagctggtgacatctgaatgaagtctgtaatttgggtaacagtactgtaccaatgttaatttccctgctctgccaatgcgatgagggaacagaagagatgatggcaatgcaccttgcaggtgcagtttccttggggacccctgaacaaggaggttgttatctggccatcttcattcccaccttgtgggaactgggtccagggaaccaacacaaataagctgacaacttggctactgcttttgctgtgcctccagtttgctcatatcctcaatacagcaggacatccaggactgaccacgtatatcaggggtgaccccaacagcacagagaacagccaacgggttcagggaacggcttcacaggtttgagacaccataactaggacaaagaccaactaaagaccatggacccaaattgtggatggagggatttaagatgaacttccaaccatttggatgagctccaggaggtcatctctatctccctggaaatgcccatggtttgtatattgttttgagagaccaatttcaagagaagctgggcctgttgtccatcaaagccccacggtgctttatcttcattctgagctggctgctcgtcagacgcagggcaggctgctgccaagagagcccgctgccgaggacctccgtctatcactgcctgggggacacgctgccttgggattgttcaaactccagggagaggacagttatccacacccacccactgtgctccttggagaagatctgagctcttctggttggaattcttgggtctttgggattctcaacatttccagagatgaggaggctataggaatacttacaaccattttacagcttagggaaacagagtcaagtgccgtaaaatggacacacacaaaacactctcgggagctgggtccctaagttacacagagaacctggcttccctggtcttagcagatctcacagccccttcaccccggcctgtgacacacacagccctccagaccttcctccacctgcaccactaggtttatgctagaaggttcccagtgtgcccacttctaagcagtctttgctgagggggatgaagaaaaggggacctgccaagaggccactgaggtggaggagtcctcggagactaaagcagcagaagtttggagaacctcttcaaaagagacaggagaagcaaggctgcgtgcgagtcaggaagaacaggcatggtttaaatcttttttcttggagagtaaacattgtcacatttctgcctctgctgcttcagaggatgcgcctctctggacagcccttcaggcatcagcctgttggcagccgcgcgtcctggaatatggggtcgctggacataaatccatctgtactggccggggctgacagcgactgtcagtccccaggacagggtcaccacctttctctcccttcttctctctcctcttcccactgtttcaaggacagcagagtcttatggatttttcttctcctgtcttgaatgtgcaaaggtccaggggaccacagcaatgccaccttctggtgtcaagagggaggtggaggcaggcactgaataaggtcccaggcgctccttgccctggaattttgattcttcaaagggcatcagaatgcggtgaccagcagcacacagcaaccagtctctcagcggggctttaggcatggtcacttgggcttgcccagggaacctcatcccggaggatcttccaggaagcctgaggtctcctactaatggaactgtgactggctcacccagagggggtcaggttgggaccttggagtgggcactagatgaagcaaatgggattgactctaataaaaacatggaag

SEQ ID NO: 2034 - DNA, 1865 bp, Homo sapiens
tctggccgtccatgtgccaagcctccaagttccctgagagctaccggccaggggtcgggaggctatgggagctcagggcaggcacctcccatgctcccgcgggagccaccaggacatgaagatcccgtcttcccacaggccctgtgtcttgctcagtccacgtgactctgctttctcatcctaggcctcaggagccgggacactccctgagtcctctgggagcccttaagccacactgagaacacagaccctgggagaagcagccagcagtgaggaatcctggaaccccttcccagggagagccttcccatgacccccatgaagagatcagtgcaaacacaggtgtcagagcccttcatggagtcctggggtgaggagtccctgccggagctacccgcagagcagtccctgacggagtactctgacctcgaggaggctccctcggcgcacactctctatgtgggccatctgaacccccagttctcagtgccggtgcttgcctgcctgctgcgagacaccctggagcggctggagatgccggtggcgcgggagcacattgaagtggtgaggcggccgcggaaggcctatgcactggtgcaggtgactgtccacagggacaccctggcctccctcccctggcgcctgcagacggccctggaggagcacctaatcctcaaggagctggcagcccgtgggaaggacctgctattgagtgaggcccaagggcccttcagccacagagagcagatcgtgggcaaggaccagctcttccagggtgccttcctgggcagcgagacccgcaatatggagttcaagcggggtagcggcgagtacctcagcctggccttcaagcaccacgtgcggcgctacgtgtgcgccttcctcaacagcgagggcggcagcctgctcgtgggagtagaggacagcggcctggtgcagggcatccgctgcagccaccgtgacgaggaccgcgcacgcctgctggtggactccatcctgcagggcttcaagcctcagatctttcccgatgcctacactctcaccttcatccctgtgatcagtacctcggagaccagcgtccccctcaaggtgatccgcctgaccgtgcacacccccaaggcccagagccagccgcaactctaccagacagaccagggggaggtgtttctgcggcgcgacgggagcatccagggcccgctgtctgccagcgccatccaggagtggtgcaggcagaggtggctggtggagctgggcaagctggaagagaagatgaaggcgctgatgatggagaaggagcagctccagcagcagctgcagcagcacgggcctgtgtcctgcacctgctgtgtcctgtgagggccctggggagcaggcaggacggcacggcactctccacctgagacccagggatttcctgtttgagtgtaaggccaaccagtaaagcccatgcgggctgctgagaggcggacagggactccttcaacatggcacatgagcaggcacccatgtggcttcaaccctgacagacccatctgtgtagccaagaaactgctctcagccctgtccccaaatgaccttactttcagaaagaatgtgtaaaaccctgcccagagctcccctagggctaagctataagggattgtccttctccctaaaatgctcatttggcccaggctgaggtctgtgactccagttggctacacagtgccagaaaggaatctgtcatctcaggaaagcccctcaaagatggcgaggcatatttgatgactgtggttacagggcaagaggccaccctgcagcccccacccctgacttgctggaacttgtgactgtcaaagctccattaataaattacatgcacctgg

SEQ ID NO: 2035 - DNA, 1758 bp, Homo sapiens
aaaaggaggactgtgtagacaaagtctttgaatgaaaatggcctgttgtatttcttttttatgatcatggttttgtcaaggtttttcctaccttgctataaacaaagtgagtagattgaggcaggatagtcacaccaaggtgagtccagaactgtccagaactgcccagaacgtggtttcctgcagggcaggccccgcaagggccgggccttggccacctccctcctttcaccggggatcacagactcagagggttcagcacgtcccgtctctgctgcctctgggacaggaggggggatcaggcagagcacagacggaattaatgttttctgagaatttctccagttctttttaacacgatttctttcagccctcagagcctcgtgaccatggctggccatggtgagggtctgagcaggaggcttgttggcaccaggccgagaggcaccacatgcagtcacactgctcaggtgtctggctgccccaggcttgcatttgctgtggccgaagtcagcacgtggccattagtgtcgtctgcttcctgaggggtgtgtcaggctgttgcttccacgagtttcctggtcttattggccagcggatccatcttcagctcgattattgcgtcttagctgcacattgtggaagtaagtgagctgtgaacaggacaaccatccgtgtagcaatgctgggcattattccaagccttttgcgtagggcgctcctccaggtccacggcagcctgtgcagcatcggccgtcgcccaggtgatacaggtgaggcccgtgagaggggccaggtggcgcctccagactcactggcctgctgtgaggaaggcaggaatgggagccttgttccaaaggtcaggcccgaccgctgtgtcggggagcatgggcaacacccgggaggagcgggcagagccctggaacaggccagtcagtttcgcccatggccctcaccctggtgcctgttggcgtggccggggtttctgattcagcaggtctggcctggctgggattttgcttttctagagtgttccccgtttctcctgatgcttctggtccagggaccacactttgagaaccactggttcgcctcctcttctccttctccgtaggtgttaaacaggatccagtggagtcagatccccgtgtgacacgtgcttccctgtgacttttctctctgtatctccacgtttccggtgcacatgcctttactcagactccgacactggcgttgcttttgtctcatcccagctaggcgacgtctgcgtcagcgcctctcatctgtggcacgtgtgcccagcgggctccctatgtgacggcttttcccacctctgagtgttcatgtcactcgctgcatgttctgccacactcggcccctctgcagagcctctcacttgtttcaaaagaactttccatagtgacaagtgagggcgcagttagcctttggaaccctcgactcggctcctctgtcaccagcgttctctcccacccttctttcttggttttgaactacttactgttttaaaacaaaccccattttactactgaatagcacagtgtgtttctattaagatcaaaaatggaccattgtctcacataacagcaatgcttttcacatgtaacaaaaataacaatttcctgttattatttagtgcctagtccatggtcaaaggtctgttgacaaaatgccttttactttttttctctctttctaattggatccaaactggttccactcattaaatcaatctgctgc

SEQ ID NO: 2036 - DNA, 1708 bp, Homo sapiens
taacattttgcaggtagttattttcctgctagaacttacttaggtgtgctgggggataaatggatatttatttactagaataaatctagtaatctcagtactgcagggggtggcaaagggaggagaatagaagctggatagctaaggttattgccgacatggaggcccaggttcacaagttgagagaagaattgatcaatgtgaactcacagcggaaacagcagctggtagagcttggtcttcttcgtgaagaggaaaagcaaagggctacaagggaacatgagattgtcgtcaataaactgaaggctgaatcagaaaagatgaaaatagagctgaaaaagactcatgctgctgagacagagatgacactggaaaagatgaatatcaacaagttgtgtccgggcttgggtggtgagtgtatgactccagatgttatgctgctccagcagaaccagtcactcttgtggaagccaaggaatgggaacagaagaatatgaaatctgtggccaacagcaagctgaagcagattgagaaggaatacactcagaagcttgccaaatcttcacagatcgtagcagaacttcagacaaccatttcctctctgaaagaagagaacagccagcagcagcttgctgcagaaaggcggctccaggatgttagacaaaagtttgaagatgagaagaagcagctgattagagataatgaccaagcaatcaaggttttacaagatgaattagaaaaccgttctaatcaggtgcgatgtgcagagaaaaaattacaacacaaagaattggagtcacaggaacaggtaccctctcctttactatttgactctcttgtttactttctctaggtcaagaagtgtgtgcagccaggtgcagtggctcacacctgtaatctcagcactttgggaggccgaggtgggtggatcacctgaagttaggagttcgagactagcctggccaacatggtgaaaccctgtctctactaaaaatacaaaaattaactgggtgtggtggcaggtgcctgtaatcccagttacttgggaggctgaggcaggggaattacttgaacccgggaggcagaggttgcagtgagccgagatcgcaccattgcactccagcctgggtgacaagaacaaaactccgtctcaaaaaaaaaaaacaagtttacacattgcctgtttcagttaagatgctttgggtgcaagtaacagaatatcccacccatggttcacataaaaaataaagcaatttattacctcacagaacaagaagtccacaagtaaagcattctcatgactctccctccggtgctggcttcattctagaaccaacttcaagatggctgcagcagtgccaggcattctgcccagatctgcactattcggaggcagaaaagggctgccagtttctagggcctaatgagtaaggaaatctttcctggaaactaccccctccctttacatgtcattggccagagaaggtcacatgcttagcctggcatacccagtccctggctaaagaactgagtatacaaaactagcctagaataatcaggacccacctgctggtgatgaaactgggagaagaatgaaaactggaacaaaaaggaggggaaatggagtgttgagtatgcagccaacagtgtctgctatgtcatcatttcaaaataaatggatattattttgcttagaggcataaatcac

SEQ ID NO: 2037 - DNA, 1846 bp, Homo sapiens
atataagagggacggcgctcggcctccagcagtcggctttctgctgggctcggagccagaacctgctgcgtgctccctccagactccctggctgcgggtggactacctcagagctacagcggtgaacctgtggacacctccgactcctcgagcctctcttcgtcgaagagtctcctaattttcagatctccggagccagctgtgggaagattagcccctcccgccgattgctcatggaggaaccaaggccttcgaagcgacttcgctccatggcccctaatcaagcctcaggtgggcctcctccagagccaggctgctgtgttgcggaccctgaaggctccgtggaagcagatgggcccgcacagccagcccaacccgcaaaacccatcgcttacgtgaaacccttcagacggcagcccccagctcgcccagagtcaccccctcctgcagagagaggccggcgccggggaggaagccggcggccagggcgaggccgtggcagaagggctgggccccgcggggacgctggccagagacagggggcagaaggcttgatggcaccggacgtgcacatccaactggaccaccatggagagccaggccaccagggggaaccggaaatcacggagaccgcagccttctccctttctgaaacaggtcctccgcctggaactgtgcaggaaggccctggccccgacgtggcgcaacctgagctggggtttcaggagccgcccgctgctcctgggcctcaggctgttgactggcaacccgtcttgaccctctatccctgcatcgggtttagggctctgggtgactcagcggttttacaagtcattcaaaccccccagggcacctacgtgcaaggggtcccagtgttcctcaccgacattgcgtattgaccactatctgccacccacgttgttcccagcctcccttccttccacctggacgttccccccagccccacttctgctccactcctcccccgactggacctgaagcctgagcttcccctgaacttggagtacgcaacttacaacatgcaagctgccaaacaccctttctgtacaaggcgattggaatggaactgtcatgtacagtgaaagtacacgtcacgtttttcagccaagaagaagccaacccagacaacctggaagaagtgggatgcaacaaggatcactaagcatggaaattaggaaactgtattcttaagtccagagaagtacgattctggaaaaaggattgatgacctagaattaaaattccagaagacactcatatagacatgtgggacatgcgaaaactcagaaggagctagaagttactaaagtgcttctctagtgcctggagacgatagactggctgaatataagagcaataaaaatctagactgacacatttttaagtctcaacgtgggtaccctttgggaaccactaaatgaattggaatagaaggtaaaatttcaaacagattgaggaaaaaggggatcaaaggacatgtgacgaatcagacaaaaggtgttggggtggggggggggcggttaacggaagcaaggagagtgcatgactcactggaaccgctaaaccaggaatcagtaatttgacggcagtgtccttggcttcctcctggctttaatgggaatattttgaatgtttcaccattaaccaagatgttggctgtaggtgtctcttagatgtttaagttgagttagttcccatcttttcagagtttgataaatgttgtattatgaacttttgtattttgtattttattaggtaggctgttgttggctggttttcactcctttgtaaacgtccaaataaaatacagataactttttacatc

SEQ ID NO: 2038 - DNA, 2194 bp, Homo sapiens
agcctgtcgctggcgcggtccgggcgggaggctcggcggcgggcggcagcatgtcggtggcggggctgaagaagcagttctacaaggcgagccagctggtcagtgagaaggtcggaggggccgaggggaccaagctggatgatgacttcaaagagatggagaagaaggtggatgtcaccagcaaggcggtgacagaagtgctggccaggaccatcgagtacctgcagcccaacccagcctcgcgggctaagctgaccatgctcaacacggtgtccaagatccggggccagaacctgtgcgagaaagacctgaaggagatccagcaccacctgaagaaactggagggccgccgcctggactttgactacaagaagaagcggcagggcaagatccccgatgaggagctacgccaggcgctggagaagttcgaggagtccaaggaggtggcagaaaccagcatgcacaacctcctggagactgacatcgagcaggtgagtcagctctcggccctggtggatgcacagctggactaccaccggcaggccgtgcagatcctggacgagctggcggagaagctcaagcgcaggatgcgggaagcttcctcacgccctaagcgggagtataagcccaagccccgggagccctttgaccttggagagcctgagcagtccaacgggggcttcccctgcaccacagcccccaagatcgcagcttcatcgtctttccgatcttccgacaagcccatccggacccctagccggagcatgccgcccctggaccagccgagctgcaaggcgctgtacgacttcgagcccgagaacgacggggagctgggcttccatgagggcgacgtcatcacgctgaccaaccagatcgatgagaactggtacgagggcatgctggacggccagtcgggcttcttcccgctcagctacgtggaggtgcttgtgcccctgccgcagtgactcacccgtgtccccgccccgcccctccgtccacactggccggcaccccctgctgggtctcctgcattccacggagcccctgctgccagggcggtgtctgagcctgccggcgccacctgggccccggcccttgaggtactccctgagcaggaccccacacttgggtgggggggcttatctgggtgggtggggatgcctgtttacactagcgctgactcccaacggtgacggctcccttccccactccatggcgccagcctcctcccccgctccccaacttctcgcccagctggccgaggcggggcaacactaaggtgctcttagaaacactaatgttcctctggggcagcccccacctccgtcctgacccgacgggggcccggcccactgcctaccctcgagtcccgcagccttaacaggatgggatcgagggtccccatggggtggctcagagataggaccctggttttaaatccctcccagcctggtgctggtgatgggccctggccctactccagggccaatgcacccccgcctcacacacgcactccttctcctcaaggccagggcagagggcctcgccgcctcccgggcctgctgtcagcttgcagcccggggacagaggccagctgggatctgcctgaggacagagaacatggtctcctgcagggccctgcctcccaagccccgccctcagaaagccaagtaccttttcagctttttaactgcccccatcccaacccagggaggcctgtgtcactctggcacaagctgccaccaccagccacccacacccaccccagcacacctcacacgggaccacagccgcgctgccgagggccaagcacaaaggttccagtgagcgcatgtcccagcccctggtggccaggctccccttgctgagccgctgccacttcaccctgtgggaagtggccccagccatctcctctagaccaaggcaggcagccccgacatctgcttcctctatcgcccaatgcaaaatcgatgaaatggggagttctctgggccaggccacattcacattcccctccccctgtggtccagtgaagcctccggaccccaggctctgctctgccctgccctgcacccccctcgtcagaagtacatgaggggcgcagagatgagcacacagctttgggcacggtccagggcaaactgaaatgtacgcctgaattttgtaaacagaagtattaaatgtctctttctac

SEQ ID NO: 2039 - DNA, 1713 bp, Homo sapiens
tcttcccaggaggctcctcgctgcctggtgccgtagaggcccatggaggaaaaggaagataagcatcaggtgactggtggtcacatggtaaagcactggaacctgtcttcctaccaccttacgactctaagagcacccagaggagtgacttccaaaaaccatcgtgtccactggttttgccagtcaaacacagcaagatgcaaaagccttcttgtggaatagtaccacttgcctctcctggtacatcagcagaacttcaaaacaattttatagaatacatctcttttatacatcaatatgatgccagaaaaactccgaatgagcctctccagggaaagagacacggagcttttgtacagagagagataaaaccaggcagtaggccaacagttcctaaaggagcagaggtattactgaacactccagggtcacgttcatcagaacagtccaaaaaaacagagaaaggaaactcagcggaaagcagaatgatctcaccaggtctctgccaacaaaattctcaggagctgttagagcctaaaactcacttatcagaaacagacgtcagacaggcagccaaggcatgccccagcactcttgagagcagagaaaagacctcaggcgccactcaaacaactgtaggagatgctcttttcactacgcacaagcctttaaatccaccaattaaaaaatcagaataaattaccttcttcagataaaaatctaatccctggaatatagggaaatttcacaatcatcatcttggccctcacatttacttttctgttatcagtaacttcagaacatacaatttatgtaaatggaaaaagagaaaaaagacaattaaaatacaaccaaatgttattaataagagtggtctccaataagtggagtgagacattatttctatgtcacattctttatgaacacaactttgttttgcacaacacatgatcgtaattaacaaatataatacttttagaagagaggccctgttagacatgagtggacagctttggaatcaaacaaactagagttggaatgttgccttcacttcattccttgagctgtgtgaccttgggtaagtaacttaacctctctagacttcagttttctcaactgtaaaattaggaaaatagcaacttcgtaagattattgaggatgtgattatgcacattgatcagtaagtggtcaatgtaatcatatcatcactgctactataattcaattttcaatttaaggataatgttctcttatatatttaatttttcctcattattctaaaacttagaactcctccatatataattaaaagtgtgaaaatctaaaaatacttctgccagtacaagatgcacagacacatacacacttaattcaaagacatatgggtacttagaatattgaagtattttctaaattgttttctattttactcagatcatttctagcaccaactcaacctttgctttttggatgagtttggtaaggattaattctacttccaatttggtgtgtttggtgtgccaaaatgtatctattataagatatgttatattgcatacaagtggaagtaggtggagtattcctctgttataaagagtatttacaaatttccattgggaaatatcagctgctcactattatctgcagtattgataagactacagctatatctttatccatttattctccattaaagaaattgtgataaactgc

SEQ ID NO: 2040 - DNA, 2118 bp, Homo sapiens
acgcacactgagtccaggtcctcctgaaggtcaccagcacagcggggccctgtgttactgtagagagaagtcagttgcttagtttcagcctcctgccggcaccagatgctgaccaggccctcccaggtgctgctgaactccttatctgtggaccctgatgccgagtgcaagtatggcctgtacttcagggacggccggcgcaaggtggactacatcctggtgtaccatcacaagaggccctcgggcaaccggaccctggtcaggagggtgcagcacagcgacaccccctctggggctcgcagcgtcaagcaggaccaccccctgccgggcaagggggcgtcgctggatgcaggctcgggggagcccccgatggactaccacgaggatgacaagcgcttccgcagggaggagtacgagggcaacctcctggaggcgggcctggagctggagcgggacgaggacactaaaatccacggagtcgggtttgtgaaaatccatgccccctggaacgtgctgtgcagagaggccgagtttctgaaactgaagatgccgacgaagaagatgtaccacattaatgagacccgtggcctcctgaaaaaaatcaactctgtgctccagaaaatcacagatcccatccagcccaaagtggctgagcacaggccccagaccatgaagagactctcctatcccttctcccgggagaagcagcatctatttgacttgtctgataaggattcctttttcgacagcaaaacccggagcacgattgtctatgagatcttgaagagaacgacgtgtacaaaggccaagtacagcatgggcatcacgagcctgctggccaatggtgtgtacgcggctgcatacccactgcacgatggagactacaacggtgaaaacgtcgagttcaacgacagaaaactcctgtacgaagagtgggcacgctatggagttttctataagtaccagcccatcgacctggtcaggaagtattttggggagaagatcggcctgtacttcgcctggctgggcgtgtacacccagatgctcatccctgcctccatcgtgggaatcattgtcttcctgtacggatgcgccaccatggatgaaaacatccccagcatggagatgtgtgaccagagacacaatatcaccatgtgcccgctttgcgacaagacctgcagctactggaagatgagctcagcctgcgccacggcccgcgccagccacctcttcgacaaccccgccacggtcttcttctctgtcttcatggccctctgggctgccaccttcatggagcactggaagcggaaacagatgcgactcaactaccgctgggacctcacgggctttgaagaggaagaggatcatcctagagctgaatacgaagccagagtcttggagaagtctctgaagaaagagtccagaaacaaagagactgacaaagtgaagctgacatggagagatcggttcccagcctacctcactaacttggtctccatcatcttcatgattgcagtgacgtttgccatcgtcctcggcgtcatcatctacaggatctccatggccgccgccttggccatgaactcctccccctccgtgcggtccaacatccgggtcacagtcacagccaccgcggtcatcatcaacctagtggtcatcatcctcctggacgaggtgtatggctgcatagcccgatggctcaccaagatcgaggtcccaaagacggagaaaagctttgaggagaggctgatcttcaaggctttcctgctgaagtttgtgaattcctacacccccatcttttacgtggcgttcttcaaaggccggtttgttggacgcccgggcgactatgtgtacattttccgttccttccgaatggaagaggtaaccgaaattttattcatctctggcagccccttctgtcttgcttacgatttgtctacaccatgcacttgggagaagcagctgcagcacatttgttcagcaaagagcagcaggtttctttccttcttgctggaaacttttctgttcccctgatgtggtggggtgggctttaatcttatctggtgtgttcatatagaatcacctagaaggataaagtcgctgtagagttaatgaaag

SEQ ID NO: 2041 - DNA, 2204 bp, Homo sapiens
agaccttacctgcctgcccaacaccatggaccagcagctggatatgtctgtccacttggcccacaggacgagcagcatctgaactgcggctagagaccatgtctaagggagaacgaggaccctacagggaaaactgtggtcagggccccggttccagagagcaaagtgcaagaggaacacaggggcatcagagagtgggagtgatacatgccgaggcttcctcagagtagatgggctcttggcttcgggacagagcgagggaagggggcagcgcatcccctttccatggccggtcactgcaggatgtctctaggagcctgggaaagagcagcatgtctttggacatgcctcctcccaggccatccttaattcatgccctacccaccttccaagggccacataccgaagatagtacacagcctttgttgctcgctcctggtaaacaaacatgtttttccggttcaccacagagaaggcattgagcacagagcgcagggcctggatggctgggggaataacatgggctcaggaaactgccttttccagatccttccaatgctcacctgccctctcatgccaatcacataccccgagagacccccatgctgggccccattttgaggcgtgaatggactcggatcacagttccccacacaacgtcacaggagaaatggccagggacaaactgcattgtggctgccaggtacccacggggcgcacagctctcatcagcagcataatctgggtgagggggagcagggattagaaatgggacacaccaccctctgccctccacagacttctcacctgggaactggcctacttgtcctcactcctccagactcatccctgactattgcagagaaatgatgatcattctgggtaacacgacagggccaggcagatgcatgcccttaggaacacaggtcatatagcacaaaggcttccagaactatctcaaggagacttagagaaggagctaatgagaggtatcaaggcaggcaaagcatgaggaaatcctcaagatcatgccaagagattctgaccctgtcataatatatgtcagtagcactctaacactatgtcctccagggagttgcaacagtaatctcattaaaaccaaaagggtatggctgcttatgcacaccagctgcagaggagggataaactttgtcctgggctttggaagacagaaacgccaataaacccaaagggtagtgtggcagtacacaggagcccatggccacagtacaatgcctccttcgacccttttcaggtttccagggagccttctggtgaatcaaagtggcagttttctcagagaagctgctgtcaagtgtgaacagcacacaggctacccaggaggctgaagtttctgtgtaaaggcagaggctctggaatggaatgctggttgctaagggtttcagggaaaaattctggagagactaaaatgaggaagggctgtgtctgggttctgactggtcttacatcttaggctgccggaagtcattctgaagtaaaattgttcacctgtcctagctcatcttcaatttgcagaagatgcctttgaaaccatgggaatccactaactatggggactctgcttcgatatggaggagatcccaggatgtgctgagagatgcattctcctggagatatcagaaacgtttgtctacagacttgctgagaatgttaaaaataaggagtggtctgattttacttttaaaccagaggagaactgcaaaggaatgttatggttcagcttttcctctatccgtctgggtgagaggtcatcaggagtaagagaagggagaagtgtcgagacttcagttaccatcttgagtggattatcatgttcccttaccatgactagaaatcccaaagcagtcctgtggctgcctgtctggaggaacagccaatcagaaggcaattctactggccttcaggctcctcccctctggatttctcttacttgggaactggcccgcttgttctcactctcccaaactcctcattcctgactatttccctgccagggaaagacggtcattctggttaacaagacagggccaggcagaagcagactcttaggaagacagatcatggcctggtgccccttcagtgatctctcctcttctgtattcttcaacctctccccctcccctggctctttccctatagaatataaacaagctcaagtctct

SEQ ID NO: 2042 - DNA, 2118 bp, Homo sapiens
gatagggtctcgctttatcactcaggatggagtgtagtgccacgatcttggctcactgcaacctccgcctcccgggttcaagcgattctcctgcctcagcatccccagtggctgggattagaggcatctgccacctcacctggctaattttttgggtacttttcgtagagatggggttttaccatgttggtcaggctggtctcgaatgcccgacctcaggtgatccgcccgcctctgcctcccaaagtgctgggattataggcgtgagccaccgcgccctgcccgagtcaggtttttttattgcaaaagatgggaactgattctggctaattaaatcaggaaatgaattttattgaaagcacattgagtaagttacagaatcacttgaaggctgtagaaacaaggcttgggaaaaaagcagaaacagagaccaggtacctagaattacaccaaattccatcacagagccagataggtgaggacagcctcagtgctgctgctgctgaacgcccagtgctgctgcgtttgtcacagccacagctggcgttggatgctggatgccatgctgaccccagtggcaaggcgtctggacactggatactgctgccactgctgcaaccactgtaaagaattttttccatcctcacctccagcctcagaaatcctaagcaaatgcagctgattggtcaagctgccctagctgcctagggacatgcaaaagtgaatattgggcatggttaatgtctgtagtgggatccgtttcctgctgcccaccaggagaagataaattccccaagaaaactgacaaatgacgactacgtacatgttgtcaaagaatccactggaagtctttgacatttgcagattcaacacttgcaattttggaaaggccttggaaagcagtcgttgcgccagacagcccagggaagagcggcagcctgaggacctagggccacctgctgttccctgggattcatgtccttctggggaggagggaggacccaggacaatggctgctgttcatgatctggagatggagagcatgaatctgaatatggggagagagatgaaagaagagctggaggaagaggagaaaatgagagaggatgggggaggtaaagatcgggccaagagtaaaaaggtccacaggattgtctcaaaatggatgctgcccgaaaagtcccgaggaacatacttggagagagctaactgcttcccgcctcccgtgttcatcatctccatcagcctggccgagctggcagtgtttatttactatgctgtgtggaagcctcagaaacagtggatcacgttggacacaggcatcttggagagtccctttatctacagtcctgagaagagggaggaagcctggaggtttatctcatacatgctggtacatgctggagttcagcacatcttggggaatctttgtatgcagcttgttttgggtattcccttggaaatggtccacaaaggcctccgtgtggggctggtgtacctggcaggagtgattgcagggtcccttgccagctccatctttgacccactcagatatcttgtgggagcttcaggaggagtctatgctctgatgggaggctattttatgaatgttctggtgaattttcaagaaatgattcctgcctttggaattttcagactgctgatcatcatcctgataattgtgttggacatgggatttgctctctatagaaggttctttgttcctgaagatgggtctccggtgtcttttgcagctcacattgcaggtggatttgctggaatgtccattggctacacggtgtttagctgctttgataaagcactgctgaaagatccaaggttttggatagcaattgctgcatatttagcttgtgtcttatttgctgtgtttttcaacattttcctatctccagcaaactgacctgcccctattgtaagtcaattaataaaaagagccatctggaggaaataaaaaaaaaaggaagactctatgaagaaacagagaagtctcagaaaaggctaacaattttatatagaggacaaaacagcattaaactcatcagttgcaaagattgcctataaaaggaccttaggatttaaggaaggggcttcttaatg

SEQ ID NO: 2043 - DNA, 2035 bp, Homo sapiens
aggctgatgcacttcctgacactcctcctggaggcccactctccccctgccgcggcctccccatccgccactctgctcttaacctcagcaagttctaggccccttcccagcctgggtgagggggactcagcagccttctctggctctgggtccagcttggccttttcttcccagggaccctggtcattgctgggggtgaccccagatgagccccccaccagggctctggggctgcccatctccggcttcgaaagcatcttctccttccgttcacggattttcttggccacctccaggaagtccaaatcaggatcatgaagaggagcctccgccttgaccaaacagtccctgtccagcttggacgctgctctgggcctctctagcccagccatatcccctgctgtgggtccacttccttcatcggccaccttcctcagcaaggcctctttgttctcaaaccgggccgtgaggtccatggacaagggcctgggcttcctcacccacgtcttctcgggaggggtgggtggcactttgcccactgtggccgctgcgccggggcctggcttctgaggctgaatggactccgtgaaaatggcagacacgggccttctcttcaggcgaggcctgggctccacaagggggcgtgccgtgtcctccacactgctggcctttgagggaggatggtcttggcctgcctcctcttggggtacaggtggttttgtgtcctgagacaggggagctgaccggggaagggtccccgcaggcttctgggtgggcagggcgggcttggcagccacctcaggccgggagccggacacacctagcttggcctcctccgccccctcactaaccgccttccccagagcggggccgcttttggtggtttcgaagagaatcatggtgctggagctgggccgcaggaacacagccttgttgaagaggggcgagctcgtcctcgggccctccccactgcccacctcctgccccaccaagccgggcatcctgttgtccagatcctttgctgctggctcctcagagagccccccagagggggaaggtccagtcgaactgggccgcagagacgggacaggagatttcacgtcctgctccttcgagaagggtttgggggcgagccttggcagagggagtaaccgggccgggctccgcagggggctcttcgcttccaagatccgggctgggggagccccagaggcttcgccggcctggaggaagtaggtcctcgtcagggtctcctccttgcccatctcacccaggcctggcacggccgtcaagggcgttatggagcccacctcgacccgcgtggccatggttatggttgtggattcatgggggttaggaacttcaagaatggagaagcaattgctaaacaaacaaaacaaacaaacaagtaaatttggaaaacagtcagtgtctgggttgaagcagaatggtttagagaaatgggacagagtcctgagccccagattccatacgacagccctctgctgacctcacccggcaggcttgggcctgcctctccccgtctctgagctctggacgaggggagtggactaaacgcccatccctgaagttcgttccagctccaagggtgtagaaaaggcatcaacactctggaggactttcccctgacagctaatctagaggccagcacttaatggcaaaaagcagtgatctctgctacacagataaggaaaccagctcagagaggccaagtaactggagtcacccaggaagcaagaggcgaagtcaggacttaaaaccagagcctgcccacatcccaggtgatcctaatcacaagtgtgtgctaagcatctagcacagagaaggcaagtaacctgctgcaggtcacacagcaatgcagctcaggagtgcctgggagcacaaagctggttagtgaccttggaacccatgccctaggcaccaaccccacccaatcatccctttgtcccttttctttcccctcccccacccttccagatgccataaaaagaagccattctcatttttctcactc

SEQ ID NO: 2044 - DNA, 1963 bp, Homo sapiens
atggatgctctaagtagttgtgtcactcccactgcctcttcctatgcacactgcaactacttccagaatccttcaatgcagtcctcctatccagttgaatttttgccttccaattggccctgcagtactactgatgaaaatacaaagacagaagtaaacctagaggctgtctttcagatagttgatgagttgcattcctcccctaaattggagatggtaaaggtggagcctgttgagaatcagtgcccaacatctccgtcttacagaggccaacacattttagctaattctaacaacagcaatccatgttctgcaagtcaggctagccagctggagccacttactcctgtaggctcagatattatgtcttttgtggttggaacagaacaagcagttgcctgctctctaccacagtcacctgagtacatctataccatccacacagctcagcctgttgaaaatagcacaatacaggagtctgcagccatccagcaagctcatgtcaaactgaaggagcacctaaatcataatccatctccatcttcagtagtatttgtgcaggaagggccaccattcagcacacaccaggtggatgccaacataaaatgccagaccagttcacgtgagaatatcttgccgtcagaacagatgggattcctcatttcagaaatggggcctgctagcaagcctagtgaagacacaggtttagccactccagccagatacagagagcacagaagcaactcacaacaaggaaagtcccctgatcttcatctgctggtggacgtggcctgcaagcaggagcgctttccaaaggaggaagaattaaaagagtgaggaatggatgacaaatgtgacattgtgcactagctgtagctggaggcagactagccttgcacatgacaaactgttgggattttttcagttctgttaaggaaaaaaaagtattttttgtttcgttaattgagaattttgttaattgagaattgggaatttgtatgtactacagtggttcagttcagattatctgccttgacaaactactgaacatctagcagccacgttttttggctgcccagatcccttttaaatgaaaagttctgaccttctgttatagtcaaggagcatctaaaaactgctccatctatggtactaagaataatctgtgtgtgtgctgatttgttgtcttgccactcaaactgtagtcagcacaactttagtggggaattcagtctctctgattcaagtcacagtgtgatccttttagaggagattgtgtgagaaacaaaggcatgtgaggtcaccagcatcacaggtctaaatgcatcaggaattccagggaagaaactctggagaagagctaattttctaagtgattaaccaggaaattctcttacttcctaacccagctgtctcctgaacagggaagctcaggcattgagatgctggagacagacacattcaaattgcactgctaccagacactgacagggatcaagtttgtggttctagcagatcctaggcaagctggaatagattctcttctccgaaagatttatgagatttactcagactttgccctcaagaatccattctattccttagaaatgcctatcaggtgtgagctctttgaccagaacctgaagctagctctggaggtggcagagaaggctggaacttttggacctgggtcataggctgaacctgttatggacccccaaattctgagagttcctgcaacaagaatactgctgttgacactccagtggaaatcccagcagccttgttagtgcacttgaaagtgggagaatgctgaccctgatgacttgtactgattcctgagccttaacactgtgctctttccttctgtatataccatggtcttactttccaactctgtacagatttatttatggaggagctaggtccataaatgttgtaataaatattcctttgatcttgg

SEQ ID NO: 2045 - DNA, 2182 bp, Homo sapiens
aattaccgatagacctaacaaacgagaaaaacagcaacacaataatagtgggggacttcaatactccactgacagtactagaaaggtcaagacagaacgtcaacaaagaaacaatgaatttaaactataccttggaacaaatggacttaacagatatatacagaacgtttcatccaacaactccagaatatacattctattcaacagcgcatgcaactttctccaagatagaccatatgacaggccataaaacaagtctcaataagtttaaacaaattgaaattatatcaaacactctctcagaccacagtggaaaaaaactggaaatcaactccaaaagaaaccttcaaaaccatgcaaatacatggaaattaaataacctgctcctgaatgagcactgggacaagaatgaaatcaagatagaaattttaaaaatcttcaaactgaacgacaataatgacacaacctatcaaaacctctgggatacgggaaaggtggtgctatgaggaaagttcatagccctaaatgcctacatcagaaagactgaaagagcacaaactgacattctaaggtcacacctcaaggaactagagaaacaagaacaaaccaaacccaaacccagaagaaaaaaggaaataaccaagatcagagcaggactaagtgaaattgaaacaaaaaacaaccaatacaaaagataaacaaaaagctggttcttagaaaagataaataaaattgatagaatattagcacgattaaccaagaaaaggagagagaaaacccaaacaacctcactaagaaatgaaacaggagatattacaactgacaccactgaaatacaaaagatcactcaaggctactatgaacacctttatgcacataaactaggaaacctagaagagatggataaattcctggaaaaataccaccctcctagcttaaatcaggaagaactagaaaccacaaacagaccaataacaaacagcaagattgaaatggtaattaaaaaattactaacaaaaaagtctaggaccagatggattcacagcagaattccaccagatattcaaagaagaattggtaacaatccttttggcactatgccacaagatagaaaaagagggaaccctccctaatttattctatgaagccagcatcaccctattaccaaaaccaggaagggacatagccaaaaataaaactacagaccaatatccttcatgaacatagacactaaaatccttaacaaaatacgaactaactgaatccaacatatcaaaaagataatctaccatgatcaagtgggttttataccagggatgcagggatagtataacatacacaagtcaatacatgggatacaccacgtaaacagaattaaaaacaaaaattccatgatcatctcaacagatgatgcattctctgttgaatgctcatcagaacaagcattctccaaaacccagcgtccctttatgattaaaaccttcagcaaaatcagcatacaagggacatacctcaatgtaataaaaggcatctatgacaaacccacagccgacataatactaaatggggaaaagttgaaagcattccctctgagaactggaacaagacaaagatggttcacttttaccactcctcttcaacatagtgttggaagtcctatccagagcaatcagaaaagagaaagaaataaatggcatccaaattggtaaagaggaagtcaaactgtcattgtttgctgatgatattatcatttaccttgaaaaccctaaagactcctctgaaaagctcctagaactgataaaagaattcagtaaagtttctggatagaagattactgtacacaaatctgtagctcttctctacaccaacagcgaccaagtggagaatcaaatcaaggattcaaccccttttataatagctgcaaaaaaagtaaaatacttaggaatatacctaaccaaggaggcaaaaggcttctacaaggaaaactacaaaacactgctgaaagaaatcacagatgacacaaacaaatggaaacatatctcatgctcatggatgggtagaatcaatattgtgaaaacggccatactgcccaaagcaatctataaattcaacacaatccccattaaaataccaccatcattcttctcagaattagaaaaaaacaattctaaaatttatatgg

SEQ ID NO: 2046 - DNA, 2846 bp, Homo sapiens
attttgagcattactcaatacatgttacatagtgcctgacacctgattagcaaactataaatgcttagcccttgacttaaagagagctgagttatgcctggatcttcaatgaatacccttcctatcaggataatcgccgctttgtttctcaagagactgggaatctgtatattgccaaagtagaaaaatcagatgttgggaattatacctgtgtggttaccaataccgtgacaaaccacaaggtcctggggccacctacaccactaatattgagaaatgatggagtgatgggtgaatatgagcccaaaatagaagtgcagttcccagaaacagttccgactgcaaaaggagcaacggtgaagctggaatgctttgctttaggaaatccagtaccaactattatctggcgaagagctgatggaaagccaatagcaaggaaagccagaagacacaagtcaaatggaattcttgagatccctaattttcagcaggaggatgctggtttatatgaatgtgtagctgaaaattccagagggaaaaatgtagcaaggggacagctaactttctatgctcaacctaattggattcaaaaaataaatgatattcacgtggccatggaagaaaatgtcttttgggaatgtaaagcaaatggaaggcctaagcctacatacaagtggctaaaaaatggcgaacctctgctaactcgggatagaattcaaattgagcaaggaacactcaacataacaatagtgaacctctcagatgctggcatgtatcagtgtttggcagagaataaacatggagttatcttttccaacgcagagcttagtgttatagctgtaggtccagatttttcaagaacactcttgagaagagtaactcttgtcaaagtgggaggtgaagttgtcattgagtgtaagccaaaagcgtctccaaaacctgtttacacctggaagaaaggaagggatatattaaaagaaaatgaaagaattaccatttctgaagatggaaacctcagaatcatcaacgttactaaatcagacgctgggagttatacctgtatagccactaaccattttggaactgctagcagtactggaaacttggtagtgaaagatccaacaagggtaatggtacccccttccagtatggatgtcactgttggagagagtattgttttaccgtgccaggtaacgcatgatcactcgctagacatcgtgtttacttggtcatttaatggacacctgatagactttgacagagatggggaccactttgaaagagttggagggcaggattcagctggtgatttgatgatccgaaacatccaactgaagcatgctgggaaatatgtctgcatggtccaaacaagtgtggacaggctatctgctgctgcagacctgattgtaagaggtcctccaggtcccccagaggctgtgacaatagacgaaatcacagataccactgctcagctctcctggagacccgggcctgacaatcacagccccatcaccatgtatgtcattcaagccaggactccgttctccgtgggctggcaagcagtcagtacagtcccagaactcatagatgggaagacattcacagcgaccgtggtgggtttgaacccttgggttgaatatgaattccgcacagttgcagccaacgtgattgggattggggagcccagccgcccctcagagaaacggagaacagaagaagctctccccgaagtcacaccagcgaatgtcagtggtggcggaggcagcaaatctgaactggttataacctgggagacggtccctgaggaattacagaatggtcgtggctttggttatgtggtggccttccggccctacggtaaaatgatctggatgctgacagtgctggcctcagctgacgcctctagatacgtgttcaggaatgagagcgtgcaccccttctctccctttgaggttaaagtaggtgtcttcaacaacaaaggagaaggccctttcagtcccaccacggtggtgtattctgcagaagaagaacccaccaaaccaccagccagtatctttgccagaagtctttctgccacagatattgaagttttctgggcctccccactggagaagaatagaggacgaatacaaggttatgaggttaaatattggagacatgaagacaaagaagaaaatgctagaaaaatacgaacagttggaaatcagacatcaacaaaaatcacgaacttaagaggcagtgtgctgtatcacttagctgtcaaggcatataattctgctgggacaggcccctctagtgcaacagtcaatgtgacaacccgaaagccaccaccaagtcaaccccccggaaacatcatatggaattcatcagactccaaaattatcctgaattgggatcaagtgaaggccctggataatgagtcggaagtaaaaggatacaaagtcttgtacagatggaacagacaaagcagcacatctgtcattgaaacaaataaaacatcggtggagctttctttgcctttcgatgaagattatataatagaaattaagccattcagcgacggaggagatggcagcagcagtgaacaaattcgaattccaaagatatcaaatgcctacgcgagaggatctggggcttccacttcgaatgcatgtacgctgtcagccatcagtacaataatgatttccctcacagctaggtccagtttatgacaaaagttatctgaaggacttgctgtttataatataagcaacatttagctagttgttttgaagacacccagtactaagtaatattgttgttcaagtacatcttattactggaataaaaatgttttttgcttcttt

SEQ ID NO: 2047 - DNA, 2684 bp, Homo sapiens
ttgttaaaaagttccagagagagggcctaactcctgcttggaagggacctcacaccgtcatcctcacgacgccaacagctctgaaggtggacggaattcctgcttggattcatcactcccacatcaaaaaggccaacaaagcccaaacagaaacatgggtccccaagcctggatcaggacccttaaaactacacctaagtcgggtgaaactgttaaattaactctttttatttgcttcttttgtttatccttgcctgtaatgtcttctgtgccttcctactccttccccctcacctctctcacaacaggacgtgttttcgccaatactacttggaaggctggtacctccaaggaagtcacctttgcagtcgacttgtgtatactgttcccggagccggctggtacccacgaagatcatcgcgacctgccagtcatgggagcaggaggtgtcgaccttgcagcaggatttggacactctgggagccaagccagatgtggaagctccaaaggtgctgaaaaaggactccaaaaggttgacttttacctctgtcctgaaaatcaccctgatgctagctgttgagatacctaccagttcgtccgcccggattgggcatgtgtaactttagccacttactctgggggatcaactagatctccaactctgtcaataagtcgtgcttctcgtcccaaatcgtgttctaaaaataattgtaaccctcttaacatcattgtccatgaacctaattcagctcaatggtactatggtatgtcatggggattaagactttatgtcccagggttcgatgttggaactatgttcaccatccaaaagaaaattttggtcccctggagcccacccaagccaatcggacctttaactgatctaggtgaccctatgttccaaaatcaccctgacaaagttaatttaactgtgcccccaccattctcagttcctaagacccagctacaaagacatcaactccaacccagtctgatgtctatacttggtggagtacatcattttcttaacctcagccagcctacactagcccaagattgttggctatgtttaaaagcaaaacccccatattatataggattaggagtagaagtcgcacttaaaggtagtcctttatcctgtcatgcacaacctcatgctttcacattaggagatgtgtctggaagtgcttcttgtctaattagtactggatatgacttatctatttctccttttcaggctatctgtaatcagtctctgcttactcccatgagcatctcagtctcttaccaagcacctaacaatacctggttggcctgcacctcaggtttcactcgctgccttaatggagctaaatcagaacccctcttgtgtgttctagttcatgtccttccccaggtatacgagtacagtggatcagaaggacaactcctcattgctcccccggaattacatcccaggctacgcagagctgccccactactggtttctcttttagccggtcttagcatagctgggtcagcagctattagtacagctgccctagttcgaggagaaactggactaatgtctttgtcccaacaggtagatgctaatttaaataatcttcagtctgccatagatatactacattcccaggtagagtctctagctgaagtagtacttcaaaactgccgaggcttagatctgctgttcctctctcaaggaggattatgcgcagctctaggagaaagctgttgcttttacgccaatcaatctggagtcataaaagatacactccaaaaagttcaaaaaaatctagataggagccaacaagaacgagaaaataacacagcctggtatcaaagcatgttcaattggaacccctggttaactactttaatcactggtttagctggacccatcatcatcatattattgagtttaatttttggcccttgtatattaaattggttccttgattttgtaaaacaacgtatagcgtctgtcaaacttatgtatctaagaactcaatataacccccttgttgtaactgaagaatcaacgacttgattcccctaaaacacaagtggggaaatgaaatgcctaacggtgtttttactttaactcgttactttgaattttgtcctgcttgtctctttaatcacctaaccttgcttctcatgtaaataagactctctctagctaggaaagccagacaaactccaattgaccccttagtttacaagacactaagggctcctcacccaaccccctttcgtgaggagttggcctgggtaaacagatcctcagcatttcaaaggagcccaattaactgataaggtacccacaccaacaatgtatgaagttcccaggaattttctccaagagataacaacatgaaaccttgagtttgtgtccggcatagaccctatatctaattataataaaagatttagaaccttgcacctggtaccgttgctcttcttgtaaccatttgtcttttaagttgtttatcactctgtaactattttgattattttgattcttgcatgtttttacttctgtaaaattattacatttgagtccctctccccttcctaaacctaggtataaaatttactcgagccccttcctcgtggccgagagaattttgagcatgagctgtctctttggcagccggcttaataaaggactcttaattcgt

SEQ ID NO: 2048 - DNA, 1953 bp, Homo sapiens
aagcatggtttattttctgagcaaggagtcatcatgggagaccttttttccttattttgggaggtagatcctcccccaatacctgtaaattgtgccattccaaatcaggattatgaatgctggaaggatgactcttgtggaaccatagggagcttcctgctttggtattttgttatcgtatttgtcctgatgttcttctctagggcttctgtctggatgtctgaggataaaaaggatgaaggcagtgggacaagtacttcagtaaggaaagcaagcaaagagacttcctgtaagcggcaaagcaaagacagtgcctgggatccctcacaaacaatgaagaaaccaaagcagaaccaacttacccctgtaaccaactcagaagtggctttggtcaatgcctatcctgaacaaagacgagccaggcgccagtctcagttcaatgaggtgaaccagaaccaacatgacagtgatactacggagtatggcagtgaagagtctaactcagaagcctcctcgtggaaggagagtgaaagtgaacaccacccatcaccagacagtattaagaggagaaaaatggctcagaggcaaaggaatctgggaagttaccaaatgagcgaaaggcactgcctccactgcaaagccttgagaaccaacgaatggttggcgcaccattcccgacagaagccttcagtaacaccgccaatgaaaagagacagtcaagaggaaagttccatatctgacattaacaagaaatttagtaaattttgaattttatcacgttcttccttcacttgaagccaaatgaaagagatgaataaaacatgaaaaatcaccagagctataggtgaggagacttttacaacaaagtctctctaccaacaaacaaaaacatacttggaacccaagaggtaaaatctcacacaattcttcgttcaaaaaaaaaggccatcacgtgtttatggcaccattggaacaccaaagatctatatctgctatgatttttttatttgaaatagcacaagacagatattttgtgccttgagtgtatatattttgtgccttgagtgtatgtattttgtttatgtctgtaatatgaataagaaagctctttgaaaatgtattatttatgttgagaaaccacttaaatgtattcagatgttttgcttatctgactgactgaatgaactaggtgaagttggttggaatagaattgccccatcctctctaggtttgaccctacaagaactgtattgccacacatgtcagctaggggctggtgtggaagaggagctcaagaggctggaataagatctgattcctggagtagggaggagaggcagcatgacccagaaggcagttggcagtgggctacccacggttgtcatccacaaagtgcatggcaaatgttaaaggaaaaattattctgacacttgttaaaatggccaggaggacttcattcaagactctattgcaatagagagtagaaattgagctccactctgaatacaacaaggacaagtggggatttatagccaggagcaggaggaggacatcacaggatgggaaattaccaaagagagacatcaaacataggagtattcctgataaagtgacctaacaggattcatgctaaaggcaggccaaggacttacacatcaaaagtggagaatgaggccaggcgtggtggctcatgcctgtaatcccggcactttgggaggccaaggcaggcggatcacctgaggtcaggaatttgagaccagcctggccaatgtggtgaaaccccacctctactaaaaatacaaaaattagccaggtgtggtggcacatgcctggagtcccagctactcgggaggctgaggcacaagaaaagcttgaacccaggaggtggaggttgcagtgagctgagattgtgccactgcactccagcctgggcaatagagtgagactctgttt

SEQ ID NO: 2049 - DNA, 3044 bp, Homo sapiens
tttgagccactaaattattatccatcagagtatgctgaaattgataaagccccagatgaaagcccttacattggcaaatccagatacaagagaaatatgtttgccacagagagttatattattgacagtgctcaggcagtacagatcaagaagatggagccagatgaacaacttagaaatgatcacatgaacttgagaggccacacaccactggacacgcaactggaagacaaagaaaaaaaaataagtgcagcacaaactcgactatcagaactgcatgatgaaatagaaaaggcagaacaacaaattttgagagctactgaagaatttaaacaactggaagaagctatacaactaaaaaagatttcagaagcagggaaagaccttctttacaagcagttgagtggtagactacaacttgtaaataaattacgccaggaagctctggatctagaactgcagatggaaaagcaaaagcaggaaattgccggaaagcagaaggagattaaggacctgcaaatagccatagatagcctggattccaaagacccaaaacattcccatatgaaggctcaaaagagcggtaaagaacaacagcttgacattatgaacaagcagtaccaacaacttgaaagtcgtttggatgagatactttctagaattgctaaggaaacggaagagattaaggaccttgaagaacagcttactgaaggccagatagcagcaaatgaagccctgaagaaggatttagaaggtgttatcagtgggttgcaagaatacctggggaccattaaaggccaggcaactcaggcccagaatgagtgcaggaagctgcgggatgagaaagagacattgttgcagagattgacagaagtcgagcaggagagagaccagctggaaatagttgccatggatgcagaaaatatgaggaaggagcttgcagagctagaaagtgccctccaagagcagcatgaggtgaatgcatctttgcagcagacccagggagatctcagtgcctatgaagctgagctagaggctcggctaaacctaagggatgctgaagccaaccagctcaaggaagagttggaaaaagtaacaagacttacccagttagaacaatcagcccttcaagcagaacttgagaaggaaaggcaagccctcaagaatgcccttggaaaagcccagttctcagaagaaaaggagcaagagaacagtgagctccatgcaaaacttaaacacttgcaggatgacaataatctgttaaaacagcaacttaaagatttccagaatcaccttaaccatgtggttgatggtttggttcgtccagaagaagtggcagctcgtgtggatgagctaagaagaaaactgaaattaggaactggggaaatgaacatccatagtccttcagatgtcttagggaaaagtcttgctgatttacagaaacaattcagtgaaattcttgcacgctccaagtgggaaagagatgaagcacaagttagagagagaaaactccaagaagaaatggctctgcagcaagagaaactggcaactggacaagaagagttcaggcaggcctgtgagagagccctggaagcaagaatgaattttgataagaggcaacatgaagcaagaatccagcaaatggagaatgaaattcactatttgcaagaaaatctaaaaagtatggaggaaatccaaggccttacagatctccaacttcaggaagctgatgaagagaaggagagaattctggcccaactccgagagttagagaaaaagaagaaacttgaagatgccaaatctcaggagcaagtttttggtttagataaagaactgaagaaactaaagaaagccgtggccacctctgataagctagccacagctgagctcaccattgccaaagaccagctgaagtcccttcatggaactgttatgaaaattaaccaggagcgagcagaggagttgcaggaagcagagaggttcagcagaaaggcagcacaagcagccagagatctcacccgagcagaagctgagatcgaactcctgcagaatctcctcaggcagaagggggagcagtttcgacttgagatggagaaaacaggtgtaggtactggagcaaactcacaggtcctagaaattgagaaactgaatgagacaatggaacgacaaaggacagagattgcaaggctgcagaatgtactagacctcactggaagtgacaacaaaggaggctttgaaaatgttttagaagaaattgctgaacttcgacgtgaagtttcttatcagaatgattacataagcagcatggcagatcctttcaaaagacgaggctattggtactttatgccaccaccaccatcatcaaaagtttccagccatagttcccaggccaccaaggactctggtgttggccttaagtactcagcctcaactcctgttagaaaaccacgccctgggcagcaggatgggaaggaaggcagtcaacctccccctgcctcaggatactgggtttattctcccatcaggagtgggttacataaactgtttccaagtagagatgcagacagtggaggagatagtcaggaagagagtgagctggatgaccaagaagaacccccatttgtgcctcctcctggatacatgatgtatactgtgcttcctgatggttctcctgtaccccagggcatggccctgtatgcaccacctcctcccttgccaaacaatagccgacctctcacccctggcactgttgtttatggcccacctcctgctggggcccccatggtgtatgggcctccaccccccaacttctccatccccttcatccctatgggtgtgctgcattgcaacgtccctgaacaccataacttagtaagtggaaagacatacaactctctttccacactgcttccatgggtgactgataaggttatatacttaatgagttgacctatttatgactggattatatggcaaagtgtgtttgtaaggctgatgtttagaactgtgcaagcattctcttattaaaattctcttataaaagc

SEQ ID NO: 2050 - DNA, 2799 bp, Homo sapiens
aaagtagtccattcaggcacagtgctaggacaccacctggcctatagcatgtgctcggtcaaagttaactctactgtaattcctgcttgggttgttctggggatacctaatttctccccaccagccacttccccaagaatagtgagtgtgagggtccttacagacagggagatgagagcgtcactcctctttatgaccgtcaaaggtctgcaggtgctcgcccttcgggtctctccagcctcacctggtacccctctcccccttgcttgctttctgcagccatggtggccttttattcctcagacccgttttctttcctgtcccaggaagggcctttgcaggtgctcttcccacagcctgaaagttcctcgggtagctggctcttcctcaccctccaggcctccaggcctcagttcaaatgcctctccctgggagaggctggtcctgaccaccaccgcctcctgcctaaacacagcagattctctctcccctctagaatccaaacaccaggggagcaagagtagagttggtttcattcaccccgggctctccaagcatagcaaacgctctggaagcacgtgatgagtggctgggtgacgaagagctacgacccgagacatggtacccacatgggtacccaccctatgggtagacacgagcctggtgtcaggaggaactgggtttgaatccttcaacaactgtgtggcctttcctctctctgagcgtcgatgtccttattcgtagagtggatgatcataccttccttgcagagccattgcacagatagtgacataggcacacacaatacagtcctggctcacgctcaggagacagtggctgtcaagtcaggagcccgtcctgcagcagcctagccatctggaaggatcactcctcgacatgccgtcaatgcctggcacttggtaagaatgagtttctcacatttctctgaagggatggggtggggggcaggtagagaagaaggctctgggcacctagggtgggaaggaagaagagagagactggccctgagggtagccagtgcctctttgttcattttctcaccagaataacaggggaaatataccatttagaaagaggcagtgaggattaaatgagctagcatatccagcacatagaaggccctccccccatcctcgtccctgaaagcaaactcctcgatttctcagttttgctctggttcccaggctgtgcatggaggcaaacacagggcccttcactcaggccaagctcaggagagcccaggctgcaccgagtccacactctcggctcatttccctcagtccaccaagaggatgacaccaaggccccctcctgtacccctgcctctgccccagcaagtcctactgagatcctgcctgttatgaaatggggctgtcccattgggtgcagggcagatggcaccatgcctctaggagcctcagcatgtgtttccaaggagacagccgtgtgtgtgtgtgtacacaccaacttgtaccatccagttcttcaaaggaaggtggaaagaagggaatgagggtcaggttgcaaatgggatgtaggtggaagacgcacgacgccaggccatgctgctgtttgcctttcacagaaaaaaccagcacagcatctcacggtttgcagacactttcacatgggataactcacttaatcttggcaacaagctcatggcacagatattcttttccgctttttaaagtctggagatggagagagaggggggcaagtcccaaccagtgggttgtagaattaggatttgtggcctgactctgatcataagccccctgctctcttcccagggccacactgccttgcctagaaaggattctagatcaggagtgcccctacgtggggatgccgcctgcccagcccaaagcaaaggccttgttcagcctttgaggtgtatgttccggcttcacaactccctgaaacggaggcctgagtgaccggagatggcaagaaaatgggaggaggtgtctctaagcatggccagggccccatgggagagggaagtatagggtataaaatgctaatcatatgatttagagacacagtgtctttccagaagctggaagagaaagacgttaagagctggagtgagcagtctggaacagaatcaactcttggaaaagtatccttgggagacaggttgggagtgaagacaggaagagtggttttcaggatttagggcccagggacatagaggggaaactgagtcagggcttggctacagacccacccttttgctggaaatggatttctctgccaaaagagaaattgtttgaactcatggcctagagtgaaggccaccaagaagccattgtcgttggaagccaagggagtctgggagctggtcagctctggtggagaaagtctgtttatccagggacaggaaagaggcaaggtctacacgggctgggctgggaggcccaggggcagcacgagggagagggaccccaagtctgggtttcaaggggcatcaatgaactagaaaacggaatgaggctgggtgcagtggctcacgcctgtaatcccagcactttgggaggctgaggcagctggatcactggaggtcaggagtttgagaccagcctggccaacatggtgaaacctgtctctactaaaaatacaaaaattagccgggcgtggtggcgggtgcctgtaatcctagctactcaggagactgaggcaggagaattgcttgaacacgggaggtggaggttacagtgagctgacgttgcaccactgcactccagcctgggcaacagagtgagacactggctc

SEQ ID NO: 2051 - DNA, 1669 bp, Homo sapiens
aaaaagctctggaaatagatcatcaggatggttgcacaatgttttgaatgtaaatgccactgaattgtacaccttaaaagggctcaaatgacgtcatcagcacccaccctcccagatgtgacaatcagaaatgtgtccagacatatccagatgtcccttatggggaagggagaaccgccctggctttgcagactccagctggaacccctgctgcaagcgatggaggagcaacagctcggcaatctggaggcaaggtgggaggtggagaagcacggaaacgaagtctctggctcaaccagcagagaagtttgggaagatgctgatttcatctgtccagtcctaaagcaatgcactaatccaaaattaaacgaaaacaaaaatattcaccaggcaaaggagtgtgaaaaatccccatttctgtctctctctcctcatcagcagtggaaaccggggcttcctagaagaaacgatgcactccccacctccctctgtttgtgctgcagtgaaaactgacatgagagattcattggaacatgtgccctcgttccactctcatcagcccaccgcggggacaggagctgttcatctttttggctctgctcgcagcctccagaacacttatgaggggcaccttgtgggcgccgtggtcggatgaggcccctggggctcttccagaggctggcactctctgcagttgtcgctcacatacctgctcaggccaggccaggccagagtggacaatgtcttcccagcaggccagaccagtctcccaggaggctgaggctgctgtatcactcaccaaaccctctcatctgccggcctgaccctgtgctatgctggaaatagcactcgagccagacgccctccctgacttggacaagggcagtgccctggaaggagagggcacagaagcagctgtttacagaacctccgagggctgcaatggggcaatggggtgtgcaggagagtgaccaggagtccggggcagctggtgacccacccctccaggcattcgtgaggtgtcagaagagggggccccttgaacggggcctgcagagatggctaagagtccatcaggcagatgaaatgatttgctctcttcacacttaccaagcttagaaatggcctccttcatgcatgtgaatgactttattcatgtatatgactcaccttcctcatgcatgtgatgatcttattgtatgtgactcactttcatgcacgtgatgaccttatccatgtatgtgactcaccttcatgcatgtgatgaccttattcatgtaggtgattcaccttcttcatgcatgtgatgaccctatccatgtatgtgattcaccttcttcatgcatgtgatgaccttattcacgtatgtgatttgccttcttcatgcatgtgattaccttatacatgtatatgactcaccttcatgtatgtgatgaccttattcacatatgtgactcgccttcttcatgcatgtgatgaccttattcacatgtgactcgccttcatgcatgtgacgaccttatccatgtatgtgactcaccttcttcatgcatgtgatgaccttatccatgtatgcgactcaccttcttcatgcatgtgatgactttatctatgaatgtgactcattgtttgtcttcccatccccctaaaacataaactcaatgagagc

SEQ ID NO: 2052 - DNA, 1881 bp, Homo sapiens
gttgagaattttctttagtttttattgggttatgtatccttccagaatgggttggttctttgccatttgtatgccctattcatttcttcattttgtgttctttcttgctttttattccctgtatgtgtgtgtttctttttgtcaggctgtaatacatatgcatacatgtttcttcttgatatgggagaacttctatgtggtgctgatgggaaatatttttaatactccactctccttacccaagtttgtttttctcctgagccctagtttgaaagctgtatattgttggagtggagggaaagagaagggaaaagtggtgattcagagagccaaatggggcaatgtggcttttaggctctgctctcttgaagtaccaagtatttcactcttgggtctgcccaagtgcttatgaataaaattcctttgccttgtatggggacatcattcgacctcagacctctcatttctctttgttctgagccctagaatgtgacctgaccttctccttcccaaagcatggagatggttaaaactcactcttgaaatttttttgttgacttttccctgtgttgcttattcattcctcggctctactttttgccattttggagtgtatttctggtgcagtgacttctatgttttgggttgatgctgaattagggagtgatatttaccttgatggtatcataactattgtggattcaaaatatggattaaaagtgaaataccactaaaggcagaagagaatgaaatcatcccacccactgacccgttcccaatctgagcatatggatagggcccaaagcagcaaagaattggacaacttaaaatgacagctctctattctgaggacttgacacccgggctactgacattgttcttttcagttctacaaatgtaacagcatttaatgcaatagaagcaatgaatgaagttacccagagaagcatttaacagaagagaaacctgatggccttatcaatgaagctactaggcaagttgctttggcagatatcattctcattaataaaacagacttcgttccagaagaagatgtaaagaaattaagaacgacaattagatccataaatggactaggacaaatcttagaaacacaaagatcaagaacaataaacatgcagtgattgatttttcttacttcaagtggatgagtgagcaagtgactaaaatcttctgtgaattcttcagtgtatggttcttgccaatgcatctgagaatctagggactttctgaaatagtacttccttgctatgaggactgaagttggattagaatccgtttcaatgaagatcagatgtcctgagtagaattcttactattggagttgatctctctaatgtattagatcttcatgcctttgatagtctctctggaataagtttgcagaaaaaacttcagcatgtgccaggaacacaacctcaccttgatcagagtattgttacaatcacatttgaagtaccaggaaatgcaaaggaagaacatcttaatatgtttattcagaatctcctgtgggaaaagaatgtgagaaacaaggacaatcactgcatggaggtcataaggctgaagggattggtgtcaatcaaagacaaatcacaacaagtgattgtccagggtgtccatgagctctatgatctggaggagactccagtgagctggaaggatgacactgagagaacaaatcgattggtcctcattggcagaaatttagataaggatatccttaaacagctgtttatagctactgtgacagaaacagaaaagcagtggacaacacatttcaaagaagatcaagtttgtacataacactagtggcatttcttatcaaaaggattggataataaaaataagtttctactgggt

SEQ ID NO: 2053 - DNA, 1839 bp, Homo sapiens
agaaagtgctagaattttactttcagaaggaccagtacccgaactacgaccagcgactgaatctggcggagatgctcagcctcagggagcaacagctgcaggtgtggttcaagaatcgccgcgccaaactagctcgggagcggcggctccagcagcagccccagcgcgtccctgggcagagaggccgaggagcccgcgctgcgcccctagtccctgcagcctctgcctccgcacctcagcggggcccctcgggaatccttccagcggcggaacccacgatctgcagcctccaccaggcctggggtggccctgggtgcagagcccagaagggcatcccagctgccctgagtccaggccctggcccgatccctgccccaatcccaggcccagcccagatcccaggcccactccctggctcaattccaggcccaattccaggcccagctcagatcccaagcccgatcccagccccaatcccaggcccaatttcaggcccagtccagatcccaggcccattccgtggcccaatcccaggcccaatttcaggcccagccccgatcccaggcccaatctcaggcccattctcaggcccaaacccaggcccgatcccaggcccaaacccaggcccgatcccaggcccaatctcaggcccgatcccaggcccgatctcagtcccgatcccaggcctgatcccaggcccaatctcaggcccgatctcaggcccaaacccaggcccgatcccaggcccaatcccaggcccaatctcaggcccgaacccaggcccgatcccaggcccaatctcaggcccgaacccaggcctgatcccaggcccaatcccaggcccaatctcaggcccaggcccaattataggcccgattcccagcccagcccagatcccaggcccaggcagactccaaggcccaggtcccatcttaagtcctggccggatgcgaagccctggctcacttccaggcctagccctgattttaggcccaggctcaggcccaggctcaggctcagtcccagctccaatcccaggcccaggatcactcccagccccagcccccttatggcctcagagccccgatgcctccgacttcttgccagacacccagttattccctcacttcacagagctgctcctacccctagaccccttggagggatcctcagtctccaccatgacctctcagtaccaagaaggggatgactctatgggcaaaaaacactcagggtctcagccccaagaggagggtggctctgtgaatgaaaatcactcaggccccaggttattactggatttatagggggcctgtgcctgcaaagttcttcagatcccagagggcctggagtggctgatctacactgctggtgactttctgcagtgaatgcatcaccctttacccaccctgctgcaggtggacatttgctgtcttcactgtgcagctatcacaggtggctctgctgtgaatgtgcctgcctgtcatttgaattgagcctgagcgtttctctgctgggattggagtcgctgctcactgggatatctggcattagtggatgctgctcgagagctttctaaagggcttttcccagggcttctgatggtcagcatcttccccaacacttaggattgtgagactttttaatgtttgtcgatccaatgacttgtggttttgttgtggttgtaatatccatttccctgatgattgagaagttaaaccctcacatgttaattgaaccttagatatcttcataatgtgtatttgtttaccccttttccttcatttatttgaatgtattcttatattctcttggcaattaaagttctgcagacacctt

SEQ ID NO: 2054 - DNA, 2527 bp, Homo sapiens
atcccacgagcatgtgcggggggagggggagcgcttgcgccccgctgccctgtgactcattgtcaccgcttcctatcacacgatcctcggctgaaatagatgcccccccttgcccgccccgccaacccgtagcctgtgccctcgcctccaacccctttaacctggccagcccggcgggaggccggcgcggcaactgcttggggatccctggggaccgtgggctggctacgaatgggtcacgcctctgtcccgcttttcagtgccgcctgggagggttgggtgggctttgcagcttcaagggtaacgtgggcagtcccccatctccagctagactagggcacccgaatttccccagggagccgctctctgacccaccacgcctggacccaggaagtggctgctgagccgccagccggtattgcccagctctggcagtttgccaggagctcggccgtggggcgcggtgtctggcgaagcatgccggggaggaggcagcagggctgggcaggcagggccctgggatccgagggtgtcctggacctgactctgtggagtggaggaggggtgtgggccggagtctccacgtgtttaatctccactcaagcttgcaacagctccaaatgaccacttgctttatagcaatcggtctcagatttatttcaccttggagtctcatgagaatgcactgcatgatgcagaaatagcatgtaagctccgcccgatgggttttaaggcacatttcagaaaagcccaagccttagccaccctaggcaaggtggaggaggcactaagggagtttctctactgtgtatcccttgatggaaagaacaagagagcaagatgtgaagcccaaagacttctccttagtttcttttcaccatcagtcccgggggattctcaggaacattctcccgatatcctgaagctgttggcacctcaccctagattaaaggaaaacgtagagtcaatgactactgaagttaccagccataatctaccaaggttgttacaggacaatctggagctcccacattgttctagtcaggaggaagcagcagccaggggagatggcagcagtctgatggacccagctaaagtgaagggggatggtcagcagcaccacatgaaagaccaggaagaagaggaggagaagtgggatgctacctctccaaaagctgcttccagcaagactggaaaatgccaggaaaagaaaaggaaacattgccagattgaatcccaagaagaaacggggatgcctaataaagcctccaagcaagatcctcccactgatcagggggacaaacctgctctcagtttaccacttgcatctttcgacgcatctgaccttgaatgcgctctatgtatgagattattctatgagccagtcacaacaccttgcgggcatactttttgcttaaaatgcctagaaagatgcctagatcacaacgcaaagtgtccattgtgcaaagacggtctttcacagtgcttggcatcaagaaaatacagcaaaaatgtaataatggaggagctcatagctaaattccttccagaagaactgaaggaacgaaggaagctttatgaagaggaaatggaagaactttctaaccttaataagaatgtgcctattttcgtgtgtactatggcctaccccaccgttccttgtcccctgcacatctttgagccttgttaccgcctgatgattcgtagatgcattgagacaggcacgagacagtttggcatgtgccttggagatcctgtcaaagggtttgcagaatatggctgcatcctagagatcagaaatgttcaattctttgctgatggccgctcagtggttgacagcataggcaagaggcgcttcagggtgctccatcagagccagcgggatggctacaacacagccgacattgaatacattgaagaccaaaaggttcagggagaggattgtgctgagctcatgggattacataactgtgtctatcagcaagcgtcattgtggtttcattcgctcaaattatccctaaagaatcggatactcaatcactttggtcccatgccggagaaagacgccgatcctcagatgaacccgaatggcccagcctggtgctggtggatgttagcagttcttcccttggaaagccgagctcagctccccttcctagcaatgaggtccttaaaggacagactgaatggtattcgacgagtcctggccttcatatcccgaaaccaaaactagtgagtggattgccgaagaggagctcccaccttccccactgccgtcggggggagtcttcttgtaaatatatctaattgcaataatatcttaacagaagggggtgtcaaacagaggcatcagcctgctgttgatcacagagagaaattgagtagaaagaccaaaagaatgtgacctatttgaaactttctgtcttaagatgcttcttgacatgctgcataactacataaacagcagaggtgtttaagagcccagaaaaacataatttgattttaacattaaaatttccaaaagttt

SEQ ID NO: 2055 - DNA, 2383 bp, Homo sapiens
atctccatcttttcctctgtgaactcggctaggtgttaagaggcaggcaggaagcaatggacagggagtccgagtgaggttgtgctctttcctgagagaggggttccgcaagggattggaggcgtctttgtagccaggtacagctttccccttagagatgagcgctcttggagaaatgagaatggggagaaatcgtccgtgaacatggagattggacatccccacgaaggaaaggatgatttaggagacaagagggtcatcatgggaacaaaatttcccatggagttggggatcagagtaggattaggaaaagaagattcccgatgcggggagagccctgtggttagtaataagtgtgagggaaggatggcaccaccagaaacaaaatttccattgagcaaggggcttgaaatgggattagaaagacagaatatttctaggactgtcatgcagaggggtagtttaggagtcgacagtgtctcagcttcacagggaacaaaaccttctctgttgccaggaagaatggggttagaaaatgagagtcttcttgcaggatatacccatgaacggataatacagcctcctttgggcagggtgtgtggaagttcacaggctgcagggagcaggagagctcctttggctagtggccctgaaggggtagaggaattagtgggaaagcctgctttcgttatggaaccaagacaggaaatggaaaaagagtctacctgtgttttaatgaaacccaacacagagattaagcttcctgtggaggtggacattggactaacccaagccgaggggccagatgagactaagaatacagagccccaaatgggcttggtgatagaacctccccaatgccagtttgcccaacaacatgaacagagaaaggaggctggaaacattgaatcaggagtggaacctccagatcgcatcagacccatatactctgggaagttttttgatcggaccccttgctggccaagtgcaggaaaagttattccagttggttacagagttgcaacctgcttgactgaaaaacttcccaggctaattactccacctgaagcaaaaaagtatttcaacttcagatatccacctgctggagtagaaagagtattttacggaagagcaaatgatccccagattgcaccttatttgacacatggaattagatctaaaatttcaatactggcaaacacattgataaacccacagcctattaccacatttcaacagaaaattaaagataaaaaagaatctatatatcttagcaatcgacgagcaccattaggaaaatctcacgatcaagcaccaggattaccaaaaggcatggacacaaccaatacgacatttgggacagcagtcatcaaagaatactctgctaaagatgtggtgaatccaccaaaatcctatgaagaagtatttaaagaaggaaatgaaggacatgatttgtatgttgtttctcacaatgattattatgcaggagaggcaaagaaccgaaagtataacccatcaagtttccataggtgtagtgtgtatggagtaccaacaccacattttaatgatggacgagccatggcaaaatctctatattggctccatgaactacaaatgaaaagaggagctaagtttgtatccaaaagagcagatgatttcaaagaaaagtttcgacataaacttggaagagttttagatcccattgcagaaacaatgaatgttcccccagactgcacatttggagcttgtctccgtcctgaggaatatggagttggtgatctcatccataatagacttccggatgaatatcttcgaggcaaggatagacagcgagccctgattgcagcagttcggcatcacctgaagaaagttaattaccaaaagtttgacactttgctggcagccttcaggcactatgacaaggctggagtgcaatggcgtgatcttggctcactgcaacctccgcctcctaggttcaagcgattctcctgcctcagcctcccaagtagctgggattacaggcacctgccaccacaccctaattttcgtatttttagtagagacggggtttcaccatgttggccaggctggtcttgaactcctgacctcaggtcatccacctgcctcggcctcccagtgttgggattacaggtatgaaccaccgcgcctggccttgatataccttttaatagttaactcaatatgcacaatgtagcattcagtcaccgtaaggagctttttttctgagagggtaataagatgtgggtctagtacagctgtaggttaatttttgattatttaaatcttatattattggatgccacatttaatttaatggaaaaacaaaacacaacagagcaaataaactatgattttctaaatg

SEQ ID NO: 2056 - DNA, 1843 bp, Homo sapiens
attcttctcacaggtctcaggctcctgggaggcaccttataaacacagggcgttcatctaccccactaactggagagaaggaaaacgctgggtaaatagaatggagaggcctggctgtgatcgatcagcctcaagaaaggagacagggtaaaagggagaaagaaaaggaagacccaaagtaacccaggaaatcagcacatagaagagacgaacagcccagcacgaagcgctgactcaccgctccacgccttcctggtccttaatgattggcggctggaagcgggaagaaaagatccgtggtgccatttgattggccaacgaattgctcccttgccattggctcagagggcttttgatgaacagatccagaaaatatgtgaagcgaaacgcccaccgccccttgaggggctgttctagacctttgctcctggtgtcgtatagagcgggggatatttcaagctggaggttcctattgagaattcccagggctcacggctgcagggatgctcctccagtctctccaaaatggttcatttggagagttggggtgactctgtttataatttaaatgtctaattccttcctacatgctaaactccttgaagaatgttcgtgtggcacaacatctttctgccgtaactaaacctgtcgtgcaagaagaaattattaattattattagatacggtctcactcggtcacccaggctggagtgcagtggcgtcatctcggcccactgtaacctccacctcccgggttcaagagattctcctgcctcagcctgctgagtagctgggattacagatgcacaccaccatgcccggctaatttttgtattttcagtagagacgggctttcgccatgttggccaggctggtctcgaacccttgacctcaagtgatctgcccgcctcggcctcccgaagtgctgggattacaggcatgagccactgtgcctggcctcggctaatttttgtattttcagtagagacagggtttcaccatgttggccaggctggtctcgaacccttgacctcaagtgttctgaccgcctcggcctcccaaagtgccggaattacaggcatgagccactgtgcctggcctcggctaatttttgtattttcagtagagacagggtttcaccatgttggccaggctggtctcgaacccttgacctcaagtgatctgcccgcctcggcctcccaaagtgccgggattacaggcatgagccactgtgcctggcctcggctaatttttgtattttcagtagagacagggtttcaccatgttggccaggctggtctcgaacccttgacctcaagtgatctgcccgcctcggcctcccaaagtgctgggattacaggcatgagccactgtgcctggcctgcaagaagaacttaatggatatcggctactgtctttctgcgtaggcagaacaggcgctaagttttttagacgcaaggtcgagatttcatcattgggcatggttttcctgctattccagcttccctacaatcgttacagtcatcttctgggttcacgccaaacctcagtgtcctaggagctatccttttacaatcaccattttagttcctccttataagaatcctgagttcagtgttacgatggtgatgatcctggttttgaaatatacacatcaaggagtgcagagaaacataatgagaactttaaggaattactgtaaccataacacaagtctctgtggtccagaacctagattgggaagcagacatgatggggacctttgcagactcatgtacccataagagcatgcccgttgcatcctcaggggttcccaccaaaataaatttccagttgtgaagtg

SEQ ID NO: 2057 - DNA, 1855 bp, Homo sapiens
gtaaacctcaggacacttactccctgagctaagggggaagagctggatcaccatgaaatatgtcttctatttgggtgtcctcgctgggacatttttctttgctgactcatctgttcagaaagaagaccctgctccctatttggtgtacctcaagtctcacttcaacccctgtgtgggcgtcctcatcaaacccagctgggtgctggccccagctcactgctatttacctatgaatgcattttatcacttaaagatctagcaggtaactgatgatgcactcaaattgggtcaattgaggtgagttttaagaaggaaccaattgcaaaggtatggagacattaaagggacaatattaagaatagttccataccaccagggtttgtattaagaaaatgcagttaccacctctaggcctaaaaaggcaagaggagaagataatttcaaaggaggcaaggagagatagagaaaaagcgagacctgtgtgaggagacagcctgataaggattgtaacccctagtcaaggagcacagccactctgtgacaaaactgcagggagggacctgggaggataagtactccaatctcactcttcttcctccagttactttctggtgcttcctattggccaatagaaggaagccagaggacaagagagcccactgattaaatccatatatgtccccttccaaaggtgcagagcagaatggaataggactgttagtgcatcagctagggaaccaaacaggagacacccagaactaggttatttattctctggtctccaccaaaatggacattgttcagttagataggcgagaaaattacatttccttgacatgcatcctcttcctctccactacattaaagaacacaacattaaaatgtagtgaagggctccactacttactatatcaccctgagtgaattactcctatgtgcccccattaattcatgtgctaaatggggataaagatggaatccactgcatagacttgttgtgagttaaatgacataatccagaaaaagcacttggtacagttcctggcactttgtaacattcagtaccttagcaatgatgatgatgatgatgttgatgattacttccaacccctctccctccagaaatctgaaagtgatgctgggaaatttcaagagcagagtcagagacggtactgaacagacaattaaccccattcagatcgtccgctactggaactacagtcatagcgccccacaggatgacctcatgctcatcaagctggctaagcctgccatgctcaatcccaaagtccagccccttcccctcgccaccaccaatgtcaggccaggcactgtctgtctactctcaggtttggactggagccaagaaaacagtgggctttggcagctggagccaccaggccatctgactctgcacagaggcccagccattcctgattggcagagacacaattcacatgaacaaggccgacaccctgacttgcggcagaacctggaggcccccgtgatgtctgatcgagaatgccaaaaaacagaacaaggaaaaagccacaggaattccttatgtgtgaaatttgtgaaagtattcagccgaatttttggggaggtggccgttgctactgtcatctgcaaagacaagctccagggaatcgaggtggggcacttcatgggaggggacgtcggcatctacaccaatgtttacaaatatgtatcctggattgagaacactgctaaggacaagtgagaccctacttctccctctgcattccactggctctgccatggactatacaagcagataattttccctctattcaaaataaaatctccaaatgaaaaaaaaaaaaaaaaaaag

SEQ ID NO: 2058 - DNA, 1810 bp, Homo sapiens
ccttccttcctttcgccgggcgcgatggagccggggcgccggggggccgcggcgctgctagcgctgctgtgcgtggcctgcgcgctgcgcgccgggcgcgcccaatacgaacgctacagcttccgcagcttcccacgggacgagctgatgccgctcgagtcggcctaccggcacgcgctggacaagtacagcggcgagcactgggccgagagcgtgggctacctggagatcagcctgcggctgcaccgcttgctgcgcgacagcgaggccttctgccaccgcaactgcagcgccgcgccgcagcccgagcccgccgccggcctcgccagctatcccgagctgcgcctcttcgggggcctgctgcgccgcgcgcactgcctcaagcgctgcaagcagggcctgccagccttccgccagtcccagcccagccgcgaggtgctggcggacttccagcgccgcgagccctacaagttcctgcagttcgcttacttcaaggcaaataatctccccaaagccatcgccgctgctcacacctttctactgaagcatcctgatgacgaaatgatgaagaggaacatggcatattataagagcctgcctggtgccgaggactacttaaagacctggaaaccaagtcatatgaaagcctgttcatccgagcagtgcgggcatacaacggtgagaactggagaacatccatcacagacatggagctggcccttcccgacttcttcaaagccttttacgagtgtctcgcagcctgcgagggttccagggagatcaaggacttcaaggatttctacctttccatagcagtgaacgacctgaagaatgcagccccctgtgcagtcagctatctgctctttgatcagaatgacaaggtcatgcagcagaacctggtgtattaccagtaccacagggacacgtggggcctctcagatgagcacttccagcccagacctgaagcagttcagttctttaatgtgaccacactccagaaggagctgtatgactttgctaaggaaaatataatggatgatgatgagggagaagttgtggaatatgtggatgacctcttggaactggaggagaccagctagcccacagcaaccaaagagacttcctcttggcgttcaggaaacacagattctttgtccttttcccaacagcccaggctgttgatacctcagagccttctctttactctccaaagtgaaagggaagcccccgtctctctaactgcatgtcatcaggggtgagcctgcctttcctatcttcacacctgccacctcatgttcacacctatctttctcaccttttttttgagatggagtctcgctctcttgcccaggctggagtgcaatggcacgttctcagctcactgcaacctccgcctcttgggttcaagcaattctgctgcatcagcctcccgagtacctgggattacaggcatgtgccaccacgcccggctaattttgtatttttagtagagacggggttttgccatgttggccaggctggtctcgaactcttgacttcagatgatccatctgccttggcctcccacagtgctgggattacaggcgtgagccaccatgcccggcctctttctcacctttacacctgtcttcttatcctcacatctgttttcacaccttcatccctgtcttcctcatgttcacacttgtcttccccatgttcatagctgcctttcttaccattttggtttgaagggcagtcttctctggcttgtttttttgtttttcccagaaaatcagtattattttttaaataagaaaaacattcctag

SEQ ID NO: 2059 - DNA, 2536 bp, Homo sapiens
agaaatcagaagcgggacagaacctctttctgagcagagtatacccatcattcccaaagacactacttctgttagtagagctgaatttatacaggaagaccaaaatatgttcccacaagattcaagttattattcaatagcaaataaagaactgtatttgccaagaaatggtcagaggcttggtaaagacaaaaatgatctcagttctactttagaaagtttaactaactcattaatggataaacttagtgaatcagatgaaataatgttaaaatcctttttaaaaaacatcttcaatgtttttttcaaatataatcattctgaaagaagaggacaaccagaaaaagaattagaaagactaattcaaccttcttttacaagtgacacagaacaccttgaagaactccaagaggattttgataaagcagacaaattagacagaaaacctattttgagtccaaagttgcgtgtgtttctagaagaactctcagagtcagaagtaaaacatttaaaatctgaattaagtaaacaaatccagcattaccttgtagaaagactttcagaatcaggacatatcaccaaggaggacttaccaaaaatctatcaaaatctgtatctgatgaatgagaaagcagagcagaaagggccaaacagttttcaggggaaatattctgaaactgtgaaagaaatcatgtcttttgtcaacaatttcaatcatcatttcatagataaacatttggaaataaagctgagatcttttttaaaagagattctccaaaactatttcctaaaaaacatttcagaaagcagtttatttaatgagacagcatctgagactatatacccaaacatatcttctctaaggactaaaagtgtctcaatatcttttcatgaactagaacaagatatttcaaaggggagttttggtagaaggtttgaaataaacatgaaatatcctttaagtaaatctctacaaaactatctgatagctttatcagaaaatgaattattacatctaaaagctgatttaagcaaacacctccagagtctttttatagaaaaactttcaaaatcaggactaatgacaaaaaagcaattagaagggatcaaccagcatataaatttgcttaattctagttctataccattaaaatatataaaaacacatttaccttttagagatgactgtcactttgtggagaagcattcagaaaagcaaaataaatattcaagaattgttcaacaaaccactttacaaacggtttctgaggataaacttagagaagcagaattgattcgagagaaagaaaagaaatattttcccttacagaatttaaagggaaattcatctttaattaaggaacagaaaagttattacactaaggaagaagctaaaacaccaagtttaatcaaagtataaccttcttccaatgaaaatatccaggcaagtccattaagtaagtcatcagaaatacttacagatatactgcttaagaaactaaggaaagaacatgtattcacgcagcttcctcaagcagaaaattctgttcataaaacagagattcaagacccatatagttggggtggtaaatcaaaaataactcaatcaaaagcttggtgtgaaaagacactgaaaatgaagtcccttgatagaaaggagcatgtaaacatctataaatggactgttcaggaaaaacctgaagcagtattaacatcgtatccaagaattcctaatgccagaatgccaagggaagatgagtacttaaacagaatcactttcccttcctggcaaagtagcactttaactcatttcaatacagagactggggaaaaatcaaaattagaagaccagtattgtcagacattgaaaggaaataataacaataataaaaagcatttagtaacatttgcacaatacaaaaaagaaatacaaactctttatataaaaccagatgaaatttgcagtgaaaaatgtgccaagttccctgaaatacagtcattccaatataaggttgtagaagatgagaaaaacttgaaaccgcacctcttcccagaattatttaagatagaagatctaaaacccaaggtccgaaaagaaagagaccgtgtcgcccaaccaaaaaagtcatttaacaagatagtcaggatactaccaaccacactgcccaccacaagaattcacctaaagaagtctgttccaaggacactgcttcactggactgcaagaagaactatacatgattgttcagataaatttgaggatttacatgacatgacctcatttacacaccttaaaaaagtaaaatcaagatcaaggcttttaggaaaaagctcagatgatatccataaccatgccagacactctgcaagaccatatactgctccggaggttaacaagcaacgagaaagctacagtggaaagtttacaagtcgtcgaatggtttcatcaggcttagttcatataaatgataaaacatcagattatgaaatgcataaaatgcggccaaaaaaaattaaaagaggatattgaaaaatg

SEQ ID NO: 2060 - DNA, 1943 bp, Homo sapiens
gtattccccgctctccagcagcttcctagctgggttttcacctcagccagcgctcatgctcaacctaggcagggcggggcaggagggcctagcgggaggcggagcgagggtcggagggtgacgctccggacttctgctaggtctgagacgcgccggcctcccgctgctgctccggagaagcggcgcctcctccccgccaggaccccgaggcggggggttcccgccttctcttctgagcgcctcttcccgctgcgcccgcatcagtctgggcctggcccagggtccccggtggagacgtgtttttttctccaaccaccgtgcccctctgtttaaaagcagccagtcaacctttgtgtcctttctccagaaggaaaagcatctcagctgttgtggaaaagggccccagcgtcctcttgtcaccgacagggcgattgcagtgcgttccggtcattttttccaggacactttctgtcttcatgacaggaacatcgagaagccaaggctagtggctgggttactgatggattactgatggattcttctcaggcaagtggaaagcagacctaacttcaaaatgttatgcttgtagccatcatcggtagccttaccttgttatcgtgtattcaagcatcttaaagaaatgatggtcctgctcaggaaataactccccagaacatcaaaggagatggtacttagctgaagctggcatgtatttaatggtttagcacttagtgacctttgaggatgtggctgtggactttacccaggaggagtggactttgttggatcaagcccagagagatctctacagagatgtgatgttggagaactacaagaatctcattatactagggtctgaattattcaaacgtagtctcatgtctggattggaacaaatggaagagctgaggacaggagtgacaggagttctgcagggagagaagcaatactgcagagaaactgtatgactctaaccattctggaaaagtcttcaatgaacacccatttcttatgactcacatgataactcacattggagagaaaacttctgaggataatcagagtggaaaagccttaagaaagaactttcctcatagtttttacaagaaaagtcatgctgaggggaaaatgcctaagtgtgttaaacatgaaaaagccttcaaccagtttccaaatctcactaggcagaataaaactcacacacaagagaaattgtgtgaatgcaaagactgttggagaacttttcttaatcagtcatcccttaagttacatataagatctcacaatggagacaaacactatgtatgtaaggaatgtgggaaagccttcagtaattcctcacaccttataggacatggaagaattcacagtggagagaagccctatgtctgtaaagaatgtggtaaagctttcactcaatccacaggacttaaattacacatcagaactcacagtggagaaaaaccatataaatgtaaagagtgtgggaaagccttcacccattcttcataccttactgatcatacaagaatccacagtggaaagaagccctatgtatgtatggaatgtggaaaagccttcactagatccacaggacttattttacacatgcgaattcacactggagaaaagccatatgaatagacgaagtttcatcatgttgtccaggctggtgtcaaactcctgacttcaggtgatccacccaccttggcctcccaaagtgctgggattatggacgtgagccaccacacccgcccttgaaatactgtttctaaaaggtatatggaagaacaataggcaaggataatcaagacccagctgataaaaaaggtggaagaacttgccctaatgaatatcaagattaaaactatagtaattaagatgctgttgcattgtacacagacaactagactattggtacaaaatagtctggaaatagtcac

SEQ ID NO: 2061 - DNA, 1971 bp, Homo sapiens
acaataggaggcggcggcccagcgaggatccgcgggagctgcccggcagggcggagcctcccctcgcagatatctcccggggccaattcagcatctctacctggccatcctaacaaggtgatttgtgaaagggtgagacttcagagcctgttccctctcctcccaagtgatcagaacactaccgttcaagaggatgctcacttcaaagctttcttccagagtgaagatagtccaagtcctaagagacagcgcctctctcattcagtctttgattatacatcagcatcaccagctccctcaccaccaatgcgaccatgggagatgacatcaaataggcagcccccttcagttcgaccaagccaacatcacttctcaggggaacgatgcaacacacctgcacgcaacagaagaagagtgaagatagtccaagtcctaagagacagcgcctctctcattcagtctttgattatacatcagcatcaccagctccctcaccaccaatgcgaccatgggagatgacatcaaataggcagcccccttcagttcgaccaagccaacatcacttctcaggggaacgatgcaacacacctgcacgcaacagaagaagtcctcctgtcaggcgccagagaggaagaagggatcgtctgtctcgacataattccattagtcaagatgaaaactatcaccatctcccttacgcacagcagcaagcaatagaggagcctcgagccttccaccctccgaatgtatctccccgtctgctacatcctgctgctcatccaccccagcagaatgcagtcatggttgacatacatgatcagctccatcaaggaacagtccctgtttcttacacagtaacaacagtggcaccacatgggattccactctgcacaggccagcacatccctgcttgtagtacacagcaggtcccaggatgctctgtggttttcagtggacagcacctccctgtctgtagtgtgcctcctccaatgcttcaggcatgttcagttcagcacttaccagtaccatatgctgcattcccaccccttatttctagtgatccatttcttatacatcctcctcacctttctccccatcatcctcctcatttgccaccaccaggccagtttgtccctttccaaacacagcaatcacgatcgcctctgcaaaggatagaaaatgaagtggaactcttaggagaacatcttccagtaggaggttttacttaccctccatcagcccaccccccaacattacctccatcagctcccttgcagttcttaacacatgatcctttgcatcaggaggtgtcctttggagtaccttatcctccatttatgcctcggaggcttacaggacgtagtagataccgatcccagcagcaataccacctcccccttatcatcccagcttactgccatatgtgttatcaatgcttccagtgccacctgcagtgggcccaactttcagctttgaattagatgtagaagatggagaagtagaaaattacgaggccctgttaaacctggcagagcgactgggagaggcaaagcctcgtggactgactaaagcagatattgaacaacttccttcttatcggttcaatcctaacaaccaccagtcagaacagactttgtgtgtagtatgcatgtgtgattttgagtcaaggcagctacttagagtcttaccctgtaaccacgagttccatgccaagtgtgttgacaaatggcttaaggcaaatcgtacttgcccaatttgccgagctgatgcttcagaagtgcatcgggattcagaatgaccaacctaagaagcacaaatttagtttgggtgttcctcatcacatgtatatacggactatccattgaacttaatctgtgtggcttccagccctccctttaccaaaagggtcaatggacctttctttgcactgtgtgacttaatcaactataaaagcttacaattagtcttcac

SEQ ID NO: 2062 - DNA, 1873 bp, Homo sapiens
gaatgcgtagtcccagcctcagcacaggggagccaccttgaagctctcaaatatcactgttgtgaatacagagagggaaaaccaactgtaacgtgccacccaaatgtaagttttactcatattttgatgttaggatggatagcttggaaaaagttggagggtacggcctttactatgaggcatctatgaaggatcaggaatggatgtagacaaggaactaggaatggaaagtgttaaagctggagcctctggaaaaccagaaatgaggctgggcactcaggaagaaacaagtgaaggtgatgctaatgaaagctcattactagtcctgtccagcaacgtgcctctcctggccctagagttcttggaaatagcccaggccaaagagaaggcctttctccccatggtcagccacacgttccacatgcgcacagaggagtctgatgcctcacaggagggcgatgacctacccaagtcctcagcaaacaccagccatcccaagcaggatgacagccccaagtcctcagaagaaaccatccagcccaaggagggtgacatccccaaggccccagaagaaaccatccaatccaagaaggaggacctccccaagtcctcagaaaaagccatccagcccaaagagagtaacatccccaagtcctcagcaaaacccatccagcccaagctgggcaatattcccaaggcctcagtgaagcccagccagcccaaggagggtgacatccccaaggccccagaagaaaccatccaatccaagaaggaggacctccccaagtcctcagaagaagccatccagcccaaagagggtgacatccccaagtcctcagcaaaacccatccagcccaagctgggcaatattgccaagacctcagtgaagcccagccagcccaaggagagtgatatccccaagtccccagaagaaaccatccagcccaaggagggtgacatccccaagtcctcagcaaagcccatccagcccaagctgggcaatattcccaaggcctcagtgaagcccagccagcccaaggagggtgacatctccaagtccccagaagaagccatccagcccaaggagggtgacctccccaagtccctagaggaagctatccagcccaaggagggtgacatccccaagtccccagaagaagccatccagcccaaggagggtgacatccccaagtccctagaggaagccatccagcctaagaagggtgacatccccaagtccccagaagaaaccatccagcccaagaaggatgacatccccaagtccccagaagaagccatccagcccaaggagggtgacattcccaagtctccaaaacaagccatccagcccaaggagggtgacattcccaagtccctagaggaagccatcccacccaaggagattgacatccccaagtccccagaagaaaccatccagcccaaggaggatgacagccccaagtccctagaagaagccaccccatccaaggagggtgacatcctaaagcctgaagaagaaacaatggagttcccggagggggacaaggtgaaagtgatcctgagcaaggaggactttgaggcatcactgaaggaggccggggagaggctggtggctgtggacttctcggccacgtggtgtgggccctgcaggaccatcacaccattcttccatgccctgtctgtgaagcatgaggatgtggtgttcctggaggtggacgctgacaactgtgaggaggtggtgagagagtgcgccatcatgtgtgtcccaacctttcagttttataaaaaagaggaaaaggtggatgaactttgcggcgcccttaaggaaaaacttgaagcagtcattgcagaattaaagtaaacatgtattctg

SEQ ID NO: 2063 - DNA, 1795 bp, Homo sapiens
aaaagggcgccacgagtcggcattgtcaggcggcggcaccgcgcgggacggagcttggctgttggtcggtgggttcccgtgcggcggcggccaaggaggaggagacacagttggagcagctccgtgggctgactggggcgaggcctcagcagcgcgagcttgagtgcggccgagcctgcggcgccttcccctgcgggtggggacgagcgggccccgcggcgtcatcggcggcgaggagccgccgcgcctcggcctagcatgtcggaagcgggcgaggagcagcccatggagacgacgggcgccaccgagaacggacatgaggccgtccccgaaggcgagtcgccggccggggctggcacgggcgccgcggcgggggctggaggcgcgaccgcggcgcccccgagcgggaatcagaacggcgccgagggcgaccagatcaacgccagcaagaacgaggaggacgcgggaaaaatgttcgttggtggcctgagctgggatactagcaaaaaagatttaaaagactattttactaaatttggagaggtcgttgactgtacaataaaaatggatcccaacactggacggtcaagagggtttgggtttatcctgttcaaagatgcagccagtgtggagaaggtcctagaccagaaggagcacaggctggatggccgtgtcattgaccctaaaaaggccatggctatgaagaaggacccggtgaagaaaatcttcgttgggggtctgaatcctgaagccactgaggaaaagatcagggagtactttggcgagtttggggagattgaggccattgaattgccaatggatccaaagttgaacaaaagacgaggttttgtgtttatcacctttaaagaagaagaacccgtgaagaaggttctggagaaaaagttccatactgtcagtggaagcaagtgtgagatcaaggtggcccagcccaaagaagtctatcagcagcagcagtatggctctgggggccgtggaaaccgcaaccgagggaaccgaggcagcggaggtggtggtggaggtggaggtcagagtcagagttggaatcagggctacggcaactactggaaccagggctacggctaccagcagggctacgggcctggctatggcggctacgactactcgccctatggctattacggctacggccccggctacgactacagtcagggtagtacaaactacggcaagagccagcgacgtggtggccatcagaataactacaagccatactgaggcggcagcaggagcgaccaactgatcgcacacatgctttgtttggatatggagtgaacacaattatgtaccaaatttaacttggcaaactttctattgcctgtcccatgtgcatcttatttaaaatttcccccatggaaatcactctcctgttgactatttccagagctctaggtgtttaggcagcgtgtggtgtctgagaggccatagcgccatcatgggctgatttttattaccaggtcccccagaagcaggtgggaggctctgcttcctgctgccgctctgcagcctggacctgtggaccctggttgtaaagagtaaattgtatcttaggaaaccagtgtcacctttttttcaccttttaattttatattatttgcgtcatacatttcctgtaacggaagtgttaattttactgtactttttggtaccttttgggaatctaatgtattgtaaggtattttacacgtgtcctgattttgccacaacctggatattgaagctatccaagcttttgaaataaaatttaaaaaccccc

SEQ ID NO: 2064 - DNA, 1880 bp, Homo sapiens
agatcctgtgctgggcctcccaactggtgcatggacaggctgaggaagcacaggccgggcagagccctggccaagaggggcgtcttgcgcccacactcacttggcaagtttctgcagcacctgctcgcactccagctgcttccgctcaagctgctcagcatagggcactgtccatagaggggtcaccacgtcggccactcgtgttactggtggctcactctcaccctcctgtcgcctcctcctggccatggggtcggccttgggccgggccaggcgcacactgagtgggcggcctttccagagggcaccatgcaaaacgcgcagggccttgtccctctctgcagcgctgcggaatgtcacaaaggcgcagggtggttgcccaaagagtttggttttgtggggctgcagaccaaagcggcccaggaagcgccggacgtcgctgaagctggcgtggcgaggacactcatgaggaccatgatacttccactgagaatacagacgagtccaaccatgaccctcagtttgagccaatagtttctcttcctgagcaagaaattaaaacactggaagaagatgaagaggaactttttaaaatgcgggcaaaactgttccgatttgcctctgagaacgatctcccagaatggaaggagcgaggcactggtgacgtcaagctcctgaagcacaaggagaaaggggccatccgcctcctcatgcggagggacaagaccctgaagatctgtgccaaccactacaacgtgcctctgaactcagagcaggcccgcagcgaagcttagagcacacgggggtgtggagtcagccagacgggccctgatgggaggacgcagcgcccaggctgggctcgggacgaggatcacgccgatgatggagctgaagcccaacgcaggtagcgaccgtgcctgggtctggaacacccacgctgacttcgccgacgagtgccccaagccagagctgctggccatccgcttcctgaatgctgagaatgcacagaaattcaaaacaaagtttgaagaatgcaggaaagagatcgaagagagagaaaagaaaggtgacgtggtgccatgggttggggggcttctttgcagactcactctgcatctgactatacttccaggcgggtgctttttctgtctgccagataaacattccagggtgctgtggccgcctcacgtatccagagtgatgcagctccctggggacacaggtgcttcctggggagccctgagcacttgtcagtgttgctggcctcagtccaattgggcaggcattggagtccgggcactgcctggagctcaccagaaggtgctttatgatggtcctcggtttgtctctcagagggcttggtcacctctgccatgaggctggactgcagctgtggtggcaagtgaccagatgtcactgagcagcctgaccatggtctaggcagtgcttgagtgcatccacctggcttcctttcgtcactgaatttcaagaagacagactccaggaggcggcttggccaggcaggagtctgtcccgagggcgggcaagccgctgtgggtgggtgacggcacttgggaccagcctggcgagggccatgtgcttgaatgcaccgtgcttctgttttctcactgtgctgcttgtgtttttagcaggatcaggcaaaaatgatcatgccgaaaaagtggcggaaaagctagaagctctctcggtgaaggaggagaccaaggaggatgctgaggagaagcaataaatcgtcttattttattttcttttcctctctttcctttccttttttttaaaaaattttaccctgcccctctttttcggtttgtttttattctttcatttttacaagggacgttatataaagaactgaactc

SEQ ID NO: 2065 - DNA, 1978 bp, Homo sapiens
acgtgtcaactctgcttaattaagcactttgatgatttaagaaatcttggaaatccttttgtactattgctcattcatacttgttcatcaaagcctggagtccttaaggacagaatttacctctaaacagaaagatggaaactaaagtacatttattctgccaggcagaggaaaatattgacttattagatgatggctctaattcttttgcaactgacttgtcatcaggaactattaaccacaagaaatacatcaagttttctaaaacaatagagaaggaaatttcaccggaaattaggagtttgagcccagaatataaaaaaatatttgaaacatcaataatcttttgtggagaagaaaagtcctctgatttttcaggagaaaaaaaagttgggagaaagagtttacaagtacaacagcacagtaaaagaactgagattatccctccttttctgaagctgtcaaaggagaaggtgacaaggaaagaaaactctttatgcaagttgccgaatcagtacagcgttcacaagacttcatcacctctttgtacatcttctgcaattactcgggaaaaggaaatgctgtctaacctctacatgacattatatgatgaagtaacccatggatatttacactcaaaagaattaagtgcattccaggatgccttgaagattttctgtaggataaaaggtggtcgagtttcaactgatgacgtgtttgctgttttggatagcatgggtatccctataaaccgtgaaattttagaagaagtgacaaaacatacctatattgacagtaaccacatggtggatattggggatattatatttactttgaatgagctacaggaacagtatgaggatgtttcaattacagaaggatcacctttgaatgaaattacttcagacagaaagttatcaagtgtagcaggatgctatctaaaatataagaagaaaaatagtttgtcttccaaactccctgaaccttcaatatccaaaaagttaaataaaaaaagcaaccaatattatagcaaaattatggagaatgatgaccttgaatctaaaagaccaaaaaatacttggcaaataagaaaatttctgggtggggttggcagcagtaatgtaggagtccaagaaccatattcaaagaatggcataaactttaaaaaacattcagagaagggtgaaattcatgactcaaagtctaaaccacaaagcttgaagagtagtacaagcctcagtaagtctctggataaaagtgatatttctagtatcccaaaacttcagaagccagctgtaagaaagcattccagtctccaaaaacaggtttcgtctacggaaaaaactgcaattagtactctggaaaacttctgtgaagctatcagtaaacttcaagaaaattacattgcagcagaagaacttcagtctattttgccttcaacaggaattaatttattagatgaagaattccagaagattgtgacagacactagtagaaatgagaatggaatggtggagttagatgactttgtaaatgctctcgccaaggagcgaagttttcctgaatgcaatgcgttgcctggtgtcattaaagccattgataaaattaaagataaaaatgtggattatgaggatctaaatacttgtcttcaaaatttcggtatttacctttctaagccagaatttaagaagatcacagaactgactgaagctggtgaaacaaaaaagtgaattttaaagaattcattgatactatgatgagcaacacggaatgcttctctgaaaaattagtattgcctgatgctattgaaaccctcgacgatctcagaaaggagacgatgagtgtttctgacctgtggaatactctgtctagtttgaatagtaatttaaaaaaggatgaatttctagctgcattggaactagtgacagttgatggtgagtgttacaaatactaaaattaaaaagtataccaagatatt

SEQ ID NO: 2066 - DNA, 1891 bp, Homo sapiens
actcagcccgattccaaaagcccagggggtgggcctcgcccttcctctccctccaggtttaattatctgaagagtcttggactttcatttcttgttttttgcttgtttgcttgtttgtttgcacctggttgatgtataagtcttggactttgggagacctaaaagagaaggaaggtgttggcaatatccttgaagagactaaaagaactcagaacaacactgaacaagccagcagagccatcaactcacccctacagtctccatacacagactccatgaaagcattggccatcagctctcactggtttctgccccaaattcacacactccctcctatcaccaaagccacccgccaccgctggcctcctgcatgctgtgggaggagaggagggcagacaacgttgcctcccctgactcccatcgtgcgggcttgcgagtccatggagcgcagttgtccagggaactatccgatgcagcatgaggggaaggtgatgcagcggcatcccaccttgagatgagagaaagctgttctgggcttccagtgattggcagctgaggtcactcctttgcccatacccccgccccgagactgtttccagtgccccaagttcacctcaaggatcattgcacagcagaagtgagttttacttaggttgagacactcacatatagggaatgcagaataaatcccatcccttcctcagccagcaggggcaaggccctgagaaggagaacatcgtgtaggtacaggccaaccccaggggcctctcacagggccctcctcatcatcactcacctctctattcagcaaacactcagtgagacaaccatggaccctagggatgcaacagtgaaggagacgcagcctttcaacacctggcagggcagagacacttcaacagtcattgccagccccagtggacaatgtaaggaggccaccagccaagaaatgctgtcagtgcctggaagctggaaaggcaatgaaatggattttccccagagcctccagggagaatatggcacagcttctaccttgattttcacccagtgagacacattttggatttctgacctaaagaattgtaaggctgcctggatccccagagtttgtctggaaagcctcttgagatggggttatgtgctccgaggatcccaggaggaaggatggggcaagagcagacaaacctatgcctctgcagcagctgtaccgttgtcctgggagtgagccccagccgtggctcaaggcacacgtgcctccagaggacaatctgggatgctcaggggacagagaggcagagggactatcagggtgaagctgtctttttcacttgtttggcactcagcccagggcctggatttatcctgcacaaaatgaacagtgcagggcccttcatctggggaaagcctaacagtggcacccaagcagagctaggaggtccaggtcctccagtggcagggagggagggagctcctttccaggtactttctttcctagatagaggatcttggtgactcatctcccagttcaactgtaaaggctaagggcctccttgaagtttccttccttatgaaaatgtccatagcaagtttgtcacttaggaatgtttttcaatgataggaaacagaaaagccaactagtaggagatgaaataagttgagatttttttttttaatagcaagaagtctggatattgtcagtagccggcattggtttaggacacaataatattggggatgatgtcctgtatttttcttggcctttttcttagagtcacaatgtggatgccatggctcaaggtatcacatccctattcaaggcaggatataggaggaagggatggtgccagatacatctgtcccatttattaaaaagcaagcttctccaaaaccc

SEQ ID NO: 2067 - DNA, 2422 bp, Homo sapiens
ccccgccgctcggggcaggcgcgccgatggcgtttctgaggtgacgccgcccacaccgggcttctccgggggcggaggaaacacctatgaaccctccggcagccttccttgccgggcgccagaacatcgggtcagaagttgagatttccactatcgagaaacaacggaaggagctgcagttgctcattggagaattaaaagatcgagataaagagctcaatgacatggttgcagtgcaccagcaacagcttctttcatgggaagaggatcggcagaaagtgttgacactggaagaacgttgcagcaaattagaaggtgaactacataaaagaactgaaataatcaggtcactcacgaagaaggtaaaagctcttgaatccaatcaaatggaatgccaaacagctctccaaaagacccaactacagcttcaggaaatggctcaaaaggcaacgcattcttctcttctctctgaagaccttgaggctagaaacgaaactctcagcaacacgttagtggaactttctgcccaggtaggacagctacaagctcgagaacaagctcttacgacaatgataaagctaaaggacaaagatattattgaggcagttaatcacattgcagattgttcgggtaaatttaaaatgctagagcatgccctacgtgatgccaagatggcggagacttgtattgtgaaagaaaagcaagattataagcagaaattgaaggcacttaagattgaagtcaacaaactaaaagaggacctcaatgaaaagacgacagaaaataatgagcaacgagaagagatcattcgcctcaagcaagagaaaagttgcctgcacgatgaattgctttttactgtagagagagaaaagaggaaagatgaattgcttaatattgcgaagtcaaagcaagaacgcacaaattcagaactgcacaatctgagacagatttatgtaaaacaacagagtgatctgcagtttcttaatttcaatgtggaaaattctcaggaattaatacagatgtatgactcaaagatggaggaatcaaaggctctggactccagcagagacatgtgtttatcagaccttgaaaataaccacccaaaagtcgatattaagagggaaaaaaatcagaagtcactgtttaaggaccagaaatttgaagccatgttggttcagcaaaataggtcagacaagagctcttgcgatgaatgcaaagagaagaaacaacagatcgatactgtgtttggggagaaaagtgtaattacgctgtcatccatattcaccaaagacttagtagagaaacacaacctcccttggtctctgggaggaaaaacccagattgaacccgaaaacaaaattacattgtgcaagatccacacaaaatcaccaaaatgtcatggcactggggttcagaacgaaggaaaacaaccctcagaaacacccactttatctgatgagaagcagtggcatgatgtcagtgtttacctgggcctgaccaactgtccaagttcaaaacatccagaaaagctggatgtagaatgtcaagatcagatggaaaggtccgaaatctcatgctgccagaaaaatgaagcctgtctgggcgaaagtggcatgtgtgactccaagtgctgccacccgagtaacttcataattgaagccccaggccacatgtctgacgtggagtggatgagtattttcaagccttccaaaatgcagagaattgtccgcctcaaatctgggtgcacctgttcagaaagcatctgtggcacacaacatgactccccggcaagtgagctaattgccatccaagattcccactctttgggttcttcaaaatctgccttgagagaagatgagacggagtcctcttccaataaaaagaactcacctacgagtttgttaatctacaaagatgcaccagcattcaatgaaaaggcttcaattgtgttaccctcccaggatgatttctcgcccacgagcaagctccagcgtttgctggcggaatctcgtcagatggtgacggacctggagctgagcacactgctgcccatcagccatgagaatctcactggcagtgccacaaatatttctcatctatgtggaaggcagaaagcagacaccaatactgaatgaatacttaaccgtaaaactgaaagaggattctagttcttcataaacggcacttaattccagctgggagcagaactagaaagttaatttttaaacatctacacttcattttcaagttaaccatttttgtgctgaagaaatattttcatgtgagtaaaataaggaaggaacgttcatcactttaaactgaacctggcaagttaatttcctcgggaatggggatgtatttttttaagcattgcagatatcaaagttctattgtgctgaataaatgcccctttgttaacagg

SEQ ID NO: 2068 - DNA, 2809 bp, Homo sapiens
ataatgaatcagacatcacagaagaaaggtgagaactgggcccttcagtgactgatgggatgctcttgccgcccaggggagcccctccagactgtccttgcccacctggctgcactggcccctgtatgccaacccagtgggtacaggttctgggggacctggacagatgccgctacctctagccgtggctggacgatgttatgcagccaagcacagcacgtgctgctctcgggaagcccggggcctgaggtcattgcagtggggaggtgggcacagggtgctccccagacctccctcctccaagtagagctgaaatgggaaggaacccctgggacagcccctgccctgctagatctttgcctcagattgctgctgtggccaggcccaggatttccagccctatggctctgagtcctcacatgctgggggcccaggggctctggacacactccatccagggatcccttcctgccatctgggcggcaaccatggggacaaagggaggaagcagagtcctgtttccttgccacttgtccaaggcacttccccatcctgacagcggcccccacccagcccaggatcctgggttgtggtctcaagctcacttcccattatctttggggctggggctgacatcaggaggacatctgactggtggatggagccagcctgggaacatcgcagctggggcagtgcctagggctctcccttcccagggagacatggagaagggggttgagggagggcccttccctagccgctgtggcaactccagtgagctgttctgggcaaagtgtggcccaagtcggcagccccagccctgcagtgctggggacgctgacaggacacgggaagaggccatgctctccctcgggacctgctgttccatgtgtcccaagccctcctgctttccagatggcccctcaggaaaccacctttccagggcctctgctcccttgggcgctcgctgggtctgcatcaacggagtgtgggtagagccgggaggacccagccctgccaggctgaaggagggctcctcacggacacacaggccaggaggcaagcgtgggcgtcttgcaggcggtagcgccgacactgtgcgctctcctgcagacagcctctccacgtcaagcttccagtctgtcaagtccatctctaattcaggcaaggccaggccccagcccggctccttcaacaagcaagattcaaaagctgacgtcccccagaaggcggacctggaagaggagcccctacttcacaacagcaagctggacaaagttcctggggtacaagggcaggccaggtaaggcttgggtgttcctggggtgcaagggcaggccaggtaagtcttgcctgcaccctaagggccccatgactacatttactaggctcacgccctgcagtcagccaactgctctgcccctagctccaggggcctgtctccagggctcatgatagcagatgacggccacgctctacccatcggtgggcgctgtcttcctcccttcccctgggggtcctgcagagtacctgtgctgacctgagcccacgaggggggccagtagcagcccctaaaccacttcctcagagaaaagtaaagtaatattcttaccaagagaaggcttgctgcccctggccacagcctgcctttggagggcactaggccagcaggtcagagtaggaacaggttctggtgacccctgagtttgcgggactgccctgagatgctacagagcgcacactttcagcagcgcaaccagcaggacaggctcctgcatctgcacatcccgagaccaggcctagagcaagatgccccactgggtgtggggtcacgaccaagagcagcctggcagctagctggtcacccactgaagcccatctgacccttagggcaccttcagaggggagaaagggacaggccccagtcccagagacccccacctggtgcccagagcaccctgctcagtgggagaggggaaccaggccctcttccccacattggcctgggcgctgcctggggaggtatgctgggtgggtggttagacgcacctgggcaggtcacctctggctgctgcaatgactgtttcagaaaggagaaagcagaggcctctaatgcaggagctgcctgtatggggaacagccagcaccagggcaggcagatgggggcgggggcacaccccccaatgatcctgccccttcccctgcgaaagcccaccacacttaggcagtgcgaagtgctcatccgcgagctgtggaataccaacctcctgcagacccaagagctgcggcacctcaagtccctcctggaaaggagccagaggccccaggcagccccggaggaagctagctttcccagggaccaagaagccacgcatttccccaaggtctccaccaagagcctctccaagaaatgcctgagcccacctgtggcggagcgtgccatcctgcccgcactgaagcagaccccgaagaacaactttgccaagaggcagaagaggctgcaggcaatgcagaaacggcgcctgcatcgctcagtgctttgagccaccccaatctggtcagtgccaggcccaccaacctgcagctggagactggctctctatagcatttcctgatacttccgctacttttaggcctggctaaattccaagacagataacactcaagatagataaagtacttgatctccaaactgacaaactgtttattttctagctgttattttgctatttggcatttacataaaagcacacgatgaagcaggtatcgccttacctgttgaaactgaaaataaagcttgtttatttcc

SEQ ID NO: 2069 - DNA, 1901 bp, Homo sapiens
agccatgctgaagtgcgtgatgagcggcagtcaggtgaaaggtggagcggcctttgttgtcttcccatttagcagagagaaaagcagacgttaatagtatttgggaaagcagttcaagctctatcacgaattagtgacgagttctggctagacccatctaaaaaaggtcttgctctaagatgtgtgaattcttctcggtcagcatatggatgtgtcctgttctctcctgtgttttttcagcattatcaatggtcagctttagtgaaaatgagtgaaaatgaacttgacacaacactgcatttaaaatgcaaattgggaatgaagtcaattttgcccatctttagatgtctgaattcccttgaaagaaatatagagaagtgcagaatattcaccagatctgataaatgcaaagtagttattcaattcttctacagacatgcaacgtggatggaactagaggtcactatgttaagtgaaataagccaggcatggaaagtcaagtattgcatgttctcacaatgtggacgctaaaaagttgatctcatggaggtagagagtagaatggtagataccagaggctggtaatggtgtgtgggtattaaaagaactcataatatatgttttcaagaaagtcagcctttgcaagttatttttgacaagaatgtttgtactaatacgctaatgattcaaccaagattgcttgctgatgccattgttctttttacatcaagtcaagaggaagttactcttgctgttactccactgaatttttgcctcaagagttctaatgaggaatcaatggatttgagcaatgctgtacacagtgagatgtttgttggctcagatgagtttgacttctttcaaattggaatggacactgagataacattttatttcaaagaattgaagggaatactgacattttcagaagctacacatgctcctatatccatttattttgatttccctgggaaacctctggctttgagtattgatgatatgttagtggaagctaactttattttggccacattagctgatgaacaaagtagagcatcttcaccacagtcactgtgtctttcacagaaacgaaaaaggtcagatctgattgaaaaaaaggctggcaaaaatgtaactggccaggccctggaatgtatttcaaaaaaagcagcaccaagaaggctttatcctaaggagactctcacaaacatatctgcattggaaaactgtggcagccctgcaatgaaaagagtggatggagatgtcagtgaagtatcagaaagcagtgtcagcaacacagaggaagtgccagggtctctgtgtctcagaaagttttcttgcatgttctttggagcagtttcttctgaccagcaagaacacttcaaccaccctttcgacagtctggcaagagcaagtgacagtgaagaggacatgaataatggcagtttctctatattctaatgcttaatgatggctgagctgggccccagcccagtgactggctcatttgcccctcaagcacgagtttgcatgtttagtgtctaaaagaggttgtccaggacttccttttaatggaggatgggcttttaaaccacatcatcttgtacaacaaccatatctagaaatagctgtttgtcaagtgtatgtaacttgctttaaatccattatgctacttgtgaggcagaagagttttctgtgaaggaaaaaagcccattagagttcttcaattcaatgcacgttcaccctagagcttttaacatctttgctagttttataaaggtatttaaactttattcaacagccatttagagtgccatcaagatggcttgaaatggaattttgtgatttgtagtcaggtatcttttgtatttgattgcaaacatttggattttagttttctc

SEQ ID NO: 2070 - DNA, 1952 bp, Homo sapiens
aagtggagggacggcagtcagctgaccctgcagtgtgcaggcgagcgcagggagtacgccatgtcctgagaaggggcgattctcaggctctggcagttacagcttctcctcaccctgccgagcaaccaggccacggggctccgtgcatcgccacctagagtgttaccctcttccttgttcacggaggttctccgcagtgtgtgagaaagaggccctctctcagatgaatggataaagaaaatgcaggacatatgggggaaggagccaagatggccgaataggaacagctccggcctacagctcccagtgtgagcgacacagaagacaggtgatttctgcatttccatctgaggcaagaagaataaatgtctctggtggaacttttgctctggtggaactgcttttctagaactggtgttgcagcatccctggaagtgtcagagagccctgggagtatccaggtggcccggggtcagacagcagtcctgccctgcactttcactaccagcgctgccctcattaacctcaatgtcatttggatggtcactcctctctccaatgccaaccaacctgaacaggtcatcctgtatcagggtggacagatgtttgatggtgccccccggttccacggtagggtaggatttacaggcaccatgccagctaccaatgtctctatcttcattaataacactcagttatcagacactggcacctaccagtgcctggtcaacaaccttccagacatagggggcaggaacattggggtcaccggtctcacagtgttagttcccccttctgccccacactgccaaatccaaggatcccaggatattggcagcgatgtcatcctgctctgtagctcagaggaaggcattcctcgaccaacttacctttgggagaagttagacaataccctcaaactacctccaacagctactcaggaccaggtccagggaacagtcaccatccggaacatcagtgccctgtcttcagcccagcccaggaacattggactaatagctggagccattggcactggtgcagttattatcattttttgcattgcactaattttaggggcattctttcactggagaagcaaaaataaagaggaggaagaagaagaaattcctaatgaaataagagaggatgatcttccacccaagtgttcttctgccaaagcatttcacactgagatttcctcctcggacaacaacacactaacctcttccaatgcctacaacagtcgatactggagcaacaatccaaaagttcatagaaacacagattcagtcagccacttcagtgacttgggccaatctttctctttccactcaggcaatgccaacataccatccatttatgctaatgggacccatctggtcccgggtcaacataagactctggtagcgacagccaacagagggtcatcaccacaggtgatgtccaggagcaatggctcagtcagtaggaagcctcggcctccacacactcattcctacaccatcagccacgcaacactggaacgaattggtgcagtacctgtcatggtaccagcccagagtcgggccgggtccttggtataggacatgaggaaatgttgtgttcagaaatgaataaatggaatgccctcatacaagggggagggtggggtggggagtgctgggaaagaaacacttccttataattatattagtaaaatgcacaaagaagaaggcagtgctgttacttggccactaagatgtgtaaaatggactgaaatgctccatcatgaagacttgcttccccaccaaagatgtcctgggattctgctggatctcaaagacgtgccaagccaaggaaaaagatacaagagcagaatagtacttaaaatccaaactgccgcccagatgggcttgttcttcatgcctaacttaataatttttaagagattaaagtgccagatggagttt

SEQ ID NO: 2071 - DNA, 1858 bp, Homo sapiens
aggcgtaatactcgtattgtagtaccaaatgaaaatgtgatttctgttcatcaagattcaaagtcaaaactccaaatgcaagaaaagaaacaaataaattctggagtggaaagacacaagacgtttcctttagaaatcaaaaaaaaggatatatcacttgaacatctgttgcctgaggagaaagttttattatcaagaagcgaatctcaaaccaagaaacttcaagctaaagtaacttcaagaaaaattaaaaatgaggcagcctcagaacttccagatacagcagaaaatcttccagcaatgtacccgtcaattagcgacctaataattcaatttgatttaaacaaagtggtcgagactgatatagaaagcttgagaggtgctttgggaagacgcttattaaatgatgaattcaagacacagtcaaagagtttccctgggcctgatatagaacaattgacagatgcatttggaagagatatactaaaggatgaattcaagacacaatcaaagagtctccctgagactgatgaacgattgcatagtacaactgagagaggtacaataaatgatgcaattaagacgcagttaaagagaaagagttaccctgagactgtcttaaaacacttgaaaggtgttaatggaaaagatataataaagcatctaatcaacatacagtcaaagagtcatgcagagactgataaggaacacttagcagatgatactggaagaggtataataaagggatcaatcaatgcacaactaaagggtcaccaaaagactgataagaacttctttgcctatgctactggaagaggtctaatgaaggagtcaaccacgacacaattaaaaagtcacccagagactgataaggaattcttggcagatgctattggaagaggtataataatagggccaatcactacacaactgaagagtcaccgagagactgataaagaactcttaaaagatgctattggaagagatataataaagggaccaatcagtgcacaattaaagagtcaccaggagactgatgtagaacccttgacaaatgccattggttcaagtaaaacaattggtgagataaagacacaactaaggactcactatgatgtgaacttatttaaaaacaaagatatgtccgtacaacgtcaagaaggtatctttactaggagcattacaccaagtaaattcccagcaaaagtgatcaatttatcaccctttgaaaataaagaggaaacttatgagtactcttcaccctatgtgactgcaccttcaaaagcaatttatagaacatatagggctggtccaagcttttctaaagacatccaccttcctttactgaatcaactcccttcagggcattcgaaagttgttaccttaagccaaaaaactattgaatttactctgcctactgtgaccaatacaattggaaaacctacctataaagtgttacatgctgctgcccgaaaatctgtaccacacccatacttttgagaatgaaggaaattctgagcaagataagcaacatgacaaattcagaaatgcaggaaaggaaattgcaagtatagaagccttttgaaaataatactgactcgtgtggatggtgcttattgaaaaacagctggaaatacagtggatcaacagggtaggcccagatcacagaaggcctgaccaggcagtgaatgtgtctttaccatatggaacaattttgaacttctaagatcaagcctttttgttgctgagggtaagaaaggagctctgtgatgaggttccagcttacttctattcgccagtgtccctgtaatgctttctggtgtgatgtaaaatcaattaaacaaaacttgtgctctgc

SEQ ID NO: 2072 - DNA, 2250 bp, Homo sapiens
tttctcttggttctttttcctggggcggggatgggagattcctaagtcgactcagctggctccttccctcagtttcagtttccatcttgggtctctgagctgagcagagtggcaccaggctgagttaagtgggactgccctgggcagacctacctactagagcagaatggagcttcggtcctaccaatgggaggtgatcatgcctgccctggagggcaagaatatcatcatctggctgcccacgggtgccgggaagacccgggcggctgcttatgtggccaagcggcacctagagactgtggatggagccaaggtggttgtattggtcaacagggtgcacctggtgacccagcatggtgaagagttcaggcgcatgctggatggacgctggaccgtgacaaccctgagtggggacatgggaccacgtgctggctttggccacctggcccggtgccaccacacgcacaaggacaccgtctacaacgtcatcatgagccagtacctagaacttaaactccagagggcacagccgctaccccaggtgctgggtctcacagcctccccaggcactggcggggcctccaaactcgatggggccatcaaccacgtcctgcagctctgtgccaacttggacacgtggtgcatcatgtcaccccagaactgctgcccccagctgcaggagcacagccaacagccttgcaaacagtacaacctctgccacaggcgcagccaggatccgtttggggacttgctgaagaagctcatggaccaaatccatgaccacctggagatgcctgagttgagccggaaatttgggacgcaaatgtatgagcagcaggtggtgaagctgagtgaggctgcggctttggctgggcttcaggagcaacgggtgtatgcgcttcacctgaggcgctacaatgacgcgctgctcatccatgacaccgtccgcgccgtggatgccttggctgcgctgcaggatttctatcacagggagcacgtcactaaaacccagatcctgtgtgccgagcgccggctgctggccctgttcgatgaccgcaagaatgagctggcccacttggcaactcatggcccagagaatccaaaactggagatgctggaaaagatcctgcaaaggcagttcagtagctctaacagccctcggggtatcatcttcacccgcacccgccaaagcgcacactccctcctgctctggctccagcagcagcagggcctgcagactgtggacatccgggcccagctactgattggggctgggaacagcagccagagcacccacatgacccagagggaccagcaagaagtgatccagaagttccaagatggaaccctgaaccttctggtggccacgagtgtggcggaggaggggctggacatcccacattgcaatgtggtggtgcgttatgggctcttgaccaatgaaatctccatggtccaggccaggggccgtgcccgggccgatcagagtgtatacgcgtttgtagcaactgaaggtagccgggagctgaagcgggagctgatcaacgaggcgctggagacgctgatggagcaggcagtggctgctgtgcagaaaatggaccaggccgagtaccaggccaaggaactactataatgtctccagggatcctgtggtcatcaacaaagtcttcaaggactggaagcctgggggtgtcatcagctgcaggaactgtggggaggtctggggtctgcagatgatctacaagtcagtgaagctgccagtgctcaaagtccgcagcatgctgctggagacccctcaggggcggatccaggccaaaaagtggtcccgcgtgcccttctccgtgcctgactttgacttcctgcagcattgtgccgagaacttgtcggacctctccctggactgaccacctcattgctgcagtgcccggtttgggctgtagggggcgggagagtctgcagcagactccaggcccctccttcctgaatcatcagctgtgggcatcaggcccaccagccacacaggagtcctgggcaccctggcttaggctcccgcaatgggaaaacaaccggagggccagagcttagtccagacctaccttgtacgcacatagacattttcatatgcactggatggagttagggaaactgaggcaaaagaatttgccatactgtactcagaatcacgacattccttccctaccaaggccacttctattttttgaggctcctcataaaaataaatgaaaaaatggg

SEQ ID NO: 2073 - DNA, 2448 bp, Homo sapiens
agaatgctgatattcaggccaggcacggtggctcatgcctgtaatcccagcagtttgggaggccaaaacaggaggatctcttgaccctgttgcgacctttccttccccagcaataaactggtctctggagatcactgtagaattgtagtggatgaaaaatcaggtcaggtgacactggaagataccagcaccagtggaacagtgattaacaagctgaaggttgttaagaagcagacatgccctttacagactggggatgtcatctacttggtgtacaggaagaatgaaccggaacacaacgtggcatacctctatgaatctttaagtgaaaagcaaggcatgacacaagaatcctttgggtctgggggtggtggcatctcccctaaaggaagtggtccctctgtggcaagtgatgaagtctccagctttgcctcagctctcccagacagaaagactgcgtccttttcgtcgttggaaccccaggatcaggaggatttggagcccgtgaagaagaaaatgagaggagatggggaccttgacctgaacgggcagttgttggtcgcacaaccgcgtagaaatgcccaaaccgtccacgaggacgtcagagcagcggctgggaagccagacaagatggaggagacgctgacatgcatcatctgccaggacctgctgcacgactgcgtgagtttgcagccctgcatgcacacgttctgcgcggcttgctactcgggctggatggagcgctcgtccctgtgtcctacctgccgctgtcccgtggagcggatctgtaaaaaccacatcctcaacaacctcgtggaagcatacctcatccagcatccagacaagagtcgcagtgaagaagatgtgcaaagtatggatgccaggaataaaatcactcaagacatgctgcagcccaaagtcaggcggtctttttctgatgaagaagggagttcagaggacctgctggagctgtcagacgttgacagtgagtcctcagacattagccagccatacgtcgtgtgccggcagtgtcctgagtacagaaggcaggcggcgcagcctccccactgcccagcacccgagggcgagccaggagccccacaggccctgggggatgcaccctccacgtccgtcagcctgacgacagcagtccaggattacgtgtgccctctgcaaggaagccacgccctgtgcacctgctgcttccagcccatgcccgaccggagagtggagcgcgagcaggacccgcgtgtcgcccctcagcagtgtgcggtctgcctgcagcctttctgccacctgtactggggctgcacccggaccggctgctacggctgcctggccccgttttgtgtgtcgggcagacagtgctttcctgcgacatcattataaacaggtaacattgccccttcatctcggcagagctcaacctgggtgacaagtgtctggacggcgtgctgaacaacaacagctacgagtcagacatcctgaagaattacctggcaaccagaggtttgacatggaaaaacatgttgaccgagagcctcgtggctctccagcggggagtgtttctgctgtctgattacagagtcacgggagacaccgttctgtgttactgctgtggcctgcgcagcttccgtgagctgacctatcagtatcggcagaacattcctgcttccgagttgccagtggccgtaacatcccgtcctgactgctactggggccgtaactgccgcactcaggtgaaagctcaccacgccatgaaattcaatcatatctgtgaacagacaaggttcaaaaactaagcatccagaggccctgagcagctttcagcactggaggtgaagagagcgtgtttttaaaatacagagacaagcacgtcaaggtgttttcacagccccctgagggaagggacgcagggtctccgacaggtgctctggggtgactcttctgtggagctttttaccctctgagtgagaccctccccagagccccgggggccgcagcccgccctcctggtgagcgctgggcagggctcatggtggcatcagcagcagagacgaagcctttctgtaacatgcggccgtcccgccgagaggggcagttttgctcttttgtacattttccgaaactacagttaaagcagaagtctgttttcaggaaaagtttcaagggagaagggcaagtttatcaaaaacattgtttcaggagaagggagcataagtttacagcctacaggacgtacacaatatcctgctgctgggaaaaccacagcattttatctattttttattttaataggtttggtgcttatcttctaataagatttaaatgtcacaaactgtagcacaaataatataatttataatttacaaattgactaaaattgggtatagtatggtatttgaaagaataagcatatgcttctgtttattaaaaaaagaaaccttc

SEQ ID NO: 2074 - DNA, 1721 bp, Homo sapiens
agcttcatctccagctggcctgcctggaccctgactggaaaatacctccccactctggatggccagggtggcacctttgtctattcccataattataatagctcacactgatgcagcactcactatgtaccaggcactatcctaaggcctttccagattaaaaaaaaaacaactggggaaggagccaagatggccgaataggaacagctctggtctacagttcccagcgtgagtgacacagaagatgggtgatgtctgcatttccatccgaggctcatacgtaaaaggaacttgccttgtctcagatgaaacttgctattttggacttctgagttaatgctgatgtgtgacaaagaacaatggatagattaccaaacagagccattttatttgggagttctcatctgggattgtcatcagaagagaagatagaaacatcagaatgggggtcagaggcagaaggacagatctgcagtttccaaagcccacgggctcatttcacccatttcactcatgactccatcctcaacctgctgtggcgctcatatcctccagtcatgccctagagacttcgaatttccatcagcctaaaaagctgtaacatacacataatgggaatactggtggttcctaggaccaggtggagctggccagatggcccagatgaacccacaacttattcttcagacaccttttactatccagggtcaaacctcaatgtctcctgccttgcgggctctaacccatcagtagagcattcttggctgctgaatgggaataaccagcaaacaggacaagagctctttatctcccaagtcactacagagaatagtggggactatctgtgttatgtccataacccagtcactaatggcaaaaacttcgcaaccaagaaaatcagagtccctgatacttcagtacaagaagtactcctggcctttcaggtagagccactgtcggcatcctgattggagtactggccagtgtggctctgatctaccagccctggtgtagtttatttcaggaagactggcagactggacattaccctgaattctactagttcctccaattccattttctcccatggaatcacgaagagcaagacccactctgttccagaagccctataagcgggaggtggacaactcaatgtaaatttcatgggaaaacccttgtacctgaagcgtgagccactcagaactcaccaaaatgttcgacaccataacaacagctgctcaaactgtaaaccaggacaacaagtggatgacttcacactgtggacagtttttcccaagatgtcagaacaagactccccatcatgatgaggctctcacccctcttaactgtccttgctcatgcctgcctctttcacttggcaagataatgcagtcattagaatttcacatgtagtagcttctgaggataacaacagagtgtcagatatgtcgtctcaacctcaaacttttacgtaaaatctcaggggaaatgtggctctctccaccttgcataaagggctcccaatagaaatgaatacagagatattgcctgtgtgtttgcagagaagatggtttctacaaagagtaggaaagctgaaattatagtagagtcccctttaaatgcacattgtgtggatgactcttgccatttcctaagagatacattgtaaaacgtgacagtaagactgattctagcagaataaaacatgtaccacatttgct

SEQ ID NO: 2075 - DNA, 2428 bp, Homo sapiens
aaaactctttgcgtagatgagggatggcgccggcgcaggcctgcgcgccacgcgctttaggtggatgagggatggcgcaggtgcaggcctgcgcgcctcacgctttatgtacatgagggatgaggcagcacaggaattggcacaacctgaagtcagctctgcagctttccaagcttcgttctgcgtgtcctgtactcaacagtcatctcatgctgcagggtggctgcgtgtgctccgtacatcacacccatatttcagggagaagactgcacatataacacagctctgcatggaaaaccttccgcctggaggggtggcttcctagaggtgtggcgttgccctctgtcttgaacaggctgtgagccgttttgtcatttggggtttctagatgcaaacagcagaagctgctggccaattaccaaagggaacgtgctgttaggatatcagggcctgggagctgcagcaatgtgggctgacagcagagagctaaggcactttccgaggtgacgagctgggctgctatgctggagacggctgggcagaagcagttagcagggcatttccttgtgtccttatctcaagagtcacagtttcaggagtgagcatctcagaggtcagggttcattcacatgccacctcccttctcactgtgtcattggggaggggccgtctggaccctctggctcctgtggcaagaaatggtcccatcaagtcatccaagggcctggaagcctcccaaggaaagcaggagggctgggtgctgagcagcgtccagcagcaaaggtaggctccagccccgcaggtgtggctgcgccatcccagggaacgtgccccagcaagtgctggtgctgctctcactacaggtggggttggtttcactggacaggtggcacttcctcacctcttgccctctggacccacggcaggcactttccagggcacatcacgtgggtgtgcggtctggctgctgggtccacgcgggttctcaatcatgacctggcttgcaagctctttccacagttggataaatgaagccgttggggaagtatccgcaaactcttacagtgagtatgtgataatgacacacgcgtggcccttctaagacctccgctaggcattatcagtgactgtgctcgtgagcgccgacctccgctaggcgttatcagggactgtgctcgtgagcgccgacctccgctaggcgttatcagggactgtgctcgtgagcgcggacctccgctaggcgttatcagggactgtgctcgtgagcgtggacctctgctaggcgatgtcagtgattgtgctcatgagggcggactttcaccagccacgcttccgaggagtggagtctttctcagctctgcctctccaagatgaccatcttgtgaagacgatgcgttctttatacacaagttctgtgtgtgtgtgtgtgtgtgttccacacacaggaccaaagttgagataggcgcacattttcttggtcccacttgtggccccagtcggctgtcagaagtgggtgtgctccacatgtacccaccatgttagggcacagtgctcacatttcacacctcagcaggtgccttgatgttgaccagaggccccaaaatcatctctttctatgacttctagatcttagattcccaggaactgggaaatgcagtcagtatcttttgggtccaagaaactttgtcagagcccttgtgggagaaccatagattctcaccagataaacagaagagcttcgtgttagagaaacccgcctgtctccccacattctcagttttctggagagcagctgaaagccatctgggtggagattaagagctccaaccgtgtagctttgatgtatcgggcaagttgcttaagctctttaatgctgtttcctcatttattgtgtgaggccaaaaatacccattccttaaagttgtgaggattaaaaacagtaatgaaaagtgagtggcaagtgccgagtacacagtcaagtacctgatactttttagtgtaaggtaagtagcaagaaagcatgaaatttattttcatttactcttactacatgtggtaaaccatctatgcacagagcactgcattgggtgccatgaatgacagaataagagtaccaggtgcatgaaaagcttaaaagacaaatgagacagagctaggctgcagaagacttaaaaagttgatgtatttaacttttaatggacacactgtacatgtttatggggtacgatttgttgtttccatgcatatctgtgttgtgtaatgatccaatcagggtagtgtgtgtgcccatttcctcaagggtggatcattatgtgtatcatcgtgcatcatcatgtatcatgcatgtaccatcatcatgcatcattgtgcatcatcatgcctgtatcattatgtatcacctcatgcatatattataatgtatcacctc

SEQ ID NO: 2076 - DNA, 2158 bp, Homo sapiens
acagatgatgccccagattcccagcagccccacccctgcatggctgaggaaatgcttccaccacctgagcttctacctgcccatccagactggctctctgcccttaggccctcagtctccgcatcctgccttcctggtctcccagtaggagacctctgcaggtactgtcacctggagaacccagaatctggaagggaccacagggggactccaagcagagctctgcccatggagcccacactggctgccatgtcccttcagcccagctcacagaaatacatcctaaggaagagatgccacatctactatacacagaggtctctgaagccacacgttcatattgtttcaacaagcattgaacaactaatatttgctggcacttaggaaaaatattaggtacaaggagctccttgaaggcagggagaaaagacagactctcatacacaagttcagttagataacaagcagtgagcaggcaactgggactaaatgctaccatcttctgtattgatagagggatcactgtattatagcaccacactcggatgtcagaaacatcttggccagacacagcattaatacaggaggcatgaagctgactccctactcatcactgcaatacaaagtcaaaaagcctctatagctctcccagaacatggatcagattgttatgggaggtgagagaagaacgatgtgatatttaatctgttctctaaacatacacaaagagacaagaggtgaaagggcttggatggttcactgagggagtggtcccaaactccagagtagttcaggctgggtggagcagtgggaacatagaagaagagagttgaaaataaagtgagaaagttcaattaggactttctccaaatcacaatggacccccgggcagacagaaaagttcaaattttattctgtaaaccataggaagccattgaatgttcattaaggggggattccatcagaactgcgattcagaaggagcctccactggctatgtggagagcagactaggagctagaagagtggccaggagatgaaagcaatgcaccagggaagcggatgatggcctgaacgagggcagtggtgatgggatgcacaggaggtatatgtcagaactcatacagagaaagaatccaaacagcttggtgggtggctgaacattctgggtaatgatcaaagatgcctgaagtgttggggaggatgacaatgccgccttcagaaggaggaagaacaggtttaaaagggaagaagatttcagactcatgccctggatggatgatcaaagaccaagcagcaacctcagggcttgtctatgtgggttggagggccctagaagagcttgttgcacaggaggagtggtctggggcccagggatactgggctgcagaatctcacatgggcaccatggaggaaccagcagcccagaaacactccccaaggccctgtctagtggccctgggccaagctgcgagctgcagcctctggggcctgtgaagccctgagtacctcatggggactgtaaatatttgcctgattaagagccccaaccagagactcagcaacagctcctccatacgcagtaatcgacacatcttccgtggagggcttagagaggggaagccatctcaagtgatggcacttcacactcagcacttgacattcccaggcactccacaggcattagctaattagtccttgagtctgtttagcccccaaaagaactcccagaggttccattcatgccccatgtgcagggagtttcacacccttctgagtcaggatccagagcattggggagacagctttgcagatagccactcgcccactcactcccttgcagagaaatcaagtgtctgcaagggagccggaaagaagaagttttcactgtgtcatattcttcctgggaaagagataggagacagagaaagggacaggagaccagtatctactcaaatccctactagtaatgctcactgcagtttatttttctctgagcattttaaacatcttcccatttaaccctcaaaattatcctatgatatacaatgtgttttttagattgagctctcccaggaggagtcactggggcaaggattcaggtgtaagcaattgatctgggatttgaccccaggaaacaccagtcaggggggggagg

SEQ ID NO: 2077 - DNA, 1546 bp, Homo sapiens
aagtatgctgtttcaatttgatctgctatttcgggtgatctagtccctgttagttcttgacagtccaggaggcgcctggtgcatcccacggactcatttaaatgttccctgagtgcttcgtctgtgccgcacgttgctctgcgtggtggagataaatgaggagtagaagctgcgcctggcctgaaggcaccccaggtcactcttagggaaacacagtgcccatcgctgatgctcaccaaggttccggtcctgcgggcaagcccctgccatgcagctgatcgtggatctggcctctgtgaccggctctggaagttcccatgaatggactcttcctcgccttcttcccctgcctctgtgtctcgtgtccttataagaacaccagtcactggattccaggctgaccctcatccagctcaacctcatctccactctcaactatctgcagagacctgtttccacacaagctcacatcacgaggctctggggggacgtggattttggaggaacacctctcagcccactacagagccttttactaccatcaatcaaatgaatttttcaaaggcacgtctgttatacattttttttttcagtgagctttttctgagaactttttgggttcaaagcacccagatggtataaatgacgtggaaaatggccctcccaaaaagatgccatgagggagctgcacatggggctggggggagtcggagacagcacgtgtgagcggacgtgtggccggcacccaaaccagacgccatgtgattacagatcctgcagggaattacaggaggcaactcaacgtaggagattggtgtcatactaacagaaaaccaagactgaagagacaggaacgactgtccgggtttcccagacaggaccgtcccaggaagcagacaacacaggcctgtgtgcggccctggccgtgagtgtgctggacgcaggggaccgtcccaggaagcggacaacacagccctgcgtgcggccctggccgtgagtgtgctggacgcaggggaccgtcccaggaagcggacaacacaggcctgcgtgcggccctggccgtgagtgtgctggacgcaggggaccgtcccaggaagcggacaacacagccctgcgtgcggccctggccgtgagtgtgctggacgcaggggaccgtcccaggaagcggacaacacaggcctgcgtgcggccctggccgtgagtgtgctggacgcaggggaccgtcccaggaagcggacaacacaggcctgcgtgcggccctggccgtgagtgtgctggacgcaggggaccgtcccaggaagcggacaacacaggcctgcgtgcggccctggccgtgagtgtgctggacgcaggggaccgtcccaggaagcggacaacacaggcctgcgtgcggccctggccgtgagtgtgctggacgcaggggaccgtcccaggaagcggacaacacagccctgcgtgcggccctgccgtgagtctccacctttctgtctctctgggctgtggctgggcagcacggaaggggggaatcacctaccttttggtccag

SEQ ID NO: 2078 - DNA, 2782 bp, Homo sapiens
aaaaaatttactccagaaagaaatcccattactccagttaagcttgttgacagacagcaagcggaaccatggacacccacagctaacctgaagatgctcattagtgctgccagcccagatataagggaccgggagaagaaaaagggactattccgacccattgaaaacaaggacgatgcatttacagattctctacagcttgatgttgttggggacagtgctgtggacgaatttgaaaagcaaaggccaagcagaaaacagaaaagtttaggactcctgtgccagaagtttctagctcgctatccaagttatcccttgtcaactgagaaaactaccatctccctagatgaagttgctgtcagtcttggtgtggaaaggagacgcatctatgacattgtaaatgtgctggagtcgctgcatctggtcagccgggtggctaagaatcagtatggctggcatggacggcacagcctgccaaaaaccctgaggaacctccagagactaggagaggagcaaatatgaagagcaaatggcctacctccaacagaaagagctggacctgatagattataaatttggagaacgtaaaaaagatggtgatccagattcccaggaacaacagttactggatttctctgaacccgactgtccctcttcatctgcaaacagtagaaaagacaagtctctgagaattatgagccagaagtttgtcatgctgttcctcgtctccaaaaccaagattgtcactctggatgtggctgccaaaatactgatagaagaaagccaagatgccccggaccatagtaaatttaaaacaaaggtacgacgcctctatgacatagccaatgttctgaccagcttggctctgataaagaaagtgcatgtaacagaagagcgaggtcgtaaaccagccttcaagtggatcgggcctgtggacttcagctcaagtgatgaagaactggtggatgtttctgcatctgtcttaccagaattgaaaagagaaacatatggccagattcaagtctgtgcaaaacagaagctggctcgccatggttcttttaacacagttcaggcttctgagaggatccagaggaaagtgaactcagaaccgagcagcccgtacagagaagaacaaggatcaggtggctactctttagaaattggaagcctggcagctgtctatagacagaaaatagaagacaattcacagggaaaagcctttgccagtaagagagtggtgcctccatcaagcagcttggaccctgttgctcctttccctgtcctctctgttgacccagaatattgtgttaatcctttagcccacccagtattttctgttgctcagacggacctgcaggcattctccatgcagaacggtctgaatggacaagtggatgtctcacttgcttctgcagcctctgctgtggagagcctgaagccagcactccttgctggccagcctctagtgtatgtgccctctgcctcactgttcatgctgtatggaagtctgcaggagggaccagcgtcagggtcagggtcagagagggatgacagaagctcagaagccccagccacagtagagctgtcatctgcaccctcagctcagaagcgcctctgtgaggagaggaaacctcaggaggaggatgagccagccactaaaaggcaaagtagggaatatgaagacggcccgctgtcgcttgtcatgcccaagaaaccctcagattccacagaccttgcctctcccaagactatgggtaacagggcatctatacccctcaaagacattcatgtgaatggccaactccctgctgcagaagagatttcaggaaaggcaacagcaaactctcttgtttcttctgagtggggaaatccttcaagaaatacagatgttgaaaagccttcaaaagaaaatgaaagcaccaaagagccttctttgctacaatatctttgtgtgcagtctcctgcaggattaaatggtttcaatgtacttttatctggcagtcaaaccccccctactgtgggcccgtcctcaggtcagctgccgtctttcagtgtcccttgcatggtcttaccatctccacctctgggcccttttcctgttctctattctcctgcaatgccgggcccggtttcttctactcttggtgctctcccaaacacaggacctgtgaatttcagcttgcctggccttggatcaatagcccagcttctcgtcggccccacagctgtggttaatccaaagtcgtccacactcccttctgcagaccctcagcttcagagtcagccctcactaaacctaagtccagtgatgtcaaggtcacacagtgtcgtccaacaacctgagtcccccgtttacgtgggacatccagtctcagtagtaaaattacatcagtcaccagttccagtgacccccaagagcatccaacgcacacatcgtgagacgtttttcaagacacccggcagccttggagaccctgtcctgaagagaagagaaaggaaccagtcacgaaacaccagctcggcccagaggagactagaaatccccagcggcggcgctgactaacctgccgctttgccaggtgggggtgggatcaaacgccctgagagtcccggatgtccgaggcgggatgcaaaccatcccgtcctgagcacgggtccttcctctctctttcatccacacttctgttaacttcccaccaccatcaatcatctgatttcctgaaagtaattaattgtgcatttaataccagttagagttccgactctgcatggtgtcacagtg

SEQ ID NO: 2079 - DNA, 1709 bp, Homo sapiens
agtacaacttaggtgcagcccatgttacatgacatgtagctgttgaagatgattttgatgtatgtaaaattaagcatattaatctaagaatctctctccacattcgtaggatgtaatccctgttcattactacttaatacctccaccaacaaagactaagaatggcagcaaagataaggaaaaagattcagaaaaagagaaagatttaaaagaagagtttactgaagcattacgagatcttaaaattcagtggatgacaaagaattgacttcatttgcaacagaagatggagaagtccgtgtgccttaagggctctctcaaaaacagtggagaaaaaaggaatgaaaaaaatgaacagagcagagcctcagagaaatgtgggacaccattagtgcaccaaagtccatggaacaggagtaccaggagaacagagagaaagcaaaaatatattcagtgaaataatggctggaaacaccccatatttattgaaagacattaacctacatatccagggaactcaatgaactcaaagtaaatgcaaagaaatccacaaatagacacagcatgttaaaaatactgaaagtcaaagataaggagaagatcttgagaggagcaagacaaaaactcctcatcacttacaaggaaatgctagtaaggttaacaactgacttctgagcagaaacattagaggtcagaaagcagtgggataatatattcagagtgctcaaaaatctcaaccaataatcctatatccagcaaaactgtcctttaaaaatgaaaatgaaataattcccaggctggattctagtgacatttataacgaattgaaagaaacatatcctaattatcttcctctgtacgttgcacgacttcatcaattggatgctgaaaaggaacgaatgaaaagacttaatgaaattgttgatgcggcaaatgctgttatttctcatatagatcaaacagccctagcagtttatattgcaatgaagactgatcccaggcctgatgcagctactataaaaaagttgccttctgatttctgcatcattccagcccttctctgggcagccaggatccatcaggcagcatttgccgagtctgccctgcagactctggccgagcgacggatgaaaggagtgctcagacacagtgacatggacaaacaaaaatccaccctcgtagatgccctttgtaggaaaggttgtgccctggcagaccatcttcttcacacccaggctcaagacggagccatttccactgatgcagaaggaaaggaggaggaaggagaaagtcctttggattctctggcagaaacattttgggaaactactaaatggactgatctctttgacaataaggttttgacatttgcatataaacatgcattagtaaataaaatgtatgggagaggccttaaatttgcaactaaacttgtggaagaaaaaccaacaaaagaaaactggaaaaattgtattcaactgatgaagttacttggatggacccattgtgcatcttttactgaaaactggctccccatcatgtatcctcccgattattgcgtattctaaaataggaaacaagactttaaattttaaaaaaggaagttttatagtgaatggatataaaaacaaatttgtggcatttttagtctaatgcatgttttcatccactatccagtactgattattaaaatgacatgtatttatcag

SEQ ID NO: 2080 - DNA, 1823 bp, Homo sapiens
agaacctgcctcagatgagggggcccaggcccaggcccgctggtgacagccccaggaagactcagtggctgaaccaggtggagtcgtacatcgcagagcagagacggggtgacaggatgcggcctcaggcccccggaaggggctggcatggggaggaggaagtggtggcggccgcaggccaggaaggacaagtggagggagaggaagagggggaagaagaggaggaggaagaggatatgagtgaggtgttcgagtacgtacctgtgtttgacccggtagtaaactgggaccagaccttcagtgcccggaatctcgacttccaagccctgaggactgactggatcgatctgagctgtaacacatctggcaacctgctgcttccagagcaggaagctctggaggtcacgcgagtcttcttgaagaagctcaaccagaggagccgggggaggtaccagctacagcgcattgtgaacgtggaaaagcgtcaggaccagctacgtgggggtcgctacctcctggagcttgaactgttggaacaaggccagcgcgtggtgcggctctcggagtatgtgtctgcacgaggctggcagggcatcgatccagctggtggggaggaggtcgaggcccggaacctgcaaggcctggtctgggacccacacaaccgtaggagacaggtcctgaatacccgggcccaagagcccaagctgtgctggcctcagggtttctcctggagtcaccgagccgtggtccacttcgtcgtgcctgtgaagaaccaggcacgctgggtacagcaattcatcaaagacatggaaaacctgttccaggtcaccggtgacccacacttcaacatcgtcatcactgactatagcagtgaggacatggatgttgagatggcactgaagaggtccaagctgcggagctaccagtacgtgaagctaagtggaaactttgaacgctcagctggacttcaggctggcatagacctcgtgaaggacccgcacagcatcatcttcctctgtgacctccacatccacttcccagctggagtcatcgatgccattcggaagcactgtgtggagggaaagatggcctttgcccccatggtgatgaggctgcattgtggggccaccccccagtggcctgagggctactgggaggtgaatgggttcgggctgcttggcatctacaagtctgacctggacaggattgggggcatgaacaccaaggagttccgagaccgctggggcggggaagactgggagctgctggacaggatactccaagcgggcctggacgtggagcgtctctccctcaggaatttcttccatcatttccattccaagcgaggcatgtggagccgtcgccagatgaagacgctgtagccggagggtgtccgcggggcccagcactccccgctctggactagcagtggctccccagggccctgctactgttcagggatggggagtggggtgacggctggaccccaagaggcctcgaagctgacggcccactccacctggagctgtcccctcacagaggcaggttccggggctcctgtctctgcctcctgggccttcagaagggaggactttgagagagaggccaggagggaccacttgctcagtcgagaacgggaagagctcctgagaaggacaggtcaggaaggagagatctgactgagcgacaccatcctcatccatgaaggtgcacgcccacatcccccaagcgctcctcacgccaagcgctgaccaccagaccctcttctagtggacatattttattggggggcggggattttaaaaacagaaaaccgaaactgc

SEQ ID NO: 2081 - DNA, 2104 bp, Homo sapiens
agatgccctcggggttgtgtgcccacctgtttggcctctctgactgtccagtgctcagtggctctggggctgtgtaccgagtatgtgcaggaaccgccaccttccacctgctgcaggctgtgttgctggtccacctccactcccccaccagcccgcgggcacagctgcataatagcttctggctcctcaagctgctgttcctgttaggtctctgtgctattgccttctgcattcctgatgagcatctcttcccagcatggcattacattggcatctgtggaggctttgcattcatcctactgcagttggtgcttattacagcttttgcccattcctggaacaagaactggcagacaggtgcagctcaagactgtagctggttcctggctgtcctgctggccaccctaggattctacagcatggcaggtgtgggagctgtgctcctattccactattatacacacccagctggctgcctgcttaacaagatgctcctcagtctgcacctttgcttctgtggcctcatctccttcctctccatcgctccttgcatccgcctcagtggagcaaccccgctctggcctcctacaagcttctgtcatcagctgctatatcatatatctgactttctctgcactgtccagccgtcctccagagagagtaatccttcaaggacagaatcacaccctgtgcctgcctggcctgagtaaaatggaaccccaaacaccagatatctctctagcaatgctgagtgctagcatcatgtatgcttgtgtgctttttgcttgcaatgaggcctcctacctggctgaggtatttggacccctgtggattgtcaaggtttacagctatgagtttcagaagccctcactgtgtttctgctgccctgaaacagtggaggcagacaaagggcaaaggggtggggctgcgaggccagctgaccaagaaacccctccagctcctccagtccaagtccagcatctttcctacaactattctgccttccacttcgtcttcttccttgcctcactctatgtcatggttacccttaccaactggttcagctatgagggagcagaactggaaaagaccttcatcaagggtagctgggccaccttctgggtcaaggttgcctcatgctgggcctgcgtactcctctatctggggctgttactggcaccactctgttggccccccacccagaaaccccagccccttatcttgaggcgccgccgccaccgcatcatatccccagataacaaatatcctccagtctaagtccttttcacaaactggggttcccctgacattgtactcctagagttggctcaaggggagctgtccagcccagctcaatacctcaaggacacacagggagttatctccgtttgggctgaagtcaatactatgaactggaagaagtggtcaaacacagtctaatgtgctgggcagagtgtctgactcactggagctactgttacatctgcatcccagctcaagagcctaacacccaaatcagcagctcaaagaaccaccgctgatcccagcagacagtgtggcaccagccctttcctggctcttgggctggaagtgggggtggggaaagaccaacagggactgaagactcggctctgcccttggagaaaggaaaataaggagttcagccctgggcacacggatataagaagcccagaaccacagaacaaaccagggcatagaagaaaggagcacagaggctaccccaggttttaatcctgattttgaggtcaagggaagcgggaagacaaaaccaccctcattccatgaggaatgacagaagagaaagtgaacgcttgacagcagctgaccacgggaagtcggtgagcagcaggattttttggccaactttcaagcagacgaacaaactggggaagagtgaggaaaagaggcataaacacagatcttgcagcattcactcttaggccaactccatcctagagatggtgttcaagggtggggaacaaaaatcacagaaaagaagtctctatggttcttagaggattcctctactgcatatccggagtacttgtttggttgtcattgtataataaaggcttcttctgtg

SEQ ID NO: 2082 - DNA, 2136 bp, Homo sapiens
attcacctttcaagcaaggcaaagtactccaggccatggggagtccctgaagactcgatgaactgcagtggccacatcaggaggttgcaggttaaccagaactcaccgacacagcaggagagcagcttggaacctgcaacctagccaaaacctagtgccttggattgggggactttcccataagcaggcagaagaaaaggcagctgtggtgtgtgatggacatggatgcagtggtgtccaatgtggggtcagccctagaggagagacagagagagagacagaaaagtgagagagtcctgacccttattattaacatgggatctgcctgcaaatgctgtttagggtcatcgcctcttcctgtactgctatttttgagagtgatgctcctgagccccacgacccagtcaaatttgatgtccctttgagccagattcagtgctgggagtccagtgtgatctgcctggatcttgctgcattgagaacaggccagatcttgaccccaatacaggggctggatatgaacaggcaacagctgggtttctgagtcagaaagacttggttaattgctaattgcttaggcaagtaatttaatttttgttgcgtcagattcctcagctacaaaatgcacatgacagtacttattcctccaggttgtggggaaaatggagattctaagcacgatgtccatttcacagaaagataccaatttggtggcttatttcctttctaccttcagaagtggctatccctgccacccaaacagacccttgactctcaagtggacggggtcccatttgcacagggggagaccttacagcctacgttgagtctatacttaccacttagtgagcatggtatccactcaggggcctctgtgggcatctgtctcctctgcagcatctttcctccccactgctgggtctgcacatgaccccctccttgggttaggcctctgatcagtgatgaccttggtatggtggtaatggtcagtcttggcatcaaatgagccagtttatatcatcagctattcaataaaatactaatctaggtgtcgccttgaaagtattttgtgacattgttatgtacatattgttacaaatgtgcatgatgcatttactacagcatagaattttgcctgggtgccaccctgaagtctgtccgacagatcatagccatgttagtcccacagtcgtaggggccaattgattaaattattttatctcccttgagaactaaaactaaaatcctaaggcccccacccatcttaacagaccccctgttggccaatggaacctcaaataaatcttaaaattcagttcttggccatgacaggacaggaagtcagacatacctccctgtacctccctccctcttatggtttagacccaacaactgaacagcattgatgttaaaatagagatcatgagactgacagaacagactctttgtggcaataagacctcaaattataaacaggacctagggccatgccaggcgagggttaagtcttgtaccctactcttaaagaattaactagattctagctaccacatgtgttttatttttctctagcagccaagcaagcactggctgtgagagatggctgtgagagaagattaaaacaattacaactcacccagttcacagatgctgagtaactgatctcctgccccactaaccttaacgacagctttctctggacaagggactgatttcagtaactttctcctgataagagaccatcctccatggactggttctggccagttttagaggctgtgcctttacgaggctgagtaccttcatgtccctgcttcactttttgatgtgtagggcctaattataatacatttaaatgtcaagtctccaccccagaatgaacatgcatgtttattgaatatgcatgtgttaggacctcttttatgagtattctcataaaatgatatagctcctctgatatcctattgagtatgtatatgtagccaactcatttggctcaaattcctgtcctctccctccctccctggaaatgcctgcctctggccttggctgtaggccacacttcccagcctgtcataatggccaccttgcagactgcaaacctttataagaaataaagctctcttttctaaattt

SEQ ID NO: 2083 - DNA, 1751 bp, Homo sapiens
gtacactgtctctacaggccaggaaagagttgtgtgtctttggggtcccttccgctccgcctagggttcccggccaggccgagagaccaagcagggaccatgcgcgtgttggtacccccggctgagcgcagccaggacacacgcgttggggccccagcatggcgcgaggcagctcaggccatggcgaggaccgcgcacattctgaccgatcgctgcgggcaggaggcggtgaccatgtggcagcccaaggacagcgtgctggacccgaacgtggcccaccacctcggccgcgccgcctacatccagccctggcgcttccgcgtggagatgatcaaaggcggcggcaccttggagaagccgccgccaggcgagggcgtcacgctgtggaagggcaagatgaagccgcccgcctggtacgcccgcctgccgctacccttgcaccgcaaagcgcgcgccctgcagaccaccgaggtggtgcacgcgcacgcgcgtggagcgcgcctcaccgccgcccgcctcggccgcgcgcagcaccagattaacgggcgggtgcgacagctgctgcgccagcgcgaggtcaccgaccacaggctcagcgaagtgcgcaagggtctgcttattaaccagcagagcgtcaagctgcggggctacaggcccaagtctgagaaggtccctgacaaagctgacagtatgcttacatgggagaaagaggagctgaaaagcatgaagaggaaaatggagagagatatggaaaaatcagaggtcctactcaagaccctggcctcctgccgagacactctgaacttctgcttcaaggagcggctccaagccgtggacctcatgaaccagcctctggacaaggttctggagcaggccagacgccactcatgggtgaacctctcccgagcccccactccacgcacacagggtcagaaaacgcctcctccagaccctgtgggcacctataacccagcgtgcgccttggcgctaaacgaagccaagcggttgttggtcgagtccaaggacaccttggtagaaatggcaaagaacgaggtggacgtccgggagcaacagctgcagataagcgaccgtgtgtgtgcctcgctggcgcagaaggcgagcgagaccttggagctgaaggaaagattaaatatgacgttaggactgatgaggggaactatcctccggtgtacgaaatataaccaagagttgtacaccacccacggtctcatcaagggtcctctgtcgaaagttcacctggagaccgcagaaaagctggacagacccctggttcgcatgtaccagagacacgtgggcacccaactcccggaggctgcgcgcctcgcacagggcaccgacaagctgcagtgccacatcacgtacctggaaaagaacctggacgagctgctcgccacgcacaagaacctcagctggggcctcaactgcaagaacatcgggcatgaggtggacggcaacgtggtgcgcctgcgcctgcgccagcggcaaccgcacgtgtgctacgagcaggcgcagcgcctggttaaggactgggacccgcgcacgccgccgccgcgcagcaagagcagcgcggacccctagtgaccccagcgtcccccgccccagccagctgattggatgctggctgggacctcggagagcagacacagccccatggccctccctctcccctgacgcaccctccctccaagcaccctctaggagaattataattaaaaataacaataattatc
